United States Patent Application Publication US 2011/0189663 A1 - sequence listing, part 4

SEQ ID NO: 5633 - DNA, 134925 bp, Homo sapiens
  LOC442016 gene - 54563983 - 54658907 of chr2; NCBI Entrez Gene ID: 442016; Build 35; sequence includes 20,000 bases upstream of initiation codon and 20,000 bases downstream of termination codon of the gene
agtaatctaattttgtattcttttccatttaatactacatcataatcattttttctgttgtccataattataattttaaagaaaaataatttttcatggagattttaatgtcacagtttacttagccgtttcactgttattgaacccataggtgattctccattttttggctaaaatagattatactataatattacctttgtgtgtggaaagcttttcagctagtagattattttaagggcaaaaaaggttataaatatttttataacataaagtgttatactctcacacaaccataatgactgttgtagtttaaaattttactagcaacatatatataatatatattttatacatatataataacttacatatattatatatatacacacttttgcaaatttaatcagaacctcaccaacatgatattttagatgactttttttctgattcatcaactataaaatgttactttatattttatttctgaccttttcctttttcctggtgggaagaccaggtaactagtccagccagggtgaatcttataggaccatagctggggcaagatagtttcttacctaaagctaagttaaaccaaaatgctatagttattatctttgaagggtatatgtaaaagagatttgggctgatttttattttcctccttgtttttttctaataggaaaatgaattggattacttaagtaatgagtataatgcaaatgctgcttaggtaatgactataatgcaaatgctacttaggtaatgagtataatgcaaatgctgcattatactcattacctaatagcatttgctatttttctgttaatgagctgaactgtggtataggtgtgtaagctgaagaggagggtccaggcaggtcacccaaacatggagagccagggagccgagcaggaatccagggaggtaaggccaaggctcaggatgtccacggagaccagagcaaggaacagcacatccgagtgggcgagggttcctgtgtgctcctgaagcaaggcaggagacagaccagaccattaaaaggcccagggaagaacagattgtttctttgattgctgcaaaggcatttccttgctgttcttattaatctggagtaaattatctacacacattctacaacatggctttgtcattataatattgatttattcattcctttcacaaatatttatcaagcacctctcatgtgccaagtactgctgtaagcactgggaagcagcattaaagaaaaaagacaaaagtccctaaccagagaggaaggttacttgttataaagaaataaaaaggggccgggcacggtggttcacgcctgtaatcccagcactttgggaggtcgaggtgggtggatcacttgaggttaggagttcgagaccagcctggccaacatggtaaaaccctgtctctactaaaaatacaaaaattagggaaggaaggaaggaaggaaggaaggaaggaaggaaggaaggaaggaaggaagggagccagttcccacaggatctcacaggccatgctaagaactagggattgttacgttctccgtatgagcaaatgtagttgggttagcaatgacttacactttatgtatttatttatttatttttgagacacggtctcgctctgtcagtctgttgcccaggctggagtgcagtggtgcgatctcagctcactgcaacctccatctcctgggttcaagcgattctcccgcctcagcgtcccgagtagctgggattacaggcacccaccgccatgcccggctaatttttgtatttttagtacagacaggatttcaccatgttgatcaggctggtctcaaactcctgatctcaagtgatcctctcacctcaacctcccaaagtgctaggattacaggtatgagccattgtgccagatcaatttaccctttaaaggaatcacaagttgctgtttggagaagagatttgttgggaggagggatgttgtgtaggaagcaagagtgaaagctaagagaccaattggaagttgctgtaatagcctaagtgaggaatgctagaggtttggactaagatggaggcaatggaactggtgaacaatagtcagattctgaatcatttttaaacatagagatgacagaatttgctgatagattaagtgtggcatgaaagagaacaggagacagcatgaaagagaacaggaggcagccaccatgaatcctaggtttttggcctgaacggctaggttgtgaatcagtaatgccttttaccatattttagaatgctggaggaggaggaggtttggaggagaaaatcaaaagttcgcatatcttaagtttgagattagatacccaagtgaagatgttgagttggcagttgactatatttgtttggagttgaagaaaaccaaaatatttcacccaaaatacatggtccaagcccctattctttctgtaaacctcaagatggtatataagcttctgaatcccataggaggttcaggagtaattactctgtggttctctcccatgcacattaataaatttatagccatttatcctattaatctgccttttatcagttgatttttcagcaaaccttcagggagtgaaggggaatttttttttttttttggcccctacagagttcagagcagagacctggaggggaggtttaattttagaatcaccaacatataaagccacaagcctggatgagatcaccaaggcagtcagtgtaggtggagaagagaaaaggctcttcaacaagcagaggttggggaggtgaggagagttcagcaaaggtcactaataagtagcagtggctggagagatgggaagagaatcagacgagtttggggtcccggaagccccgcaaggaaattgtttcaagaattgcttcaattaactatgtcaaatgctgctgaaaagtctagtaagataaagactaagaattgatctgtaattatgctctggagcttgctaaactctcaaatgcctcaagtagataaaaagccatgaaaaagcaaacccagcaattgtctctccctgtactattccaaaatgacatcgacaggatagatttgtctttatgtaaataaggatccattggctggtacctggaaatcccaaaatttgttgtcattccttgtttgagatgtaggttattgtacttgggcatgcctgaggttgcttttcagattaaatggataataaatgcaaagtgtaaggaacagggtccagtgtagtgtagatgttggcggcgttagctataattgtaactcgacagtattgagtcttgcttcatttttagctctcatttcaggctgttgcttagcagtgttccaaagataagcactaagttttctggaaatgattgaaagtaatcacagcatcttacagctgaaaggactgtagaagttaattactccattctcttcagttggcagataacagagatccagcaatattagatgactttctgaaggttagctaccacattagtggagggactcagactagagcatgggtgtcccagtgctgagtcctttaaaattagttatagtagagctcacaattggagaattgagcattccatgacaagggacttttttcagatgactgaagcttattccttttaaccaccaaaacttaataacaaccattatcacttttttttttcttccagacaggatctcactctgtctcccaggctgggatgcagtggcatgaacatagctcactgcagccttgacctcctgggctcaagcaatcctcctgcatcagcctcctgtgtagttgggatcacaggcgtgcaccagcatgcccagctaatttttttattttttgttgagacagggtctcactttgttgcccaggcttgtcttgaactcctgggctcaagcaatcctcccacctctgcctcacaaagtgctgggattacaggcatggcccattatcacttttgattaaaatcctctactgcttttgattaaaacatgtctatacaatgaagtcattctaatctagagggtttgaagtcctcaaagtcagtttttcttgttactttctttaccagttgctttaaggtttgagcaatccctttgacttgtaaagcaaatgacaacttaattcgattgtgttacaatattatcagattgatcctttgatattttttgaaaagacagaaatccaagaacagcaacaagcatgtgattctgcctctaagagcatccacgattttaagtatacatttatttatattatacatgcatatagaactataaatgtattattgtggagatctcagtgcacaacgcagacctgtaactcatgaagaaattaaccttaaatgagtcagtattacctttccttcagtgtgtcagagtacatatggagctttatatatatatatatatttactgaaataatttttgtctctatagcattttttcatagagaaattctgaatcacttcattaaactcctaaatactgcatgagaaatgagagatcagatattattattcctattctagaaatacaaaactaacgtccccaaatattagatatgcacaggggacctatacaaacaggaacaaagcccctttctctcttctgcttctcatcagtcaatctttgagtctcatccaagagtctgaatttagccttcagtattttcagctgttccaggaatagaccctgccagaaaacaaagcccactgattcctggtgctcacaaatccaccctcgactcttcccatcactagtgaccacaggctccgcctctgccttctctaaggtcatgtgatctccgttgctacaacaaccgagaatccatcacattttgctctggggtagctcttaagtgtaaattgctagtcacactctatccagtcttactagatcaactgagctgtgcacgtccagagaatgggggagcaagaaacaggccagaaaaagtttccttccttccctatctcgattttggtgcctttgattaatgatagatgttgttggatgctgggtatgtggtatgtcctaaaggaacagctgacatctggataattacaggatggttgggaggattaaaattaaaggaagtaattattgtgacgtgcttagcaaagggcaaagcatcttgctcaaaggaaatgttcactaaatgttcgtggtgtgattattagtatttgtagcttcgttggtaaaatgtgggaagagctaataatcatagttgtggtttatttaatttataaataaattaaatttatttattaaattatacttacatctcacgataagattacaaggtcattatcattttcctcattccacacgtgagaatgtagcagacttgggatgtgacaaaggtttctctgactttaccaagcttgttcattcatttattcattcactcgacaaatactcaccaagttcctgtgtactaggcactgagctaggcaaaggtgaaaaagacagacctggtccctgctttcatgagatttagagtctaaggaggggtacaggcaggtgaaacccaaatgtcatcacgttccaaggtcagcccccattcttttttttttttttttttttttgagacggaatttctctcttgttgcccaggctagagtgcaatggtgcgatctcagctcaccgcaacctccgcctcccggattcaagctattctcctgcctcagcctcccgagtagctgggattacgcatgcgccaccacacccagctaattttttttcgtatttttagtagagacggggtttatccatgttagtcaggctggtctcaaacttctgacctcaggtgatccacccgccttggcctcccaaactgctaggattacagaagtgagccactgtgcccagcctggcccccattcttgccctgacactttgaatgcaaaccttttaaaataaatccactcatattaggcaaataagaaaagctatttcactgaagaatgcatagggaaaacctcaggaggtacagagtttacactccacaacacatagctctcctctccccgtaagcatctttgtcctctgcatcacctcaatccttaaactcctcaccccaccctactctaccctcagtctctcagcccaggtagaggctgctggcccaggatcgtccctttcacactatgactctcccctctgtatgccagaccacttcagccttacatctgaactcttaaaagggtcctcccattagccagataccccctccttagaagatgaccaccgaattataaagaaactattttttcttcttgttccataagcaaacaggcagtcctactgtgctgaaaagacacaaggaaagacttcaaatctggacatagggcagcagggcaggtgtcctggaaaaagtgatatctaaactatgctagggagtatagttgcctcctcaacatccattgttcaactcttggtaactattccaatttggtggtggaggcaggagtaggggatatgcataccttctacatgacgcctacctgctttggggagaggcaatgccgtggctcttagcacaagcctaagctaaatggtatcatttcatacccctagccatacttattgggtcaggggtgagtaaggacctaatctgggcaatgagactgaaagagatgtttgtgggaaagggggaggcagcatgggggaaggggcagtctaggaaagaaacaatttctttcaaagaacacaaataaacaagagtgccggcgtcactaccgctcaccatctgatcaccacgtggaccaccagcctcagcaggaaggctatgctgcccagcagagtaagaagctgaagagaaactgaactcttcctgacctggtagagctgctaaaccaaccctggtaatgtgagcctttcttatctaaggcagtagagcttcagctgactgttacttgcaatcaaatccaacctaactgatacagaaggtgagatctgatcaacaagtggccaataaccttgagaagggcgtaggcaagtctcagatctacaacttaaagaagttgtccatttaaatgaggcagtttgattttcaagaaaatcataaaatacaggacaagtcctacatacccttaattaccagctagataatacaacaagaaaagatatctgatttatagtcacacacaccatatcacaaatttccaaacttaatttttaattattattattatttgagatggagtctcactctgtcactccaggctggagtgcagttgtgtgatctcggctcactgcaacctctgcctcccaggtttgagtgattctcctgcctcagcctcccgagtagctgggattacaggcacatgccacgtgcccagttaatttttgtatttttagtagaaacaggtttcaccatgttggccagactagtctcgaactcctcacctcgggcgatccgcccacctagacctctcaaagtgctgggattccgggtgtgagccaccatgcctggccagatttccaaacttaaaatggctaggaactatgtgatgtgacttttaaaaagaaaaccttcaaaactttgttagaacatttaaaagatgattcaagtaagtggagaaatagagccaattccaagataaaaagacttaataacactaaaatgtctatatgaccaatagaattaaatttgaattaaattgaatttatagatttaatactattctgatctaaagcctagtaagtatttttttttaatggagttttgctcttatctcccaagctggagtgcaatggcatgatctaggctcactgcaacctccacctcctgggttcaagcaattctcctgcctcagccagtagctgggattacaggcatgtgccaccaggcccagctaatttttgtatttttagtagagatggggttttgccatgttggccaagctggtcttgaactcctgacctcaagtgatctgccagccttggcctcccaaagtgctgggattacaggcgtgagccactgtgcccagcctaaaacctaataagtatttttaatttcacaaaattatcctaaaatgtatgtatgaaaataataagaataccatcaacagggagtataaaaaagacacagaaaagtttctaccaatatcagccattaaaacttgctatataataaaataagaattaaaataatgcactaactagatcatagattaatggaaccaaatgaagagactaaaaaggcctaataatttacagtagcatttttgtgaaataaagtttaactataaataattaaatatatgtacacacttaaaatatatctatcaaaaatagcttttgaaaacagcaggagggaaggaaagtgtgtacagacacgcctagttgtctgactaaatggcctttcccaaacgccttctctcctgctgttttttctatagaaagagaaatatgaaatactttcccagccaccattgcgctaggtgtgaccttatgacacagttctgactaataagacataagaggcctgggcacggtggctcatgcctgtaatcccagcactttgggaggccaagacaggtggatcacctgaggtcaggagttcgagaccagcccggccaacatggtgaaaccccgtctccactaaaaatacaaaaaaaaaattatctgggtgtggtggtacgtgcctgtaatcccaactaatcgggagactgaggcaggagaattagttcaacctgggagtcggaggttatggtgagctgagatctcgccactgcactctagcctgggcgacagagtaagactctgtctcaaaaaataaataaataaataaaaataaagacataagagaaagtctgctggtaggtttggaagaaaatgtttgttttcctgattaaaagaactgacgtggctcttactgcccttccttcctgctttgaatatagaggctcagcagccatcttggaatcatgaggaggtagcatgagagaagggcccagagcattccagtctccaggacccacatcacagagacaccaaaatgctgccaaccctaccaactgcgacttcctataaagtgagaagaaaaagcccctttttgtttaagccactgttagttggattttgttacttgctatcaaataatataactgatacaagttttatttgataagaggttttggaatttgtgatagcaattttaaaagtaactaagtacttaatatactctaggtggattaagttaactttttatgttgaaaaaaagaacagaacattgaataaaatatttagcacatctgtgaggaagaactttttcttgaaattttataaggaattgtaaagaaagagataggtacacacatgtatacattttaaacttctgtacaatgtaaaaaagcaaaaacagaagaaaacaaaatataaaatatgaaaaatatatatcaaatacgatagactataggatcataaataaaatatacaaggagcttattcaaatgtattagctgtatttcatcattttgataaatgggcaaagactatgaacaagcaattcccccaaggagaaacagaaacagtaaataaacacctgagaaaatgttcagccctaggagtaatcaaagaaatgcaaattaaagcaaccttgaaatatcatttgatacctactaaactagcattttgaaaaatgatgggttggcaaggtgacagcgctattggcgcactcatccatttcaggtggcactacaaattagtaccacttttgagaaagcaatatggcaagcatggagaaacatccatgccctttggcccagcaattccagttcttgtaattggcactaaggatagtaattcaaccgaagcaaagggacagactccacactgttcttcagagcctcagcaattcaattaaatccaattaacatatattttacaccttccttctgccaagcaaaggcaacagggagtcagaaattaataagacactgtgtgtgacctcagggggctcacagtctggcaaaggagccaggtgggtaaatacattacaaaacagtgctgtaagtccagcagtggaaacatagatgaggtcagaagagcttgattttcatgatgaggtgggtgaggtaggtaagcagagagctggcagagttgagaaaagattatgaaggagaccatgtaaaactatggggaaaaaggcaccaagaattaaaatagcaaacaatttaactatatattcacagtagtgtgggaatataaattccagagaaggtttgtgaaaaaccaagatttgcggcagagtgaaaacagagctctattgcccttgtttgacacctataacagcaaaaaaagaaacattcctaaatgaccaacttggagatatctctttgtgaattgtggtacacagtggaccataattccactacaagaatgaaaattatgaaaatatatgacacttaaaaatgtttatgaaatgcaggcaggatacctgggggagagcagctggtcctgacagcacttagcattgctccaaaattcaccattccttctttgttatcatcacatttcttttatttaaatgtaattaacacaccataaaattcacacattgaaagcacacaagtcagtggttttaatatattcatgaagttgtgaaactatcacctccatctaattccagaatattttcatcaacccaaaaagaaatccattaccagtcattccccattccttccagcccttgacaactaccaacctacctcttgtctctagagaactgcctcttcttccccttctctgccctaatccctgctgtcctcctgagcctgagtaagcaggggccatgccctctctaatgccctggccccgcatagggacactagccctccccagagtgcaacagacggaaggccagtaaacaccactctattaaaagttcagacatacaaatgggaattcaacactgtcatgcaaaactaaggaatctgccttacagaacacgtagctcactctgtgagacccaacccttctaatttagtccctcccttcctgaggtgagtaccaccttagcacccacttccagcttccctccctgacatttagagccaagaccacaggaccggtggaaccggtgtgaggagagagtggggcaggaccaggaagcacctcttcctctgctaatgcacgcaaaggaagtctggtgctgcctttaatttttccactaaggaacttggaggaggcattgtgtggtggctgggtctctggctgctttcaccaagcttattatctgttttcctcaccagacttatctcctgcaggacgctgttttgttctttttccagggacattaagcggaagtgtaaaagctgtggttctctgtggaaatgaccacagattattttccttgccatttgtataggcctccttttcctgaccagctagggaggacactgcacatttgatggtgacatttgacctttttgttttatgtgccgtggtgcattctctctggtagcctcagaagttacaagaccttacctcactcttcaggaacaaactacagcaatgattcatctctctgtatttcccagcctcctgataaactgctaagtgaagatggggaggagccatcacgtcgcgttgatagaatagacacagaggggacttggtgatgtattaggaggagcactgaccagaagtcagggtatctgggtttgggtttaacctccttggttctcagtcctctcatggatgaagtgagagttggaatagaaagaggtcacagcaggtccttccagatttcagtccatagtttctctacattagtaaggtgaaaataaggtctcactatttaggagattctggtctcaggatccttgagggaagagaaagaaaagggagggaaagggaaagggacaagaggagatgagaaagcacagaagggaaggaaggggagaagagttgggggcacaggaagagaagtggggatccaaggagggaggggagggaaatggaggggataagaggagaaaaaaagatgggaaggagatgggaaaggaggggaatagaggaaaggaaacagaagtaggaggggccaggaggagagacgaatggcaaattagtaagacttctttagaaagaagatgggaagttcacaggttctacagactggagaaaaaattataaataaataaataaataacaaagaaagaagatgggaagaacagaactaacatttctcttttttcttcttttttttttcttttgagacagggtctttctctgtcacccaggctgaactgcagtggcatgatcacagctcacagcctcccaggcccgagcaatcctcctgcctcatcctccagagtagctgggacaacaggtatgtgccaccatgcctggctaattttttatttctttaaatttttgatagagatcttgttatgttgcccaggctagaactaacatttctgatgtcctactagatgtcaattctcaaaatactttgaaggtagataataatattgttcttttaccaacaaggaaatgattccccttccctgcttctgaatgaacattatgttctccctcaagtgattttggtgcagttgggcaggttttaagataagctgggctaagtgatttgctccaagtattaacattagtcaatcatgatgctgaaattcagcctcaggcctgtctagcccggagacctgtgttcttttcactctactaagctgagaaaagaaaacacaaagaaaagcgaggaagggtttcatagtggatacctctccatgcatttaatcaaaaataggccaagagactctcttaatgaaatccaccctccaaaaaaaaaaagagagaaaagtagtctgagttaagtaaaaccaattcagctcaagggaacagagtcgagatagtctcataggcatttccaggacagccgaccttttccataatgaacactgctccctccacaatgatgcagcagtaactctcactgccttactctttagtagtgatctagatttaacaagagcgccttgcaacttatagtatatttgcagtctttaaagcactttcacattcttgattccttttgacctctaataataataataataataataataatagtattaataacttaggaactgaaacaaagattttagagtcagacctcagtttaatcaccactcttgccgcttagctctgcgaccttaggctggttaagaagagcctcagtcttctctcctgtaagatggggataataaaaatgcctaccccatagggttgtaatgagtatccaaagagatagaacatgttaagtgttgcccagcacatagtcgtgttcaagaaatgttaaccactattatttatatatatataaaaaacacatatatgtcagaaaaattatctgacatttgaaaataggcagaaaatattactgattattgggtcttctttcagtgcagtattgagcttaattttctactgactttacactccataggtgcagaggttaacttaaaaatttttgtctggtaaagatgcaaatagtttctgtgcaatagagccaataagcacaaagattagtttactgtcctgttggacaccaaccagttttaactcatcaatcttataatatttttaaattaaattttacacacacataatctcaaatgctttttgaatcagttttaacatcttaacgttcacctcaataaatacattctttgacaggtattcatattctattttcctgagagagatgattttacccttttgaaaattacacttaataacatggaaccaacctaaatgcccatcagtgatagactggatgaagaaaatgtggtacatatacaccatggaatactatgcacgcataagaaggaatgagatcatgtcctttgcagggacgtggatgaagctggaagccatcatcctcagcaaactaacacaggaacaggaaaccaaacactatatgttctcactcataagtgggagttgaacattgagaacatatggacacagggaggggaataacacacaccagggcctgttgggtggggggtgaggggagggaacttagaggtccataggtgcagcaaaccaccatggcacacgtatacctatgtaacaaacctgcacgttctgcacgtgtatcccttttttttttttaaagaaataaagaaaaaaaataaagaaaagaaaattacacttaacattagacagctaatatgggtaggcctgccccatttagtagagggactgaaacacaaagagatttttgacttgtcgacagctagaagcagaattcagttatttcaaattctagtccgatatctttgttctattttatgcctctgaccaaacaatatccaaaaatacaataacaacaataaagaatgtaatccggaaggatataaggcagtactcttctggcaggcttgaacagtttccaggctgtcttcacagccatcattcaaagaggaatgtgagaaacatcatttgaagctgatttccaaatgttctgcttctctaaatgcatttttcaaacccttagaggaaaagggggccctctttaaaaacagcaatgatctaaaaaacgggtgaggtagggaatctggtagttcactaacctggttaataggaaatcaaaactattctatgtaaaatcaattaaatccattaatacattgattaggtagatggaaactgagttacatctaccttagaatttaagcagaccagggtctctaaaaacttgatattctcttttcttggcatgagaggaaagtaaggtttcagaattgaaagagtaattaagagggagccctgtgtccagggactgaactcactgttatgctctggatgggacatatgctcagagcccagtggcccaagctgttgtagaagacggcagaagcagccaggagagctctgagcccaccacgcacatggaggatggaaccggggttagtttaaagtaagcagtgcccgaatcatgtgacaggagccacctttacacttataatcactgcaggcttatgaaaatcataacataaatgaaaggttttttgtattgaaaaagttccacccacattgtgccttggcccctcattttttaaatactttcatctctaaattccccgggtttcctccggcgtctccagctgctcctctgctgattgctcgtccacgattcctcaatgtctgagtgtctgattcagacatttcttggccctgtctttttccctactatctggtttaaatgtcatccatatgctgatgtttcctaaattttatctgcagcctcaacctcttgcctgaactcagaactaatatatccagttgcatatgtaaaatcttctcttgaatgtcaaagatcaacttaatatgttcaaaacagaatttgtgattttgttccctccctccacactcttatccctgcaaaggccaagttctaccttagggcctttgcacagtctctgggcctggaacactcttccaccagtcatttcatggacagctccccttggtcattcagatctcagttcaaacatcacttcctccttagctgtccctggcccccatctgaagtggcccattcctttcccacggccaccaccagttattctggtaattatgcacataaactggaaatttctccataacctcatatttatcacaatatggaattctgtggattaggtgtttacttatttattgttaatctccctgcccttcccccacagctctaccccccaatgcatagaaaatgagcctcgagggaactgggactcatctgtcttagtcattgctgtttctccaacacacaggcactcagcagatttttactgagtgcatatttgcatatgtgaatgcatctctgggggtctgttttcctacaaaacctgagggtaattatcacagaaagcatgcatggtaactgggaaggatgaacatactaattccagcatgaccttgaatttttaaattgatttggagaatagtaaatgccattgggatgccaaagagagcaagagatgttggtgcaggggaagggtgttgtaaacaaagagaggaatgcaaacaataatccctaaatgtccagaaaaactttgggagactgatgaggaggaatcattttatttttattttgccaaggaaggatattatggagaaattttatcatctactgtcacatcaccatcatgtcataaaataaaggacatttaacttccaaaaagtagaaaagatataaacttcgtttttcaaaaaaattgaataaactgtgctttaggaaaactccctatattgacttatttctctcattgcagcacagtcctttggaaacattgtcctaacactgtcaggaaccactgacttaagtgactgactctagtcgaggagcaatcactggcaactttcctaagtctttgcttctcaatatgtctatggacaattaaagctctctgataaatattcactactagggtattgtaacgtttagatgacctcagaaacctggcattgagatgttacttagaattttctccctatctcaaccaagtataaggccaggcctacaaataaaaaggtgttttaagtgaataaatgtttttttgtgtgtgtgtgtgtaaagtgtatgtgtatgatgccttaaggaagaaactgacacatcaacagagttttaaaatgtttaaaagaccagtagtaccaactgaaactaatggccaagacatctagtatcatggttacgttacatagaacacaatgtagaatttcctttcgttttactgtaaattgctttaaaaatacgtatttttaaaagtgtaagataaaaatgtagccggaatttattccttctggtgggttcttggtctcgctgacttcaagaatgaagccgcagagtcttgtggtgagtgttacagctcttaaagatggtgcgtccggagtttgttgcttcagatgtgtccagagattcttccttcctgtgggttcgctgtgtgggtgacttcaggagtgaagcctcagaccttcccagtgagtgttacagttcttaaaggtggcgagtctggagttgcttgttccttccagtgggttcgtggtctcactgacttcagtaaagaagccgcagaccctcgcggtgagtgttacagctcataaaagtagcgtagacccaaagagtgagtagcagcaagatttactgtgaagaagaaaagaacaggaggttgctgctgctggctagggtggccagcttttattgccttatttggccacgcccacatcctgctgattgctgcattttacagagggctgattggtccattttacagagtgctgattggtccattttacagagtgctgattggtgcatttttacagagtgctgattggtgcatttacaatcctttagctagacacagagcactgattggtgcatttttacagagtgctgattggtgcatttacaatcctttagctagacgcagaagttcttcaagtccccaacagacccagaagcccagctggcttcacctctcaaaaagatacaaatgacagagacaattgaaaaaaaaatgtttaatctactggggaaactaagaaacaaaaccaaaggaggcagatgatatcaaccattattcaaatttactgctgaaccaatgtattcaggaataacacccacatgaaaggagaatatatattgaaaatggaaatgtgaataatttccttagatgactgacttcatttgcaaagaggaaaatctgctcccagagaatatgcaaaatgcaagcaacagtgatggtaaacaaagttttaaagggagaagttgatgaagattctgggccataggggcattcaccagacagcatctaaaagaagtagaggtggctgggacctgtgtcacagcccattagatgccattttaagagattaataattcagggcctgggtagcacggggtgactgcagtcatacatataagcaaataacaatgaggactaagtgtttggtctttccattgacttattggttcctggatggcagtaaacagggtcttcagtgtctggctcactagataaacaagagtaataagaggaatcatactggtcccaatttggaactccagctctgcagagggcatccacacccacctcaagtcaaaaagtaagaaaactcaattagcagctgttctccctccgcccccttctgaggagggaagggagtggagttttctcccacacactttctaagccatgggggagtctcccgagcttctgaacagcagtcaggaaacaaggctgttcaggaagctggtactgtgaaccacaagtcctctgaagagcttcagtggaaaataatactagtggatagatttaaattcctcatacaaccaaagttgttctttgtacttctaatagatgttataattttttacataaatactgtacaatgtctgtgagttaaaatcagattcaaaacctaatcttttgatgcaataagcagtcaaatcttttcctggttctcaggacaagcgaaggaagtcagtatgaaacttcccttaccagagaatgtctgctcaacatgttcttcctggaaacaccttgaaaataaaatggctcccagaccctccagtttcccttggttggggaagtcagagccgatcatgggcttaaatcttgtgtgttattggggatatatcacctagctgaagaaaatagacctaatgaccctgatttgtctgaattttcataaagagattgcaaagactccagacatttttgcctcaagactcagctgaactcatattagtcttgcatttataaggagagcctctgccaagaggtaaggatagcaggagagaggagttgggagacctggattcagtcatgcctattccaggaggcagccgcgtgttgactgtgatcatgccatgtcacttaacttctctgaactttaattttcttagctggataattagaatatatatgatctttatagtcttctatagatccaaaaaagtatgatttgatgtgtataactaagtctgggtggctggacagaaagtttgaataggtcaattgcccaacaatagactggttatatcattcagttgttgaaatgaccaatataaccaggttttttttaaaaaaaaaaaaaaaaaaaaaaaccctggctagctattttcagcaaccttaactacttactggcttgactatgaagcagtccttttgattgcttaaaattaaaaatagttaaaatagcttttaaaaaataagaataaccaccctttgatcaattgaacatttcaacaactgatcaattgatctctgtcacctaatctggccttatttatgagtgtcttgagacacatatcccacagggttactctacaaactctcctcccttagtgtctacagcacaacttttcactgcctcctggatagtttttcttgttctatttacaactcctctttctctgtccattccctaaatatttgttccttggcgttccctctcagatgttttcctctcttgctgtatctgccctcctcggatgatttcaccctcacctacaatggtgtgctggcaaatgtttaacaagcagcgcttccagggtgaagaaaagccctgacttgcagtgtttgctgatttctgtggtgtaaatactctcactatggccaatatcaggctcccagacattatggagttgggaagagaggcatataactgacgcttaacagctgaatgaactagctctagcacaccactgcatccctgacttccaagaccacccacatgctgatccaccgacctttctctctctctctccctcactgcagactcatatccacttgaatgtcacacttccacaacatcatcaagggtaaaatggacacacgatcttcctgtaaacttttccctgcattccctgtttaccaaggtaactgtggacaagagtgagtgacccagcttttggaaaattttgacttcgtttgagctattttagactattttgtgattgcatcttttgagcgatggaacaagactacctgctggtaaataggaatggagtttttttctgcagagaaatagatgtttctgctgtcaatcatcctgtgaagtggtttctctgggacaaggaatgggaggtgagaagcgatttgaactggaggagagaaagatctagggcctaagaccagctgagtctgagtgacatggagaaggctagagtcattctactggcagagtagctactgctgtcccatgaacgcagtgaacagtaatagcaggtatctaatcgagcagcaacatggaggctaaaaagtcaaggcaaaaaaaggggccaatttctagagatgccaaactgagacagcacttgtggacctggtcagtttttagagggcacatcctatttccaagactggagtggtgatccacaggtggtggttaccctcaaccagctgatcctgcagggtaagaatctcagaagggtttcaatatcagcagcagcaacagcagcaccagcagcagcaagatgagaaggctagagaagaataacccagtggaacttgtctgcagctcaaatgagaggcattctaagacactctcagaaataactgatgggacagtgacagtagctgatttctagtagtgcaggctctatagtataataatttaggtataccaaggaagaatatgttatagtcacaggctagagggccagagtattcccttgcattacatttatttccatctatattaggtcatctacccagatgcctaaaccccaaaactaagagtcattttgtcttctctgatgtaccacatacaatcagtcacaaaggcctgccagttctatctcctaactttttcttgaatccatcagaatgtaggcatgaagagaaaagatgctctcatacttacagtcatcctctcagttcaagcccttgtcttttctcacttggatttctctgagagcttcccaactagtctccctgacttccatcttgctccctccaatcagtccatcaactgcattgctgcagaggaatcttccaacaaaaacctgttcaagttactcctttgttaaagtccttcaggataaaacccagactccttggggtggcctattaggtccttcatggtctgcctatcaccttcctttctaggcttatcccacactcccctcctgtgtccagtgcatagagtcctctagataggggaggatgcattgaccatttttcctaccttctttcccaccctcatgacgtggttttaaatgctcatgtctttctcccattatacactgtcttctggttttcctctgacatctctggttgttccttctcatcatcttcttcctctgctcatactttaagtgttgattttccccagagttctcttctcagccctctcttctgtcttcctggaaaaggtcagtcgttcctggggcttctgtttctaactaatgctgagttttcttaaatctttgcctctagatcagactgctcttctcaacacctccacagaatgctcttagctatcttaaactccatatgtctgaagtttattaaactcctacctccagatgcattctccctcctatatcctctatctcagtttatgtctctgtttgaaagttgaagcaagtacctattgctgcctgacaaacctcccctaatcagtagcttaatacaacagacatttattattgctcacaagcctatgggtcaatggggcatttctgctgactggagccagattcagctgatcttgactgggctttctcacatatctggaacctctgctgggacaactgggatgacttggtccatatggtctcttatcctccaacaggctagcctaggtttattcacatggcagatggacagagttccaagagagaaagtggaaaccattcaaggcctcttggggcagaggatcctaattaaaacaccatatcatttccactgcatcctcttggccagaagtcacaaagccagcccaggttcaagggatggagaaatatacaccacctcttaatggaagtagatgcaaagtcacattttaaggagtgtggacagagagaggggtggagaaatgtgatcctttttgcaatctgccagagaagtaatcctagatatctccacaatgataatgtggtggtgatggtggtggtggtgatggtgatggtggcagctaatgtttaccaagtacctagcacatatcctgcactgaataatgtcaagggaaaggtagattctgcattgtgtttacagttatgtatgaaaatcactttttattttctttatattggtttctgttgaggcctctcttttggcttacagacagctatcttattactctgtcctcatgtggcccttcctctgtatgtgtgcaaaaaaagagtgatctctggtgtctcttcctcttcttacaagaacaccagtcctaatggataagagctccacccttaaaggccctctctccaaatacagtcacttttgggattaggtcttcatgattggggcatggggtgggaatacacacaattcagtccgtaactactacacaaacactagaatggctaaaatgaatttaaaaacaaacatcatatgttggaaactggaacaactggaattctcatacactgatgttgggactttagtccaatcactttgtaaaaactgttgagctgaatccaataaggctgaatatatgcctagcctttgagattctactcgtagatattttatccaaaggaaatgcaaacgtatacacaccaaaagacatacacaagaatattcaccacagcacgattcataatagccttaaataggagagaattcaaatgttgatacataatgggaggaataaataacttacagatatccatacaacaggatatcatacaaccatgagactgaacacactatggttaaagctcacaaacatcatgctgactgacagaagccagacacaaaagagtacacactttaaactttcacttaaataatattcaataacaggcaaaacaaatccatggtgttagaaatcaggccagtggtcagccttggagagggaagtggtggctggaaggaaacaacagggggcttccaggatgctgggtgtgttatgatctggcttctggctacacagctatgttcagctcatgaaaatttatcaagctgaatacttatatgtgcatgtttctgcatatattttacacttcaataaaaagttttctttaaaaatttttctgaaaactccatatcatcctagaataaagtcccaaaacttcagcaaggcctgaggctttatgacctggccccaggccgacatttccagtcccatccctactactcctggcctaacctccagccaaaacaattaatcacccatatccacagtccatcgtgctctttcatgctttccacttcatttgttggttaactctattttcagctttaaaagtcaactcaggctttattctccatcaggaagtttttcctcaccccacccaacccgggctgagttacaagtccctcctatgtcctcccttaacattttatgtgtacttattacccttagtacattgcactatcatttttggtttatgaatctatctttgctgctggactgtgagtttgatgagggcaagaactgtgtcctttgtctctgtatatgcagcatctagtgcagtgcctaggacacagcaaatgcacaatgaacaacagatgaatgaataaacggattaatggactttagtttacagtcttgattttggtacacaaaattcttctttagtcattctagcaagaaaaagtggttttttttacattgaaacttcatctggcagcacagactataccatgcccaaaatttagtttgcaatgagtgctttgttcttcatgaacattaatatcagagaaaccaaatgcacatttcttaaaataagcaatagcaatattgcccattccctaaagactgtctgactgtacaaaataattgcattcctctggaacacgggtgaagcgttaatgttcttggttggctggagaatcaacaaattcctctaacatctagattggcgatgtttcttggtgtatctgccagaaattcctcagatatcctcgtctgagatttatggactgagaggtttatgatatttcagagggtagaatcggctattgttttacatattagccaagtcaagtaaatgcagtgaaagctgtgattggtctctgggcctaaaaagtgacataggctgacaacagccatattccatgcaagatccaaacaggcttcagccaggcaaaatgcaaagtagtgatcataactacttctcagcaatgtttattcttacttctgattttgggctttcagtacggctccataacagaaagccaaaaaggttttaatggtaggaggtaggatgataaagctattgccacgatgatgattcttggtaaataagggtgcactatgtgccacagaacaagcacagatatgaaacttgacctcagagtgcttatcaaccaaaaacttagggcaaaggtaaaacagtagcgctataacttttaaacatatgtataatctgggtattgaactgggtatactaggcccaccttcagagcctttgctcactcccacctcgctgaggacacttctcactcactctaccccaagaacaggccgtgcaggcttatttgtaagggccctgactccacccagcctcttgatccacagctgattggaccagacagggcacatgactcaagctaagccaatcagattctctccgtttggaattgagccgcacatggtcctaagaagagaacctgcggggctatctgggcagccatttggggtgaaagagtgaagcagagaaaagtggtcagcagggagaaagcagaggcacaggaaaccaccgtggtgtaatagcagggtggcaggaagagagatcagttcctgacagctttcctgtttctgattccagtccctttggggacatctgatacgttgtctggccaactctggcctcctttttatgtttatgctggtgtgggtggttttccgaggtcccaggcctaagacacacatgttctggtgttcaggcaggaggactgtcttcaattcttggtgtcatgttggcggaggggagggctagactacgggaggccttgcactgcagcaactggcatccacggccaggggctggctggagttttagctctaacgctgggggtttgggagctgttggttagtgggggtgttaatttggttctttaaaaaaggaagcatgacactgtgagtgatgacatttgaacgtcaacaatacaacattaagcctgtggaaagttttaattatgatagcttacacaggaaattgcatttatctatggaaactaaatttagaagcctggacagattgacaggatcccccttaagtccatgtaaatagcccttgccaggtgctaggaagtaacagcagtagcaggggctggctagtcagggcgctcttcaaaagtcctatcttccaggttaggggagaatgaacaatttctgaaagaaccccattttcaaggctgttcctattctctccctactttgtgtccataaacaaggaaagggtgcggtcatgacttggatttgttctgagcagtgtttgtgtatccaaggccagaggcaggacccagtgggaaagggaagtgtgggaatgagtgagaggaaatatcttgggctccttcgcctcctcaccctccaatcattccccgccaagggaacccccttagggttccctccttcccacggtgttccctctacccacttcaaatctcagtgacatgaaaactgggggcatcagaggcaagggagtgacaggaacagtggttttgtatagcaagaacattggagttggccagaggtgggtaaagctgtggcactatcaccagcaccactctctgacccagacaagagggtcctctgccctgggctatgacctctaaagggcccttgccctcctcaaggctcactccacctcgtgaagtgaagagttcaccagagcccatatatacccctcaagaccgtgttccaggtcctgagactccagaattccctgtacaagcggccctgcgcctgtttccagggcctgtaagagcctcttccagggtctgtcctctcaaggatgtgtatgccctagagttcagggtgccctagggataactgtttgcagacaggatgaagaatgggtggacggcacacactggagtatctatatttgaatttcaaaggtgggaagagaagggcaccaggccaggggctacggtctgattctccatggtataccgcctctttctggctcagaccaaggagtctgaacattctaaatttgaatctgggcttcctggttgttatgaaggtttatttgtcaaagtaggaggagggaacatgtctaactgttagcctgttatattagttttgcatattttttcaaatggaatatgaacaaatattccatttattcatggaatatgaacaaatattccatttattcatggaatatttggggagcttggagcaagagtacaaataggctttaacacttggggagcttggggcaagagtacaaatagaggctatttgtagccccaagctccccaaatggtagaggccggccatgccatcacttcaacagtttgactttagttaagtactttaggcctctgatactcggtttcctcatctgcaaaataaggacactaacagtaatagttattgtgagaaattaaagtgtaataagttgtaattattgttgtgtgcccttgggtaagttacttaatctccctagtgcctcagttttctcatccgtcaaatgtaagggtagtagtatacctgtctctaaggattgttatcaattaatgtatgtaagagcctttgaacagtgtctggcacatagtaaatgctatggaaatgttccttgttgttgttattgtccgatatctatggacactactaccacccggctgactggactaaaggaaacagcatatgtagcatgtaggtcacagcgaggcacacctctgccacatttctgagcttatttgagatttgtctcatactccagactcatcctgtgattacaaaacccctaccaggcttcttaggaaggatagagtctgttcctgcttccaactgtgactgtgtctttagccaagtgtaatctgatgaatacaaactaagagttctgtcctgggttaaccctcattcttttctgtaaaaggctttcagatccactcagaaaggtgcaaaacaaatcttacatctctgggcagagacatggtggtggcagagagcaaggaatgggggagggatgttggcccatctcctgagagccactgattgccactcctcactgtggaagagcttctgcagccctgcgcattggcaggctctcagggctgggttgggtttaggaattaacttgaagtgttaattttgtaaatatctagacagggttgatcctccacaagaggagagttgatcacacagaaagacctaaaagccttagagagctacaaaagtgtttcccaactgcaagccccatttatttctactacacgacacgacctctgtggatcagcagctgtttcctttgctcagcaactgaacagcccattccctctttgtttcaactttgcaggggatcaccaatggggagctgagatactaaagctctccatgggaatgaaagttaagaagggcaccagggaggccactggcacacaggtgagcatcaagcctcctgaccccgaccttccatagcatcctcttctcaaggacccattgcaggcaggttctccctgtgtccccgtgccctatggacacattttattttaggaatattctcctccttattcacattagggcaccagtaagaggagcatacagtattatatctctctcaaatatttttatttaaaaaatgctgaagaaagccctaagccaaagaaaattagaatctacctgtgcgatttcagacaacagtcagaagttggagaggatttttgtcagggtgtggtcctaaggaatgacaggccctttacaaagtccctctcatctcagaatccatttattcaacctaaatgtttccttccaatgctttcatgtatgatgttagggatctgcgtgttcataggcttcactgcagtttggggccggctacacagccattccctggggcccacgaccagtgactactaaatccctgtgccatggtttccatcgaagtttttgcttcggagttctcttttcctcgtggccaaagcttcaaggcctgtgcacagtcataaaatggtgccctgaccacctttcatttgcattttgtggttttgaccacatatgtgcactcatataccataggaatgggattatttttacatgtagaaaaatgccagagtgaggaaaagcagcgccacagtgttgccaatgagggtacacctgctttgactggcttgagctgtgcctttgtttttaaggtcatatttgatgcaggacataaatacataagttggtttgtatgctttactgaacaagcccagaaataagttatcaacatccttgtgacatttttttctttatttctttttttttttttctgagacagggtctccgtctgtaacccgggctggagtgcagtggcgcgaacacggctcactgcagactcgacctcctgggatgggatctcatcatgttgcccagcctggtctccaattcctggactcctcccactttggcctcccaaagtgctgggattataggtgtaagccacctcacccacccatgacattgcttaaagaaagtagttgttatgtgtgactggtaaccattttttcaagagttaaacatctgagctatctaaattccactgcaaagtatgaaaagcaaattaagtaatcatgacacaatcactcaaatcagaagaatgaggagtgcagtaggtttttttttttttaaacgggtgtgggtagggaaacatcaaacctgatggtcaaaattcagtcaaaatctccagccattgaacgtttttaggagatcagtgataccgcatacaggtgattggttgggatgattatccttgtggtacaatcgaattaacatgtatttggttgccgactgtttgctgggtaggacagagtgagtatggaagtctggggtgtggggagggcattctaagtatgtgctctgggtgtgtccatgaagcagagctgtttgtctcaactttctgttcatgaagcctggttagttggacagctgctgaggggttgaaccaaagggtatgacagtcaatatgtttcatctatgagacctaatttcaatgaatgtttcagtggtataagaagccatattctatgccaggtctcctctgctcagaagaaaacagagatattgttagtttatttcccatgaaggaaaagttttgattccaccttgaatgtacttttgtttgtttgtggagctgtttcctgttttctcttatcaaaatatttcagctgtagcttaacaaattgagagggtataggagcttctgtcccaaccaagtcagatgagcatgcttaatcacagctttgaagcagatccactattttagcgaatagaacacttttttaaaaaagggaaaaatatttttattccattgagtatctttgattggaaaaaaatgcacatggaatgaatagcaaggaagaagcaaagttaatatagctctattatgtaacaaccaaaacagttgccatgtaacatttctatgtttccttttataaataatatacatggtgttttttctttgaatatgcatttatacctaagtccagcagcagccaagccttcaagccctaaggcaggtcatcgattttggcccttttaaagagattttacatatctctgctcagtgccattatgtgttgatttcatagtttaacggttacagagtgtgtctatttctctaattcccgtttagtgtctgtgtgcatatatttctctatttcctatttcttcgctttgttaggggctcagggtggatagtttacttttaccctcacggaccacctgtacatgtgaaatcaaattctgagaaaatatattctagctcctccaaagctacatatgaaaatgttttattattggaaactgaatatatttcagttttctagcaaatatagctttgggggcttgaaagttgaggtcttttttcctcctgtttctttctacagagcagtcaatagtattgaacaagaaaaagctgcatgacttttagaccagaggagtgaggacagcacttagaggaggtaagagagttcatcacgcgttctacattgagctgacagcaatgtacctagtgcatccaattaactaatctttaatttttgtaccaggcacacagccaacacgtccagttaaccaggataaatgatttaaaagaactttgtaaaaatgctgaacataatttgctatcaccaaatataggaatctctgaagccagctgtcttgctcatatgaaatgcaatgacaagatccaaattgtgagaaaaggaatccaacttggttggaacaggaaagaaacaaaaacaaagaacctctggcccagagtcatttctgtttggaaaaatttctgaagattaaacttaggccctgagtgcacctaacagtgcaatctgcaggctgccaacgcgtagccgtggaactaaatccagcagctcaaggtgagagaaaattaagtggatagagtctacctccttaagatactcttcttatcagagcttcctgagaccttccagagtgatgagttccaaattacgtacagccataggaaaataaatatttggccagctgtagacattggatttacttatctgtagcctatttctagcttcagaacaatttctacttctaccttataatccaccacagcccaggagtttaaggatcttttattaaagtatcttcacgtagtttattttttgaaacaaaaattaccactaagaaaatattttttaaaaatactctccaattatacatagtgtacatgtgtatgtgtataaatacataacatatattttactttcacacagaggttaaaatcaagtcagtgccctggtctactccctatgtggaaagttcagagagaagggtctgaacatggctttttcctaagtttgttatattccttggaacatgtttcacaggatgttacttagggctccaattgactggacaaaataatcattacacatacagaaaagaaattactaatttctttaatataaaaatgtatcttacaaatcaataagaaaagataactctataggaaaataggcaaaggaaatatccaggcagttcaggaagaggaacaaaaagcaggaaatcaacatgtgaaaacatactccaccttgcttgtagtttaaaaattcaaattcaaatgatgatgagacagaaattttcacttccagttggtacagattttttctttttttttaagacagagtctccctcagtcacccaggctggagtgcagcagcctaggatcttggcttactgcaacctccatctcccaggttcaagcaattctcctgcctcagcctcctgagtagctgcgactataggcaccccccaccatgcccagctaatttttgtatattttcagtagcgatggggtttcaccatgttggccagggtggtctcgagctcctgacttcaggtgatccatccacctgggcgtcccaaagtgctgggattaccagtgtgagccaccgcactcagtcagatttttaaaagaggtaaaaccaggataagatatgagaaaacagtcgtttcatacattgttcataagtgtataaattgatataatgttttgtgttggcaatgttgcaatacttattaaaattgaaccccacattttacttctactgtagaagtaattatagtagtaacctatagaaaacattcccctaagtacacaaagacaaatgtacatgaatgatgtacatagttcctaacagctaaacactggaaacaaacctctgaaaagaatttggtagatctatatgtacttacacagaaagggttccaagatacagcaacatgtaaaaagagcaagttataaaaatgatttagaaaatgattcaatttttgttatatgcagaggaaaaaaaatctagtgtcatatagactaaaatataaatactagctatttctgggggttggcattttggagtaccttccatttctatctcatgttatttctgtaatatttgatcatatactaagggtaaaagaaaaacaatttaaaaaataacagtatgaacatcacttacatagctttcttgccaacccccagaaatagctagattagattcaggatcatgttaaatctgaagctaaacatgaggaaacaacaatcagataaatccagattgtgtgagatgctgcaagataactaacctggactcctaaaatgtgtcaatgtcatgaaaaatgaaaagagtcatggagactgttctagattacaaacaactaaagagacctgacaatgaaacacaatatgtgatatctgactggattctaaatttagacacacatgaaaaaacattataaaggaccttcatggaacacaactgcatgggtgactctacatgacagaatagtatttctaggatcatattttgggaaatgctgggatagaaaatgtccctttaactgaagcttattgtgacccttcatgctagatgttcctatatttttttttcttatttaatcctggtaatttacagaagaagatgatgattttctatcaaacttaaactctaattattactctgattgttgagagatgccaatatattcatttctagaatatcttacctggtttatagatttttcaattagtgcttagataccaactgtaatttattatcaagttggggaatttctgagctgtaggggatcttagaggaattgtgggatcaacccttatcattttacagatgagcaaaggaactccgatgggctatgtgacttacagatatttaattaggagaaccggctttggaaacctagcctccaaattcagtagtcttaccataaaactattatgatttacttacccttgctgaatgccagcagtggacaaggcatcataacggcctgccctaaggcacccttctgccggaaagaggctcaacacttgaggaggaattgcatgacaatcttcagggagcaagagcatccaactccccgcacttctaatcatgcaggcagtctgccgagtccacgttgcactaaggcatgccctttgcctgacttgtttgttacataagaaagcactaggagttcgagccaatactcttttttctttaaaaaaaaaaaaaaaagacaaaagacaaagcaaactgactgcttatggaagatggatcacaaaagagtcctaagtcctttccttatcctcctaataaacgtttccctcacaacatatttccagtaggcctcaatccatctggtagaatgatgggggagattaaatcatttgttctttataaaatgtgtgtaacactttctcaactacactaagactccagatttatacaaccctcattttatatctccctctgagaataacctcctgatttacaggatttaaagaagtcaaaagcccttctccctaaagcaattttcttcactggcttatacccattctttttttagatggagtctctctctgttgcccaggctggagtgcagtggtgtgatctcagctcactgcaacttctgcctcccaggctcaagcaattctccctaatttttgtatttttagtaaagaccggatttcactatgttggtcaggctggtcttgaactcctgacctcaggtaattggtctgcttcggcctcccaaaacgctgtgattacaggcataagccaccatgcctgtccttatacccactctttaggaggccaatggaatgccccccaatgatgatagtaaaagggtgacttcccttgttgagggggtaggacaggcacagggctcttgagagcacagagagccacaaaggtgaccaagaccaaggtttgtagaggtaagtccaagtctaaatagctggaaaagcacatgcaacctcaaatctggagactaccaagattgtggtcgtgaatcgagggtttggaattgaatggaaatgggttggctgcacagacaggtcagggccaggcaagactgtcttggaaaatagccccagattctagctggcatgtgtcgtttgccatgtgtggttggcagggtcttgtgtctcgaattggctgatgtggccaggatcaggtgggaccagaagagccactgcacgatcagtgaactactgttgagatctccagggcctgagttagggtctggagtgaaaactggatccccacattcagggggtcagcagggtgtgaggtcaaaggtaaacccattgttggtctaataatcaaatttgacaaatcaaaagaggagtaagaatccaagcatgaagccacggagagcaggcagcccaggcagccaaccttagaagtgtgtagtgcagggctggggtggagaggggttgggaggatgccaggcccaaagagtagatggtacagccacttttcatcgtgttcctgctgttccgaatggggacgtatctgtgtcattaaaataccactggacatttgtttactctgtttctttgcaattaactgagagtatgaagtagaaaggagaagtttgcttatggggagagtatgtttgtgttgacaggaagtcctatgggagcccttcagagtttcaaacatgcagtcatttttctgtgccggggcaggaagaagcaggggatatggccgaaaggactgctccttgattagccatactgagttctccaactgactagttggagatccatggatcagatcaggtgcttgcaatttggagagggtatgtaaagttcctacactcaagttctaacagctcagttcagacacatttatgcttaagccccaaggaagggaaccaggaagcccgagtactagagaaggctatgttcccagcatgaaagcctgagaagactgagtgccaacagcacagggaagaaagagagagtgaaccccaagggtgctcccaggcctactcagagaagagggtagatggtggggtccagctcacaggatgccagtgtgcccctctttaccccagcctcaaccacaatagctcagcttttgtctgtgtcacataatgggttctctgtaactttcaatcggctttagatcacttgaaaatgaccaccctgtaccagcaatgccaaatgccatccccatcttagctctgagttggttgccatgtcagaccctctcctcaagggatttacaatctctctggaaagcccaggtttatgcaatggcaaaaaggagacaacaatataggatgggtcttaagtgaatgctaagtgatatgttacaggctgcaagtgactcagagttaacagaaaaaaagagatccattggttgtggggtatggcaggatatgtcaaaaaggaaagaaatttctacaaaaaaaaagtggaacttgagctgagccttaaaaggaggagaagatttgaagaaatggggagggcatcccaagctttgggaagagcatgaacaaaggtgtacagacaggaatacttaaggccagtttaggaaacagtaaatttaaaaacatatggatgattgacagcatattccatttttaaaattacttattcagactctatcctgagcaagaacaatttcctgtggtttataaataggccccagttattttagtagaactgtaacactggtgatcattcatgaaatgttccatggagacttcagttttccaagggccaggagaaaatgtataaatgcgtaagaaatggtccagaacatgaaacaccatcggtaaaacctaatacaaggttgctgcagaaactttcttttcctaacaaggtacttatctccttctcccttcttccctcctagatttgttccagatttactatgcaaaatgcctaaggtttttgaaagaactagaatagaaattgggagataaagaaataggcacaagagatgatgtcatttgtttaagctcacagggaaggcagtgccagggttgcaattcaggatgcccatctcaagtttcctttaactgatgatcttgaacacagaattctacccgccttcataacctaagaagccatcagcattgtgcagaattccaattccctcagttcctatgatgagaaccttctcaccagtctggtatgtttcataggttggggaccccaattgcctatacttgagaaacattccaatgtatttgtacatgttatatggtgtgcaaaagaaagaaaatacttacattggtagttgtgtagttaattagagtaacctaattaagttaacttatattttgtttttgtttgcaatcaacatcattcttaattttcctgtagaatactgtttttgtgttttttttttttttttttttttttttttttttttttgagatggagtctcgctctgtcacccaggctggagtgcagtggtgcaatcttggcttactgcaagctccgcctcccgggttcacgccattctcctgcctcagcctcccgagtagctgggactacaggtgcccgccaccacgcctggctaattttatgtatttttagtagagacagggtttcactgtgttagccaggatggtctccatctcctgacctcgtgatctgcccgctttggcctcccaaagtgctgggattacaggcgtgagccaccgcgcccggccacaatactgttctattttccaatctgttctgctggcatttgcatcacaatatagtgttcattttggcctaagagaggttatgaatgaacaaatctatgttatttgtatttttcatttgggttccactaactatagacttagggcaaaaatgaacccatgattatcctaactattctacctctcagtcttaattcagttggtaaaagagggagcctgaactttgctcacagctttgagtgattaaaattaaatttcagtagcagcagaagcaaactaccttattacaaaaactttcctaggaaaaatacctaacagtcaatcctatcttatatctgaagagatcaccattcagtatctccaaaactatgaaataacactactaactagtgattttacatgtttagcaagcatctggagttatatgtaagcctttaccgagatcccagctatctaaataaaaatggatgttaagcatcactctcatccttgcaacgaagtcattttatggtgtcataaaaccaccaacagcatttctgactattccaataatcatcccaagcacctcaaaattcttaaaatactgaaattgaaaaggaaactctacccaacttatcaaatgcaataacaaatgtgcacaaaaatgtcatttagtaggcagaatttgcagccaaagaatattattttcatacggtgtttaagatttgcagagttcctttttagtgacaaaggtcctatttggttcagccatgccacatgtgtaagtttaacatttcatgaggattttcagaggaagagtgtgaaggtattctttttggccagactgtcttttatagtgatatgatagcaacattggattatatattaaaccaccagctaattagaagttaggtacacagcctaagaaacctaagaaagcatgtcctatatatattttttggttctcaacatcccaacatctttatctcaggttataaaagaactagaatagaaattgggagatttttacattagacataaaattggagttgagtgcaatgtgtgccctatagacccagctactagaaagactgaggtgggagttatcactcgaggccacgagttagttcaagtccaacctggacaatctagtgagacctcatctctggaaaaaaaaaaaaaaaaaggaaatcaagtttttttcattttgataccaaaaaaaaaaaaaaaaccgaaaagaaaaaacccaaatgaatacgaacacacaaagacaaaacaaaaaataccacttttctgagacgtggaagtttagatagcttccgtgcagccctcaggaagtaagattcaacagcctttctgaattttagcattatgtatctgtgaagagtggcaacagacacaggtgatcaggaaatacacctttcgcttctctagtatggcctctttaggcctttccaaactgatagcccctctcagcacgatttccgctcaatgtgacatgcaaaggacttaggaggagtgggagaggaagtttagttttggaaacatgagatgctacatctacctctcggttgatttatgaagcacaatagcatattaaaagtacctgaaggcctaacttggttatcttagcatttcccaagctgagttgaccacaaaaccccatcccccgctaggctgggcacgagtattccatgggctactttgggaaaacactgtctgtgcaagagcgcaggcttttgatcagacagggtactcaacgctttcttcaccacttaagagctttgaggctttggacaagttacttacttcctctgaaccctagttctctcatctgaattctgtgggaaataacatctatcacacatgatcttttgaaaacatagtatgtacttaaaaaatgtttatccccttctttctttttacaactcatggtaggagaaacctttttgtgtctccacatgaattccaagatcctctcaaatatgatcattttctttctccagtctcatctcccggtaacatggagaagtgttaatagtattttagattcagacttcctaaaatgtaaccttactagctgtgtgccttatgacctaagaaaattcctaccctctctgtgcctcagagtccccacctgtaaagtggaggataataatggtacctacatcgtggggttgtgaagattaaagagtaacattgaagaagcactcagagtaacacttggcattaggtaagtgatcaataatctcagtgaagttactagtattcttatcttccaatcacatattatgtaccaatcatactcgactccttgcttcccaaagatgcctgatgttttcgcatgtccacgtctttgctcttgctggtctcttcatttggaataaccttcttccacgttttctacttggtgaaatcctatccaccctccaaggcccatcttgaatgctaccttctctatgcagcctttccagatttcctctaaccaagtgtcttcctccttaaaagaatcccctctaggccttgtggctctctcttgactcttaccatgttctactttgtatctaatgagttctatgctcctggaggagccagtggtatttatataccctccccacaccctagcacccagcagtgtgatccagcaggaacaatgtcagcctgggaatcaggaagcctgggctctggacccaggccaaccactctgcaacttggggaagtcacttcacaggaactttggtttcttcttatttaaaccagtgagttggaatagaccagctctaaagccacttccatctctaccctgtgaaagtttaatatatactccgtgggcagccacatacatgcctatggaattttgagtgactagaaggaacaaggtttgagcccagaaataactgttcagaaacccttgattgctctgtttgtgaaagcagaaaactgaaacaacccaaataaagtatgtcatatgatggaatactatgcagctgtaatttaaaaaaggaagcatatcatgtgccgataaggaaagatcccaagggtgattaagtaaaaagaacaaggagcagattaatatttgtagtatgctgtctgttgtgttaaaaaaaaaaaaaaaaaaaaaaaaaggagagaaatggccaggtgcggtggctcaacgcctgtaatcccagcactttgggaggcggaggcaggcagttcacttgagatcaggagtttgagaccagcctggccaacaaggtgaaaccccgtctctactaaaaatacaaacattaggctgggcacggtggcttacacctgtaatgccagcactttgggaggcccaggcgggcagatcatgaggttaggagttcaagaccagcctggccaacacggcgacaccctgtctctactaaaaatacaaaattagccaggcatggtggcgcgtgcctgtagtcccagctacttgggaggctgaggcaggagaatcgcttgaacccaggagtcagaggttgcagtgagctgatattgtgccattgcactcctgtcactctggcgacaagagcaagattccatctcaaaagaaaacaaaacaaaacaaaaaaaacattagctgggcatggtggcatgtgcctgtagtcccagctactctgggaccgagtagctggggctgaggcaggagaattgcttgagcctgggaggcggaggttgcagtgagccgagattactccagcttgggtgacagagtgagactccgtctcaaaaaaaaaaaaaaaaaaagaaagaaataacaggaattatatatatttgattttctttatatatatacctaaagaaacactgggcaggcaccctggaagagaagtacacaagaatatttaaaacacacttacttatggggaatgggggtgggttgtgagatggatggggacagggcgagagtgagactttcaattcattccttttaatatcatttacattttaaaataataagtactgcctatttaaagaaaaaaagctaaaatcaaaagagaaacctctgactgcaacaatgagtatttttaacaaaacagatgtttatcttacttgttccttttctccttccagtggggctagggaagaactaaggaatgatttactaattttttgatgtaattttgtactggctatgaattcctgtaacaaacttgtcattggaaaagtgagacttggacacttcaggtatctctggagttttcatctaaagccagctacattgatctccagttcatgctacttgattcagatggctcagaaactgcaggcttccatctatgtgggatgtagctggtgaccatgtgagaggccaggggtggcagtagcagcacctctatcctctctggaggagctgggagaattcagttggcaaggaggcaagtggaacccagtaaattctcaaattaacagaggaacaactggagaaggctctgattcctctcttaagtatggctaaagatagtagggcctgcactccaatagctaagagataattcatagaatgcttccagataactttcctagccttcccatagaatctgccactcagaaaacatacgtctgcccaccaaattagtaaaattccaagttcttctcaaattcagttaacctgcaccataggtaacttaggacctataaatatttttattccttctgtagtgtcccatcacaatttgaaatccagtgtatgatttgctcagcctgctttggtccaaggtcctctttggagagaatcctgaaagtgtaaatgacttgcagctgaaccaggcccctacttcccgggtatgtactgcattaaaccccacacccctgcttggcctcgcctgggaaggcttcagaagagctcttcaaagcagacctcatcaaaacaaacacccctacctctacccccatctcctgtgcccttcagaaaacaaacaacaatacttctctgttcaccaaaaacaaggagaattttctgttcaaagtatttttttcttattccctattggcagcacttattaaggaacggatgactttcaagttgagtgaactctgtttgaaacataagcacataagaatccaggtgcttaaaactttttcaaacttaggtacacatccttacagccttcatataaaaaaaaatccttttaatgttttattaaaacctctgtcagtttaaaagaaaggatatctttgaccacagattttgagtaattacgtttacattgaaagctagtaagcaaaatgtctaagatgttacttccctttcaaacttttggaaacagctatggtgttagatggacctgggtttgaattctgtttcccttacttcctagctgtaagatctcaagcagctgacccaacctctctgcacctcaacttcttcattagtaaaatgaggataagaatagttcatagtagccagacatggtggttcatgcctgcaatcccagcattctgggaggccgaggtgggtcaatcacttgaggtcaggagttcaagaccagcctggccaacacggcaaaaccccaactctactaaaaatacaaaaaaaaaatagctgggtgtggtggcgcacacctgtagtcccagctacttgggaggctgaggaaggagaactgtttgaacccgggaggcggagttgcagtgagccaagatcacatcactgcactccagccttggcaacagaacaaaaattaaaaacaaaaacaaaaacaaaaaaacagaatagtacatagcacatacacagttatgaggattaaatgaatacatgaaactccttagcaaagtgcctacgtaacatatatgtagtaaaaataataatgttcaaacaataaaaaattagtatatcttattagctaaaatttagcaaatgtttcttcatttttatgaaggtctccaatttcacacttaaattaaaaggcttttcattaaaatcaaactcttgcttacgctaactcatgagtaaaagaaagaacccaagagaagaaatcagcctgcaatccatgaggaatgagcaaggaaagaattccatgcttccatgacaaatgttcagatagtcctaatgttttttattatctctagtgatcctctgagagtgagatgtctcacttatgccatgtatctatatccacgcagcatttgagggtataggatgggaaatgagattaccccaatgtcagaagtatggcttagggggcaaagtgcccagaatctaagaactcaatccagacagaagagtttctcctcaaagaaactacatggtaaacctgtctgtctgacttctgacttctgtggggaagtgatttttctctctgtttcttaccaataagcctattgatttctgcagtttcttgaatgaattctaggtatgaacctaacccacttctggaatttttcttttttttttcccagacagagttttgctggagtgcagtggcatgatctcagctcactgcaagctccacctcccgggctcaagcaatgctcctgcctcagcctcctgagtagctgggattataggcatgtgccaccacacccagctaattttgtatttttagtagagatggggtttcaccacgttgttcaggctggtctcgaactcctgacctcaggtgatccacccgcttcagcctcccaaagtgctggaattataggggtgagccatcatgcccggcctggaattctttacataggccagcaaatgatgtcaaatgtggggtaggggagaagctggtgatttatcttgaggcaatgacactctgtcattatcaaggatctatttggacttccaaaagaataccatgaggcatgaaaatattagccatgcctatcttctgttcataaaaaaaggcatcttgacttgccattcacagataccaaggccattgtgatgggggcactatgggaagcctggaggttgaaaacttgacctcgttttggagtgcttactttgtggcattttccaaattctggttgcctttcttcagttttcttgagtctaaagcattaaggatgccaattactaaagacctcattgacaaagtctagaacaacattgtgcaacaggaatacaatgtgaagcacatatataatttaaatttctttagagacaggtgcaatggtgtgcacctgtagtcccagctacttgggaggctgaggtgggaggatcaatgcttaagcccagaagttcaagtctagtcttgacaacatagtgagactagtttcaaaaaaattgttttccccaatagccacattaaaaaaaaggtaaaataattttaaaaatagattttatttaacgtattaaataaaatacaaaaagattaattgcaacatatcaatattttttaagttgagatatgttgcatttctttttttttttttaactaagctcctggaatctggattgtttgtagatttcataaaaagtacagttaaaacaagcagattcaaatatccagattgttccaaacatacttaaaagtttttcagtaactgaagcaataataaaattttaaatcttaattttaattaaagtcaagtaaaatgaaaaattcagttcctctgtcactctagccacattttaagtgccgaacagcaacatgtggctatgaaaaataactggtggaggccgggcatggtggctcacgcctgtaatcccagcactttgggaggctgaggtgggtggatcgactaaggtcaggagttcgagaccagcctggccaacatggcaaaactttgtctctactaaaaatacaaaaaattagctgggcatggtggcaggctcctgtaatctcagctactcgggaggctgaggcaggagaatcgcttgaacctgggaggcagaggttgcagtgagccgagaccgcaccattgcactccagcctgagcaacaagagctaaactctgtctcaaaaaaaaaagagaaaatagctggtggctactgtattgcacaaggtagtttgaggcgatgaagaaaaactgcacattgtcacatggagagtcatcacactctgagatttttcccttcattcttaaatgctacttgccaaagagagatttcaaaaacttttttttttcttaatttctagtttggctccaacagtaaaggctcagaatccttcttatatttctgtggtgggataattaacatcaagctccctgaaaacatgcaggtggaatagttcatatctgagagatgaattgtaataaatcctttctcaagaggcacatataggaaaatcttaaagaacatgcaggagcccatttacctgatacgactagtgcttcattggtcattgataaatgatgttaaatgagaaactaataaaaaacaatttttacttttgaattatatttcttaaaagattaaggtgataggcatataacataaaattaaccattttaaagtgaacatttcagtggcatttcatgtgtactatgttgtgtaaccatcacctctagttctaaaacattttcattacctcaaaagaaaagccgtattggccaggcgcagtggctcatgcctgtaatcccagcaatttgggaggccgaggcgggccaatcacttgcagtcgtgaattggagaccagtctggccaacctgtgaaaccctgtctctactaaagatacaaaaattagctgggcatggtggcgcatgcctgtaatcccagctgctcgaatcaagagattcgagcagctgggattacacgaggggtagcatgagaatctcttgaatctgggaggtgaaggttgcagtgagccaagatcgtgctactgcactccagcctgggcgacagtgcaagactctgtctcaaaaaaaaaaaaaaaaaaaaaaagccatatccatcaagcagtagaccccattcccccactccccacccaccctagctcctggcagccacaatctgctttctatctctaaggatttacctattctggataaataaaatcatatgtgaccttttgtatcagacttctttcatttagcataatgttttcaaggtttacccacactgtaacatgtatcagtacttcattcccttttgtgactgaataatgttccattgtgtagctgtaccacattttcattatctattcatcaggtgatggacatttgggttgtttccaccttttggctgttgtgaatagtgctcctatgaacattagtgtacaggtatctatttgagaacctgttttccattcttttgggcatatacctagaaacggaattgctgggtcacatggtaattctatgttcttctttctgacagactgccaaacttttctgcagcagctgcacattttacattcccaccaacaatgtacaaggctctcaatttctccacattctcaccaacgcttgctattttccatcttttaaataaaataaaagccatcctagtgaatgtgaagtggtatctcaaagtggtttggatttgcatttttctaatgactaaaaatgttgagcatttgctgtgcagaagagctaaacagacaacctacagaatggaagaaactatttccaatctgtgcatctgacaaaggtctaaaatctagcgtctatcaggaacttaaacaaatttacaagaaaataagataatatttgataaagcccattaaaaagtgggaaaaggacatgaacagacacttttcaaaagaagacatacatgtggccaacaagcatatgaaaaaagttcaatatcactgatcattagagaaatgcaaatcaaaaccacaatgagataacatctcataccagtcagaatggctactattaaaaagtcaaaaaataacaggtgctggagatattgcagagaaagaagaacacttttacactgttgtgagtgtaaattagttcaaccattgtggaaagtagtgtggcgattcctcaaagagctaaaagcagaatgaccattcaacccagcaatcccatcactgggtatataaccaaaggaatataaatcattctatcataaagacacatgcacatgtatgctcactgaagcactattaataatagccaagacatgaaatcaacctaaatgtccatcagtggtagactggataaagaaaatgtaatacatatacaccatggaataccatgcagccacataagaacaagattacgtcctttgcagaaacatggatggagctggaggctgtcatccttagcaaactaatacaggaagagaaaaccaaatagcgcatgtactcacttataagaaggaggtaaatgatgataacacacagacacaaacatgggaacaatagacactggggcctactctagggtggaggttgggaggagggaagagaatcagaaaaaatgactattgagtaataggcttagtacctgggtgatgaattaataagtataacaaacccctgtggcacaagtttacctgtttacaaacctacatatatactccaaacccaaaataaaagttaaaaaaaaacccaaaagaattttctgaatggttaaaaaaagtaacatacgcacaacgtaaaacttaccattttaaccattttcatacagtttagtggcattatgtacgtgtacatcgttgtggaaccatcactaccatccatctctagaactttcttccatcttgcaaaatagagttatgttgagtaattcatatgcaatgcccaggcatacagctctgatatgctagctcctaagatatctctggcacttaactagctgtgagaacttgggcaactcatttgaccatttggtcatccacagaatggggttaatatttacctcacagaactggcaaaaggacaaaataagataatatttgataaagcattttaaaaactggaaaacattttatggttgctacttataatcattattattattaacatagaaaatgtgaagatcttttatagaaagctgagaccatttattgtgatcattttataaatattgttatacatttaggttaccatctattcagatttatcattacacatatcttttacttttttattgattgattatatctagaatggaatactagatataatctactagaatggaagatccatgaaagcaatgattttttaaaattattttacccattgctctatttcagagccgagaagaatataaggcatatctatctcttgaataatgaaagaataaattactttatgcaagagtaaatatgttattagtgctttaaaaaattcattcataatgatagtttacatataagtctttaggttttcccagtgcaaaattaatacatgtgaattcccaaatgaaatatattttaaatatgaggaaatttcccagactagttcagagttaaaaggaagcaagtttaggagtaaacaggaattttaaaaatatatgcaagttttcaaaatatgttctgattttaaagttttgggctattatcagtacaataaaagatgagttcaattgggttaatataatataaccaaggaaatacttagagtatcattctcttttctaaacaaaacaggttgtagtagacaatactgtttatcaatacctttttattttattttattttattttattttttgagacagagtctcgctctgtcacccaggctggaatgcagtggtgcgatctcggctcactgcaacctccgccttccaggttcaagtgattctcctgccccagcctccagagtacctgggactataggcgtgtctcaccatgcccggctaatttttgtatttttagtagagacggggtttcgccatgttggccaggctggtcttgaactcctgacctcaggtgatccacccacttcagcctctcaaagtgctgggattacaggcatgagccaccgtgcccagccttcccctacattctgaatggaaagttaaaatgacaatttatatctgtaaaaattttgtaataaagtattttgatgggagataaagccatatgcaatcacatggttttaaaagtggagagtagtatgttacaaacatgatattgaagacttctaggttcctttatatcaaccctgattctaatatgagaagaaactaagccgcttctgagatacatgggaataatccttctgagctgttatcactgcctaagactttttatcttttttagattttgccttccataaaaatgtcttctccaataatctttccagttgtactatcttttctttgaattgttacttctttttggtcgttggtacactgagttctctagggtgattttttgcacctaagggtaagaattcaaaattgtgatgcaggtatttacagtagaactctgaatccttgtctttcacatttttggaataattactggggctttactagagtaccttgctaaggtgtgtgtggccttttttttttttttaattaaaaaacaacgtaagtgggagtggaatggggtaagggaggtgaatcattcatcaaatgaaaatttatttaaataccgttgtctgtgataaaggaataaccatttcagaataacactggaagaattaatttaaatggatgcacttcccaatattgttactgttttctttggtatttcattaacattgtgagtggggaggtgctggggtccatggtaaaaaaataagtaagtgaaaggcaaacaactttgctttctagtggatttcccttattacctaatgagggcagcagcttacaagttgattgtgttcaattcaacaaatttgttttagtacctaagtgcctgctatatgtacagagtgaagaaagaaataaccctacctttaagagagtttacggtctggttgtgttgattcaccttctgagaaaaaatgttatttgctttcctcaatttttttcctatcaaaagtaaacataggttcaaacattcaaacctatgaaggcctaaaaggaagaatcatcttcagtttgctgtgacgatttcactgagttttattttaaaatattcatttaaaaatacatacaaacatataaacccatcaggccaggttctagtgatctgagatataagcatgatacaaactacttggctgccgtgtatttttgttttattttaatccaggtgatcaggtctgtatggggaaaaagccctggggctttttcaaacaggaagggccctcctccctctgaatgcccgcagtgccgccctgtgcactttacagaacaaggagaaagtcagtttcttcaaactgcttttctaaagagcgtttccattcgtggtcctggtgattccaccatcttttcttcacaacagtgacggttctggaatttctacacagcctgaggggctgacggggtagaccaggtgactgggaaggggcagtggcacatgacaaaaatttgaggaaacgtccagtttccgtttcagggaatgcgcataggggaaaacgcaagtccccacgccatcacggggccctccaccgcggccggacgacccctctctcgggagtgactggggcagggcacctggcctcaggttcgagcggagcctgcactgagaggcaggagttggatgaaccacttgtagggtctgctcccagctacccaaagcgaaagggtgggcgaaaaagcatttgcaaaagaatacattaacctcacaaggaacgacccccaccacccatcctccagcgcccaaggtttcccacgaagaggtcgccgtcgcccttctccaagttgggtagaacctataaggcatcaccaactgcatctcaaaccaaccaagcaagtgacgctccaaaacctccctaaataccctctctccccagcattccgaacgcaacatcaagggcgaaaagaggctgcacaaatcacgtagaaaattagaccgcctctttccatggcgataatcgaattagcctcaaattaaacgtgaaattggccctctccggctgtggagacaaagcccctattgtcctgctcgggtagcggcagcagcagtgcccaccccgccccggccagcctggtcggtccccgccgctgggaggatgaggtccgggctggacccgggaagagcctcagctggagaggacgtggacgcgcccgaggctcggctccctgggcggctgcggggctccgggcaggaggagagggcgggcgaagcagagggagcgggcgggagtggggagggaggagtgcggagggcggagggcgtgcgggagggatcccgggagtgcgcttgtgtgtgtgtgcgcgcgcgcccgccccgcgcgctcctctccccgcccctcgccccctccctgcgagcgccctcctctcctcctccccccgccccccgcgctcccgcccagcccccggaatcagtgccgctgttgccgtgcaggctgcggattcctccagtccctccctcggccgcctctcctcccggagcgagcgcgcagccctgcgcagcagcgcccactggtcccgtcctgtgagccccggccccagccgcggacagacccgcggagtcgcctcccggcccacccgcccggccgccgaggagcgggaggaggacgggaccccggcgcccccaccccatccccgggaggtaggtagggggcccgaggcagggagatgccaactcactggggctgcctcccgggtgggctccgcggcggcggacgggcgggaggaggggcgcgggcccagggccggaggacgccgctgcccgcctgccctgcgcccggggagccgcgtgggggcagggaggctgcaaagcccgggcgggggcggcgcggggagcccgggtcgcgggtgctcattggtactcggatgatgcgggacgaggggcggcaggctctgcggtgaggcggcagcagacccgccgtgcgcaccgctgccgtccggccccagccccggcgcggcgcggcgattcctcctccctgcctccgccggcgcctccctgcagccgggcgcggcggcccctgacgcggaggcccctggcgcggaggtgggtgcggagcggacagcggacagccggagggtctattttcaggtgccctctctgtggccccgcgggtggggagcgggggcggcggtgacagggccgggctctgcgcgtagcggtgcaggggatgcggccaggcgtggtcccggctgcgccgcgctgcagctgagccggaggcggcggccccgcgcccccacctccgccccatccctgcgcttgctaccctcgtgcgcccgccccccccccgccctttctgccgtccccactctcccagggctgggcgtgagccgcctccgggcgccgagccgccgctgcgcccgcccttcagctcctgccaccctctcttcaacaggtttgtctcagcgcagggaccctccgggcctgctttgggtaggtgggctggctcgtcatcaccccccacaccacgcccacggccctcttttagggggcgccttctctttgtttttgtgataggaaaggtgccaactgctgccatcagatgaggagggggtggggatcagaacgcaaacctctgtccattatttttccaatcgaaagccaggccagatagtaagtgaggacagggtgcgtgtgggggtgcttcggcggagcagaaaattgaattcggtggggtttatttgggcggggatgtgcttttttggcaagatggatggctcacggtgccctcgccgtgatgcagcacaatgcagcagtatcgcagcttccttggttctcgctggcggggcttggcacggccgctcggcgcctgcggcccccgcccggccccacccaggcccggggctgcccttggccgaggcctggagctgctgctaccttgtcctgcagcttctgctggatgtggcgtcaggaggaccaggtcagctaggtgtgagcaggggagagtcttttcttttgggatgatccctcctgcacctcttcttgggctgcgctctgccggaggggcgccctgcatcaccagtgcaggcagaggggagccggcctgtggttgcggatcggaatctgatctgcgaccaggggacctgagccatagggaggggctgcaggaaggactgggcccagtggtgtgcggaggcaatgttgcagtgtggggagtcgcagcgtttttctgtggatcgtccataatctgtaaccacaacccagctatgcattaattttttctacgtgaaaagttggtgtttattaattggaccttcacaactgtgacattacagtacctcgtctgtctttggttaataccaagtatgcattttttctgtaggaaaccatttttaaatgaaatgattaatgcattttgggttttatgtcactaagacatttataagtatattaaaattcagtaggttgttttaaaaggaatttatatgttttttaatggatagtaaatgattcctttagcttgtattttgttttcatcgtttgctttttctaagtcaagtacagttgcattatttggatgctttattaaggattattaggtgtatgagtgtcatgatgggggctaaattggtattcagatttctattgattgaggtagccaagttaagtgtccgggcgtaattaatgggattatgacagtaacactgcgtttgtgtttgtttatatgtattttttgtatacatatttttcacagctgtgactggggagagggtggagaagggcagaccaccaaggcctcttgactggcatctagtcagaaggagatggttcccagtgttctcatgtttagtctcggccaggacacagggaatttcccttctaaatgccatctctataattcattattcagtgtgggatggcaaatgggatatatttcaaatgtcaacccaggctttcctaaaatgtttaggtgaaaaaggaaatttcaatatgctagttggaagggaaggtcagtgtttacaagccaagggcgtgcctgcttgtatttttaaatatttctaatgaatccaagttagttgcttttgatttcatgtggctctgcagaatagaactgcatgtacattgtgtggtgtatgtgcgttattttgagtttctctaatagccattaaaatatgagactttttgtgctggttgtgtaaaatcgtgttgcgtacagatttttatgaatgttgttcccatggatcatccaaacgttttggatttactttgttgtaagaaatatcctgtgttgatgtcacaggaggtttagctgttctgacttacacagcaggtgcagaattctgttgggttaagctctttgtaactctgtcattactggagtgaccaaaaccttcatctgagaggagaagtattgggcagtgaaggaactgctgtcactaggtcgtctcccacagttgaggttttctgtgaagaacttctcttgggcaagactagtaacaactatctgtgatgttgcagagcaaatgagaagacctccctctacttgtgacacatcctgagcagaggcttggcattggcagagtttcctggaagggtttgtagagtggttgctttgtcttgatgtttgaatgtatgactttacatgtggaagtactattttgacgtggaaggattttactactgctaacatagacatgattagtggaaatcattcagtgtggattttgtcgaaataattttaagcttttctttttaatagcatattcttatagaacattttaaagcctaattttttttacgtgcaatgacatgatgctcctttaattatgttgcatcgtaactagtatcttcattataattgggctttatttaatggcagccgtagtttctttcactacattattggaaatgcaaaccattcttccagaaggaaggggctaactacccctgttagaagagtgaactttgtaggtctgtggaagtgagtaaagcatctcatgggtttttcttgtaaattttcagtctttgctttttctcagggcatcttttctttgcaaaagacctagtttagtactctgatttttccggtagcacttgtaattatatttaaatttttattgtgtgggaataacatcatctatttttttctactcagtggttaaaggaaattacaccaattagatatacctgtgtttctatttttaaacatctctggagaaggcattttcataatgtcctttgctatcatagtgaggttcacggaccttcaacattagaatcgcctggaagcttgttgcaaatgcagattcttaggccccactctgaactcagccaatcggaatcaacattttaacaagacctttaagtgagttgtatgcacattaaatgaagaaactctattctgttccttcagcaaagggacctcaatatcaaaagtttccttcttgaattttcctttcttttgctgaagtatcagcacatttttttccttgatggtggtgacaaaagtgaggctctcactgtaaattatttgtttaatacaaaattattttataaagctgttctttaattcttggtggaagagtcctatataccatggtttatttagattaatcagtgttttaggttgttttgtaaaacacctctaaagttgaaaaacagtctttttcccctctggaagaaaaaggcattggttttgagacatcagagctggagcctcggaagctaacccctgagcaaagggtcctctctgctccctctgctctggcatcttgatgtctgtcatctgatatagtcaatgtcctgccctctcgtccagtcttttcttagagttcttttttgaatcaactaattggtaggtacaaaataatgttcctaaaatatatgttaaagaatcgtaaaccagctgggtgcagtggctcacgcctgtaatcccagcactttgggatgccgagtgggggcggatcacttgaggtcaggagttcaagaccagcctggccaacatggtgaaaccccatctctactaaaaatacaaaaattatctgggcatggtggcaggcatctgtaattcccagctactcgggaggctgaggcaacagaatcagttgaactggggaggcagaggttgcagtgagccgagatcgcgccactgcattccaacctgggtgacaagagcgagactctgtctcaaaaaaataaaaatcataaaccaagggacactcaggcagccaccggctagttcaggaagagccttatacattcagagcccacctccatcatcccatctgaaacaacccatatccttgattttgtgcatatcattcccttctctatggtttatcctttttaaaaaatcttgattgtgtatgattttgaactttatatcaacaaaattatactttatgtattcttctgactcacatatttagattaagattctattcccaaggtttatccatttcatggctgtatttcattcagtttcacctgctgtatagtattctaacgtgatttatttattcattgtactctagatggagatttggattgattccaggtttttttgctattgtgaaagggttgctgtgagtggtttttgtacacggctcttggtacatatgtggaggcacacacacccatttgctgtctctagggaatgaaattttctggctcacagggcatatgcatcatcagccttagtagagaatgtagaactgttttttacaaagcgattatgttgatcgtgttcccactagccataagtgttacagttccaaagccttgccagtgcttcacataccaggcttgaaaatcttgtccagtgaaacattatctcactgtgatttttatttacaatttctctgattattgagtttgaatgtctgtttacattattaaccatttgggttcttcgttttgtgaagtacctgttcagtcttttacccatttatcttattaatttgtagttctgtatgtagattactactaatcctttgtggattacatgtcttgcgacaattacttctcagcttgtgttttttttcttaactcgaatttgtgatttcttttgatgatcggttatttgtaatttagcagagtcataatcagtattttgtcctttaaagtttgtgagggtaattttcttatttcagaaaagtttttctttgtttggaaagagcattcgttttggagtcaaacaggttgtgggcccaaatcctaatggtgttgtatactagccttatggctaccactaggtactggccttgagctagttagttactcaagaccacagtttcctcattggaaaaatcaaaataatattagtttctcttagttatgatacagcagtgtacagttccaggcacatagtacgtatttagttgataacagttgtttcctttctgttgggactgcctaagcactatgacccactgatcccttttggtatgctttgcaaaaactacctaaacctttttatgtcaggagagctattaaatggcttattctaacttttgtattttaaaaggctgcattaccaatggcatttatatattgattaatacagtctgaagagaccacttactagaaacccttatcagtttaggttctggttcttgaaagtaatgtaattacatttatttgtacacagttcttttgaccattaagcatttatagtattaatgatcttcctttactgctactctgagattactttgtaatattgttttttatttaatgaataattattggatacattatcttgccaggacttgaagttgttatggttttgtggactggcttaaagttgaataagaattagttcctgaatgaaaggactgtatactctagtatatggaatatattttatgtactatacacagaaggtaaaatacctttaacaggctggatgtgtgactttggcaaacctttaaccctccggtctcagatctaattttataaaatggaagacttagatgaaatcatagtgggggttaaaacatggcacatgccatcactcgcttctgttcctggcagacatcgaaaatcagtaatggtactctttttccactgagctgagatagtctcagtcatattctcgacatggtgttctaggcagtaactaccactcgattaaatctggcattcagtttttaagctcctgtacacttctaaattctgtgattataagatacttgagaaactcatcaccttggcagtgttcagaatacagtgagactggaagaaactagaagcaaggagacaggagagaggtgactgggggtccagaagtaaagggagcaagttacagtggtggccaagggaacaaggagaggagagatgggaaaatggttgtgaaggcccaatcctatgcgaagctatttgtagggtaaatggatggcaggatggatgggaggtggacctagtgggtgacgagctaagctaaggtgataaagatttcaaatttgaataatgacaatgagcatgtttggtgatgatgacaaatagacaagtcaagtgcatgattggatatttgattgggaagagtatcagttttgctttaaacatgtttgagtttgaggttccagcacaatcctcagtggagctggagagaggtcatggctagagaggctgatgggaggctttggatggaggggccctgggccccaggcttcaggctctttacacaacccacccacctcgctcacacgctaagtgaccttgggcaaactgcctagacttctttgtgtccctcaacatcttcatctgtaaaatagtcgtaatgagagtatctaccacataggattattaaagccaaatgaggtaattcagcgcttatcacaataaattttaatgattataaaatgtggaatttttgcttagtttgacttaatattatgctttctttcaaataaacagtttgatttgtttagaaaaggtatattctagcaaataacaatcatttagataaataatgctaagttccatctgtattaaacctgttcctatacatcatgtcaaaataataggaaaggaaaatctgatttatatatatgtattttttaaacaaacaataaaatgctaaagccttagtagctaaggaaatgatatgagcagatagtttataaaagaagaaatcaaggaggtcgataactgtaagttcaaactcaccagtgtatgaaatacagactaaattaattaatttttccacttaatggatagatattatgctctgggctgctgtgagatgggagctctgcatcacctgttgagagcatattttgattaatacaaacttaggggaaaacagttgggttatatatatgtaacagaagccttaaatgcttatacctcttgaactgaaatctcacatgtagcttggtaacctacaaaaacaattaaaaataaggacaagtttttaaacaaggattttcttggcaacattaatagagaaaaggggaaatgttttttaatggaacataatcaaataaattatggcgcaactgtagggtggaattcaatgtagtgcttaaaataatggtttggaagaatattactgagatgggaagatgccggtaatacaggggttagtggaaatatctggatgcaaaattgtatagtgtactataatcctggttttactgtattaagtaaaagactggaaggaaatacattaaaatgttaatggtttgctttggatggtaggttgatgggtgatttcctctcttgtatgaaaggaaattcccatgacttaatgtttctctttttgagttttgaaatatttcacggtagagaagaatgcagtaaataatataatagatgaccatgaggaccatttgttttggtttgtttgaggaacttttttttgttttattttgttttcttttgttttgtttgagacagagtcttattctgttgcccaggctggagtgcattggcacgaacatggctcactgcagccttgacctcctgggttcaagcagtcctcctgcctcagcctcccaagtagttgcaggcgtgtaccaccacacagggctaatttttaaaccttaaatttttttatagagacgaggtttcaccgtgttgcccaggctggtcttcaactcctgaactcaagtgatctgcctgccttggcctcccaaagtgttgggattacaaatgtgagccaccgtgcccagccttgggcaccattttttaataatcaaaaaagcaatcaacactttaaaaattctaatttttaaaaaggaaagaaaaaagtaaatctgtccaattgtagatcattattaagaaatagttttaaatccagcgattgttatatctgtccttctttgcagttttctaagagcaatgatacagtgtgtaagttagcatcttaagggtataggtgtgagataaattagtgtattcaaatgtattaattctctacactaacctaggcagcttgaaaagagcagaggaccagggttctttggtatttccagtctccacacttgagtgcagagcagtggaattccatgacgtgcatgttctcactcgtggaaacctaaacactgctactggagctagtttgtaaccattagaccatcaggtttcagtggaattggtcagaaatgaaggtaaaattccaagtgaacattttaaaataaaaatcacttcagatttagatttactttcagtgaatggtatctcagcatctgggaatattgtaggctaagattgagaggaactaattttaatattcttcgttttttgtatgaaaagaaattcctgtgcaatgttatatttttgtatatatacatatatgatgcatacatatcatgtttatctcatatatatatatatatatatatatatatatctcacacatgggagagagaggtgtgtgtttgattgagtaatctctaccacgaagggaggcacatattttaaaacattttaaatggggaattttatagagacagtattttgaaaaggagtcccatgaatgagtcaagttgtccttagccagtggaggaaatgtttgggagggaatagtactttctattttatggtccaagtctctaagtgtgttggtactttgtgaaatgtagcttataaaaattaatgaatttccattaattttgtattttttctgccatcagctttaactgagtggttgtttgaagaagctttcaggattaattgtgctttgacatataaaaataagatgttatcaagattgctttaaaactgacccttgtttataggagtcatacgtccattcttaagaaactctcaactgtgacagtaaacatctgagtgatttttagaaccattttaatatctctgctctagaatcgagaatgccctgttagttctgatttttaatatacaaatttgaagccactagttaggcagtaaaatatgtattagaacataactatagatttttacccaatagatcaattagtatgaaatttaggatgatatataagtacaacagaatttattcctttgaggtatgtattttcaaagtgtaatttgtgtaattaagtatgtttattcttcgagaccatcctggctaacacggtgaaaccccgtctctactaaaaatacaaaaaattagccgggcgtggtagcgggcgcctgtagtcccagctactcgggaggctgaggcaggagaatggcgtgaacccgggaggcgaagcttgcagtgagccgagatcgcgccactgcactccagcctgggcgacagagcgagactccgtctcaaaaaaaaaaaaaaaaaaaaaaaaaaaaaaaaaaaaaaaaaaaaaagtatgtttattcttagaaagttcatgagcctattaacattggttatcttgggtaatggaattgcagaagatttcatctctgtatatttttttctccatattttttaagttttaggaaataacaaattcttgttctttatcaaaaatatcctaacacttctgaccaaacctcattttagctggatacaaactaatcaaataatttaccagctaaatatactttctgctgttcaatttttttctaccaaacttacggaaaagcagtattaataatgaagatataaagaacactgaaatttttgaaagatcttttcattccttgtttaaatgttcatttttgttacagccttggcagttcattacttatgcagagtgtgggaaaagctctaagaactggccgagagagcgcctgacagaaacattgtccaggaggaatcagccactaatggccactgcctttggctctcggtgaagtttcgtttccctacagtactcttgggtggctgtttcagggatacattttgttctagtgtgtttgcctcaaggccaaatataaatgttgaagggctgtacatttttctggaatgttcttcaccagctgtaaagtcttgggctgggatagggataggggatttttttgggggtgggggggcttttttctctttatcttatttacttgaatgggaaggaaaacttagattcttccttaaaacaatgttatttattttgatctgtgatgtttaaacattttccacggcattttgaaacctgtaaacataggagtactttgttgttgctgttgttggagacaaagtcttgctcttatcccccaggctggagtgcgatggcgcgatctcggctcactgcaacctccgcctcccaggttcaagcgattctcctgcctcagcctcccgagtagctggcgcctgccaccatgcccagctaatttttgtatttttagtagagacgggtttcaccatgttggccagactggtctcgaactcctgacctcaagtgatccaccctccttggcctcccaaaattctgggattacaggcgtgagccaccgcgcctggccaggagtgtttttatagtgattacaatagttttaaaaattaaaatagtctttgtatttttaccaccttagaatccctgatttttttttttaaatttctgctaatacacatagtatatgtggttttttgaatggcttatgaagactatataccatcataaaggcataagttagtataaaatcatcataacaaaatacaaaagtatttttaagatatctttttattactgaaataatagatgttttagatcatatggaaactaaagatgaatacaaagaagaaaattaaaatcactagatactatgtgaccccggaaacatacagttaatattttagtgtttctcggccaggtgcggtggctcacgcctctaatgccagcactttgggaggccgaggcgggcagatcatgaggtcaggagtttgagacgagcctggccaacatagtgaaactttgtctctactaaaaatgcaaaaattggctgggtgtggtggtgggcttctctagtcccagctacttgggaggctgaggcaggagaatcacttgaacccaggaggtggaggttgcagtgagctgagaccgcaccattgcgctccagcctgggtgacagagtgagactcagtctcaaaaaaaataaaataaaaaaataaaaaataaaaaaataaaaaaatatgtgtgtatatatatttatttatttattttagtgtttctcttttaagccttttttttctgtgcatgtttcttcatctcacacatacatattaagggccaatcctccaatcttaaactgaagatgtagagttttgacagtctctataatgacatgatgatgttcagcactcttgcagcttatgcatgttgcatggcaaaacataaaatctaatgactggtctatagttaaagctgtagcatgaacactatctgttgccctgagctgttttaggggtgggatgttaaagaaaaatggaaaggaagaaagaattcaaaaatttgtttattatagctgtttctcttttatgaataatgtctttttacaatggaaaaataccagaaattaaattctcattagataatgtgctttctgttttgttctgaagggaattcccatcacagttgcattaattcccctgagagacatctccatatgcttcggacaacatctgattttacttttgtgttctgatttcagagtctttgaaatacctatcccataatgtgtcgcagtggaatggatgtggttattataatcttggttttaagtgtaataaattttactgggctgggtttggttgtaactgatgaaagcatatactagagctcagctttcttggggtctttgtattagctggattctttacaattctatcttgggatttaggatctgtttcaagaagaaaaagcgttatttctatttgattatgcaagccagttctttaagcctttaggacatcagatggatggaggtgacttgctggcctttgttgcctttaactctagtattcggcttctttctgaggaaggtgccaaaacggcttccgtatctgctgaaggaaaagagggagtgggaagaggggagaaatatttcattggaagataaaaaaagctctttccagcaatttcctttagaaacttgggggttgctgttagtctcatttgggtaatgggccccaaggaaaagtgacaaatggccttcttctggggtttaaacactaaaggtcagtgttggcccttttcacagttaagagggaaaaatctgagctgggctgggtggactttctccaactaagggattcttctgaaactcctaacctgatgggaatcattttgtttgcaggtggccaaagcccatcaagggaaatgcttgatggttactgtgcctgagctgcctgaagcctggtgtaggagtctcaacttgatcttgaggcagctgcaaatgttaggtcttgacacttgggatggcaacaagaccaggcagtgcccagagtggtcccagcggcctaggttagaggagggtagggggctggaatgtggccttagccagtcctctgagcagatgagaatacctgtcactatttcaggagatgagttgtggtcagagatatcagtcaggtgacttctctgagaggggcctggtccttctcacagcaagattgacaagtctgtgctgccagttgtccctaaatacccaatttatctcctggggtggagttggggaagtgcctctagcctggagcaaagagatctgcctgccatttcggaaggaaagaaaccagcacacatcctgtctttcattctctgtttcaaaggtaggtttttgtctgtttgcttgtttttaaatcaacacccagggctaaaggaaatcccgagtttccctgataatcaggatgatttcttattttgaaaggcctattttgccttcgaagtgtgtgtttctgacataggtttcatcctagttctagaaatcttgcttaattcataaaaggtaaaagtttaattagagagaaggctgatgtatcgtcttgtttcaaagggagactattcttgtctgtcatttgaattttttatatatattttttccggctgtgaagaaatattttattggtacatgtgtacatgcattttttattcttaattatagtatgtattttcactggactacactcttgttaaaggaaactttgttcacgtgaaataaacctatctttagtgagtcatacttgagaactgcttctcagtctcctcaacttttaaagtcagtggtatttcatgtaaagagtgtatcggtagctggcctatctctggaatgttgtgcagctgtgcagagcgtgagtctcaaatgtgctaattaaatatgttttttagcaagaatggaatgtagcagcatttgaatggcttcaaaaaacattccattttgtttctgaagagggcttttttcgtttttgccaaatattaaaaattagagagtacactgacttttagaggatgtattgctatgttaaattgttctgttcaccagaacagggtggcatgtgcctgtaatcctagctacttgagaggctgacgtgggaggatctcttgagcccagggcttcaagactagcctgggcagagtagaaagaacctgtctcaaaccccacactgttcttttcgcagagttaatggggctcattaaatactgagattatcctttagaacaatcttgtccaacctacagcctttgaatgtggcccagcacaaatttgtaaactttcttaaaacattatgagatattttttgtgatatttatagctcattagctatcattagtgttttactttatgtatagcccaagacacttcttcttccagtgtggcccagggaagccaaaagattagacacccctgctttagaatgtactcaattaataatcttcaaaatgtagggattaggtggggtggctcatgcctgtaatcccagcacttttggaggccaaggtgggaaaattgcttgagcctaggagtttgagaccagcttgggcgacatggtgagacctggtctctacgaaaacaaacaaaaagaacagaatgtaggcagtggtggcatgagtaaggttctaaggtttaccatctttagttgatcttgctcatttcccttggtatcagttctccttccttacttggtgagtgcttaacctttctttgggcagtaaggcatgacatttctccccaggttgagcagttttctgatacatattttttggctgagtgtgacttgtatctttttggactaagctccattcactcagatggtggtctgatttttttttttttttcagtcaggcattgtgcaaagtgacctgatgggaataaatggcaggttggttgtgtaatgcagcaacatcttacttggttgtctttagagataagtgggacgtgattccagcaaggctgtgcatcaaatgttggaatgtgttggagaactgccaagaggttgggagcaagctgtgtgacaagcactaatgcagccttggcctgccttaaaatagctgcaggttaacaaatatcttgaaacttggcatttcttttgagcaaaattgctcctctgaatgtgttaccaagaggtgctttcctcttttttatcgatttttttttttttttttttgctgttccaactgtcttaaaacatcttatgagcatatgaagaagatataattctctgtaacatcttatgttgaatgattttactggactaattattagcacattatctgaaacttcacttgtagttcttctgctctgctcacccaactcactgaaaaatatatagtctttgtagtttgaataaaaactggggccctgaagatgtttttttttttttttttttttttgagactgagtctcgctctgtcgcccaggccagagtgcagtggcgcgatcttggctcactgcaagctccgcctcctgggttcacaccattctcctgcctcagcctcctgagtagctgggactacaggcacccaccaccacgcccagctaattttttgtatttttagtagagacagggtttcaccatgttagccaggatggtctcgatctcttgacctcataatccgcccgcctggacctaccaaagtgctgggattacaggcatgagccactgcgcccagcctgaagattttttttaaaagtcctatattttatatgtttgataggcttttggaaaggaattattgatgtttgaacactaacacattagagaggcagagtcagaggcattggttactttgctgtggaatcttgtcttagctgattcacttttagacttcttagtaagctcattggtagtttgtctgcagtacttagttcttgtttgtaattaattcactgtctaactgtagtctctcaatttttttcaatagaaaggcttgttttttaagtcagagtggtaaaaacagggggggttgggagtggtctttgaaatgggtcctgtacagacttgagcctgatggtgatgtgatcaaggttgcagggggtgtgggtacctgggtggggctggggctgcctgtgggactaatctaaacagccagttagtttgggtgctctgaatatgacatttttaaaaatgcagtatttgggttaatgattggaagtaaactaagaatttccaggatttatatgttaaatagcagatgaaaacagtgagttacatgttaaatagtagatggaaacagtgagttaactttattttgagaggcttaaatacaaaccaagtttctatactaaaggatttcctaaaagatgatattaacagatatgttaattatcccataacttaaagtcctttagacgtttagattgagactaattgtgataatttcatagctctgtagcgtatcctgaaaatggctttgtttcttttgtttcactgtcttcatatgtgtaagtcttgaattttgctttgtcactttccgtattttacatgtattttagaggtcctctccttgtatagaaacattatttctggttttatgtaagtgccttatacagagatttataatttgtaattactgtactttttggtcaatagaattgaggttatttggggtatgtttttagaatatgttaaaaaccatattttgtgtttttataacatagaaaaatatttcttggaaaatgcgtgtgtgggcagcttcttttagatgtattgatcttttcactttcagatggcaaatgaattctatatggcattgttgccatgttggaaaatttctttattgagcctatgacttctaaagtatcaaaattctgtttttgcttttcccttttattggacatctccagttttgttttttttttaagcacacacgcacacacatacacacacatccttggataactgaactggtaaattgtattgaggagaggtgaactacaggccaccatttcctttttacttagcataccattatctggtcccctcatgtgaaaatatattttggatagttttcacctcccaccatctattaatttagagtgtgcattcctttaaccttgcaggagaattcagtcattcattatacgataagcaggcaaaaagttaaatactcaaatgttccttttctggattattgtctgaattagaaaaacattcattttaaattttacacatgtatatgggatgttctgtctcctcgtctgtatgccttgtactggcacaagcttataggactaggaacaaataagcttagcatttaaaatattccagacataaaaaatctatggaatttgcttatatctactgggggatgcagtcagacagacccagggttttaactggctccttctgcagtgtgaaggcagacggaaacattggagtctgctgcagatggcagcagggtggacaggtgaggcccacatggaagttcataccactggtaggtggagtaatgagttggtgtatgaaatgctagccattttagatgtttctacagctgttgttggctagctgaaaataaattgaacttgttgaactggtaaaagttttgctgtctgaataggcttagataaaatagtgcttcagatgcctataaagatgtctattgtaacattactatgatttttttaagtggtgataacctaaaagtccatcattggtaagttacagggtggactatatattctggaggcaatacagtgtgtagttaaaagtgctgaccgtggagctgtggtgcctgggtctaaaacctgatttcaccatgggcccactttgtgaccctgagcaagtcattaacccttctcggtctcagtttcctcatcagtaagatcaggataatcatagtacagaccatatagggttggttggattaaataagttataggtaaagcagttagactagtgcctggaaatatgtaagtattatttactatattaataaaaactttaatattattatggaataccttctaataacatgggaaggtttttaacatagggagaaaaagcagaacacaagattatataaatggaattaccgtaactatgtagaaaaatatacaaaagggataaggaaatactacaaatattaaggtttttgggggaggggagaatggatgagattccttgtgatttttgcttttgtctcagagctgttttgtattttctgctgttctacagtaagcatatgttacttctataatttgaaaaagtaaactttgttttcaaaagtggatgtaggctgggcgcagtggctcatgcctgtaatcccagcactttgggaggctgaggcgggtagattgccttcaggtcaggagttcgagaccaacctggccacatggtgaaaatacaaaaacacaaaaaattataaaaatacaaaatataaaattataaaaatacaaaaaattagccgggcgtggtggcacatgcctataatcccagctactcaggaggccgagtcaggagaatcacttgagcccgggaggcagaggttgcagtgagctgagatcgcgccactgcactccagcctgggtgacaagagcgaaactccgtctcaaaaaagaaaaagaaaagtggatgtatcccttgcaaacggttagtttgtcaattataagaacagcttattctttaaaagcttagggccttccgtttggcaacagtttgtctccttttggttccataatacttccacattcttacagaagctaatgggaaatgctggattaaaccacattatctatgctgttatctatgtttagaaacttttaatgatgacagatatgcagtcccttctctctgtggtcacatgggagaatcactcttgcctgctccccttgcattttggtggcatgttggactagttctgaggaatggcctgtgtccagactgcagccagagtccttgagtgagaatggtagagcctcctgctaccatgtgacaggcacgtaacatgagtgggaaacatgcttctgtgagtttgagccacagaacggcattcttacagagtgccttggagtaatgaaactcaaaactattttttaaattcatcatttagtattttccactaattcagactcattgtttagtgaaaagaatacagccatcggtaaggcacatgactgttattaacagtatgaatttagacaaattatgtaatagagttttagttttcttgtgtcaaaggcctcacctccacaaactacaaacaaaacttttgatgcttcaaattagtccataccagagtgtttagttttaattcactgctctttagtgcttgaaatgagattctttagaccaaagtggccttaaaggttcattcttgttgtatgcttattccacatttctctatatatttattttgtcacttctggtcactatatataggtttatttaagaaaaattcccttccatagtttatcaggcaggttaggctggtgctgcagtaacaaagatctccagaatctcggtggctcaaactcacagatgcgtattttccactcatgttacttgtccgtcacatggtggcagggtgctctgtgccatcctcactcaaggacggtggactgatgggctagatgcaggccattgatcagaataatcaaatgccccgcccaaatgctagggtagcaggtaagagtaatcctcccatgtagccacaaaaagaagagactgggtatgtgtgatcattaaaagtttctaactaaacatagataacagagtaggtaatatggtcgaatccagcatttcccatcagcttctttgaagcaccagttttgcagtatgttcacatgtactgttgataaagggcatctcctggtcaagtaaatctggagaatgctgggcttaataacatgtactaggcctctttagtgaaggtcgtctccgagctgttgtatcctaacaggcattctggaggtggagagtaacatacgatgtttcccaaacttacctgacctttgaattattttcttacttttcatagcctctctcggatgcaggttttgttgaacatgctttgggataccctaatttgtctaacttgttctcatacaaagcaagtatttggaattgcattttaattaatacttgcattgggaagaagctttgtttttattgtttgttaaaagagttgactatttgaagagagattttttctattgcaaatcaaattgcaggcagtgtttttaaaaattagttattactggttacatgcctgtgttgaatccataggactttttcttcatttagttgcctttgtgttctaaacttaccattgaaaagagaaaggtaaataaactttgaccacatatcttagtggttataaaaaaattaaattggtttggacagatggtccaaacacaccgagttttttttttattggcttcagtgtttttcttggttctctttgactttctgtaacaagttttctagaagttttgaaatgagatactactgaaatgagggctctgataagaaacagagagataacttttgtcaagaggtattaaatatttctctaccagaagactttggatttaaacacaacatttgttgccagggattttatgcctgcgtatgtaacaaatcttagtatggaagttttcacttaaaatggctgtaaacttcatgtaataaactttaggtaagaaggagcagcctccccaacccccgttttgtaactgtacatgggtaaaacttgataaagactaaactctctaactccccagactttcggatttgtggcattacctttttttttttttttaattaattaattcactttctattagaaatcatgttaaatccaggccaagaattcttttttcattttctgttttgtttgcttttttcctttgtgagtaaacaggtgcgaaggacaattgctgttttatgacaggaaacacacttttaaagctgtcagttacctcacagccccaccctacccttttcctgctgccattacgattaagactgactggtaggctgggcgcggtggctcatgcctgtaatcccagcactttgggaggctgaggtgggcggagcacgaggtcaggagttcgagaccagcctggctaatatggtgaaaccccgtctctactaaaaatgcaaaaattagctggcatggtggcgggtgcccgttatcccagctactcaggaggctgaggcaggagaattgcttgaacctgggaggcggaggttgcagtgagccaagatcatgccgctgcattccagcctgggtgacagagtaagagtccatctcaaaaaaaaaaagactggtagtagactttgctttttaaaggtgacttgggaggatttgaggcagagaaaaccttcttcagagccacagttcccagtcttatcctttttgttgataccagtattgtggaaaaagcattcatgacccatcacaaaaacatacattaagaaaacatttttcacatggtctgaggctgacaggaatcaggcttaatgtatccagggatatgacaaacatgggaacctgcaccagttgccacagagctgtccgatcctggtcccagggcccttgtctgtggcaggtcttccccggggaagagatttcactctcttatgagaacgctcgtgtttcatgccctcagatgcttgtgtcaggttccagtgatggtagccttggagtaagtctgcctttgagagaggattgttttttttcctcactcttcaaggacctgtagtgggtcccctgatgggccaccctctggacctggtcaaatgttggggagtttcgtggaagagcagtgttttcacattacagggtgcagctcacagtcagaaagattgtagaggatcatagaattggaagttttgggtctgggccgaaccctgtagatcttagtacatccacatgattgtatcaaagaagagtccagagctccgagaggctaggtgcaatcacacagcttcacacaagagtaagggctgaaactattgctgttaacagatatgtggaagtacttggtgtccttgcaactatttccagtgtgctgaaccttgaaaggcatcttacttctgctaattggaaccacttgggatgcattttaaaattatataaatgaagtaagcctacaagtttatgctcatgtttactgttttcatgttgtcaaactgttaatagcatgaatggttaaacatttgctgggaaaatagaaagtgttctgaaaatacacaataccagagataaaaaaagatgtatgtacgtatatgtgagtgtgtgtgtatatatatgtgtatatatatatatgttttattactagggaaaggaggaaagcccattgtgtatggaactaaaagccagaacctactgcatgtccacctttgttttaataaaaataacaaacaactgagtgtcctggctgcctggccaggctgaaggaaagtaaaggttgttttaaaatagaaaaagatctggttaaatatttgaccagatactttgattaagttgaaatgtttaaacattttcaggcccagggatgtcagtgaaggctgactgcagagtcttctctgcctgcagatgacttgtgttgtgtatagcaatgatttaaaggcaaataaagtatagttatagaaaacatgacccttaccaaccgcctcccccccaagttggtttgtaaccatgtaagaaatctaaggtatgattggtaaaattaaataaataaatcccattgttccagtcctcttctgtggaaggtaggacttgggagggagtattttacagtggttaggttctgtttcttggagccacactgcctggttggaaccctgcctctgctggttactgactgtggtctttggtaggtgaacacataatttattatccaaactaggtaatttatgagaatgaaaggagacacttttaatagttgtaccagtacagcaggcataaactaggaaggtctgaggcaaaccagataacatggtcactctagtcttaacgaagttacctaatcttggtgtcttggtttcttcacattgtggaagggacatgactcacttcctagggtgttaagattaaatgcaataaaacatgtaaagttttgcaatgttgtttggcacatagctattcaatagttgtagctatttaaaaaattatttagggtacttaattcatgtaataaccatttaagtattcagttcgctttctattatctttatattatttctcccaagcaaattttgctttttttttttccaagaggcaaggtctcactgtgttgcccaggctggcctctaactcctgcgctcaagtgatcttcctgcttcagccttccaagcaaactttgcttttaataacattaatatttactaatggcttattccatttatggcacctgctcaaacttaattgcttgctttatctgagccctttcctcagataaaggctcagaaagtaaaattgacttttactttttcagctacgtgtatatgtggcacttaattatataattagcacctgtggcccagagatgggtgctgggtattgggacactcatttatcaggttgtgtgtaattagcatctacactggaaagcaccttttgaacagctggcgctgagatacagaatggttgggaggttgagtgggtggggagtggcaaagcccaacctcttctgcctcttttaaaagttggatttttcccagagtagtgatatgcagggttgccagatttaggaaaaacaaaatcaaacaaaaaagaagccagaatgcctggttaaattttaatttcagatgaacaacacatcgttttttagtgtaagtttgtcttatgcagtatttgagacatacttatcctaaaaattcattgtttatctgaaattcagctttaacttgatgtccagtatttatctagcaatcctagttttgtaatccgaaagaatttttattctattcagtataacccacattcagatgtatatgaaacatgtagtccagatccttttataagtattgtgttaattttttaaaaaatccatgttgtctaccctccattggaatggatggttgagaagtcatcactgagttgctgctgctggttcccacaaaggccaagatgaaaaagaattcagtctggtttgccacagcagcagggatttacatttgctctttgagaacttattggctgtgaatgtggatgaacttaagccagctcttcttccttgcaggggagtccattagttaaggtgacttattgaagccctggccagctctaggagttctcggttttataattgaattactttagtaatattaaataatttggggagggggttaattttgggtcatttatatttcacttgtcaatgtagagggagctacttttattgtcattaagagtgacattcatcctggtgccatggtgagcacctgtggtcttagctacttgggaagctgaggtgggaggatcacttgagcccaggagtttgaggccagcctggcaacaaacaaaatccacatctctaagtaataatgatgatgatgataataaaatcctagaaatgaagaacaggtttggaaaaaaaaaaaagtaaccttcagatactcttcccattagaatctctcttgctgtttttgattttcagcagtgctgcccagaaagtgctggtgagctttttgccccagctttggaactctatcagcagtcaaccctgaagggcatggcatgcctttgggaaatgctgattggaagattagaggctgcagaaacctgagtgtgtgtgtgtgtgtgtgtgtgtgtgtgtgtgtgtgtgtgtgtgtgtgttttgttttgtttgtttgtttgtttgttttccaaactctggatatgatgcctctgttaaaccaagtccctgaggaaaagcttcaccagattaatgatacacttggtgaaattagtaatggcaagtaaaggttgagatttgtgcctgctggacaagagtgagccagagcaaatggattttggaccaataccggctttttaattgctgccatttaaagagtttaatgtccccagtgaaaaagcacaggtttcagataatcttttgaagaaaaatgcatagtggtaagagcttactgttaggcgcagagagtgtgtggatgggttagccaagggaaggaatccaattaaagctgtttgttcggagtactagatttggaggtgtgttttattgttaactggtaactttccagaaaatgaattatttgtatataaagattgatactagccaggctttatatactgacagttatttgtaaaacctctttgcttcctccttttaccttcttttctgagctgtctcttttcctccgcatggcttcctttataaagcagcccattttttggacatggttttgctattgatgagcctgaggtgtggcatagtaccacaggattgcatgatgagtgggatatttggcctcattatttacatggcttagtttttggtgtttgaagtgcctggtcggatagggattgactattaatggtagacattttcacattttggagcactgatcctcaatcttggcagcgcattggcatcccctgaggagacttaaaaaaatgcaggtgtcagccgggcatggtggctcatgcctgaaattccattgctttgggaggctgaggagggaggatcacttgagtccagaagttcaagaccagcttgggcaacatagcaagacctcatctctacagcaggaaaaaaaaaaaaagaaaaaattagaaacaattagagaaaaaatgcagatgtctgggtcccacttccagagaatctgattgaattgtctgggatacagaatgggcaccaggacttgcaagaggtcctcaggtgattgtaacataagccaagtatgcatgctatcctctggcctcccctcaaaattatgtctctggcctgtgctgtccagtagggagccatgagcaccaggaagttacttatgtttatgtgaattaaaatgaagtaaactgaaacttcatttcctcagtcacactagccacatttcgaatgctcagtagccacacatggctcatggctgccctgttggatagtatagatatagaacatttccatcacagcagacagtttcattgggcagcctagatctagggtgtcaacaaaacatgggaggagcatgaacatttaagaagcctgacacaggaaggacaggcttggaataagtaatcccacaggacttggcagtactgagtcactccatacttttttaagcagcctttttctcaatggtcttttggcaccagaagccccacagcagttggtgcaatggattatgtgtcacatcttacagaaaggccccgtttaaagcaggctggcccgaaggggtgtggtgaggactgggggcaggcaaatgtgaccctgaggaggccgggccagggaagagagaatgcagctttattctttcagagccgaggaatgccctggaagggaaccgaagcctgagtattggggttaaactaggtgagaggagatttttatctcttctgctggagaaagacctgcctcaatagtttgcctctgctggctcatctctagtgtgtgggaaacaaggacagtgctagcacatatttcccgtgaaataaactcccattatgggcccccatgttcttggagcactgggcaccacggggttaagaatggaatcaattatgttccatgtttgttcagacatagcacataagatccaaggaaggtagggtcacggaaaagcgaggggttagaggaaacatgaagtgtataccaaaggatgcggattttctacccgttgcttccctcagcaggacctttttggagattgttcctcctgcaggcgtgagaaaccctcacgtggagaggctgtctggaagcccgcagtctggtctgtaccatccaggctctttgctgtgccttcctgtctcctgcatttcgctggacattagcacctccccaggagcagatttctgttgctttctgtgagcccactataaagaaaatgccaagtgttcctgggcacaggaagtgggtaggaagagctctgagaatgcatggatcaaaggcacttgggtgatttaggggtgtgacccccagtggcttcacagggcctgtgagtcatttcaaagagtttctcctgttttgtcattgtctgctgttaaaccagggtgaagtttaagtgcctgttgcagaccttattgccttcttgctttgttccgctggtcaggttagtgttcttgacggggttgtatccaaatatctgtattggggctgggcatggtagctcatgcctgtaattctagcactttggggggctgaggcagtcagatcacctgagcccaggggttcgagaccagcctgggaaacatggtgaaactctgtctctgcaaaaaatacaaaaattggctgggcatggtggtatgtgcctgtgccttgggaggctgaggttggaggattacttgagctcaggaggcagaggttgcagtgagctgtgattgcaccactgcactccatcctgggggacagagtgagaccctgtctcaacaacaaaacaaaaccaaatatgtctgttggcaagtgataactgcacggtattaactgcctttctctgagaaataaattatcggggccctcctaggacttttatatgcttgggaattgtgtttattttcctctcattcacttcagtcctgctcttgactgccagaagaggcctgctctccttcctttcccattgtcagtaaattttagactttttgttagtactcatctgctatttttaattacatttcacacttttattttgccattttctatattctctttcctcaagctcagagagcaaggtaggaaatgttaacttctcctaagaacaggaatatgggaagctggaaagccgaaaaagaatgctaagaggaataataggaaagccagcgttgatgacaagtgtcttctgtagttgccatcctggtaactcttcagggtgccactattcctctatgcttatggatgtttgaggccttttataggatagaatttcaaaggacaagtagagaagtgttaactcctgggagtagttcgttggttttcccttcatccttttgcctgtacccggcgtggggtggttgtgtcggagacaagctcccagaaaggcgcaatgtggctcattccaggcctcaagcaccagaatacgtttagcttcaaaaatgacaagtttgataagagtgttcagaccaagaaaattaatgcaaaacttcctgatatagtatgtcagcgctataaagaagttcttgagtgtcgtgtaaaatacaaaaaatacaaaccattatcaaacctaaaaaatgtgttaaatgtttatgaaagacagtgaaggattcttatcacacagtgtgtagaccatgcgcctatgaacttgaagtttgcacagaatgtggaaagaaagaagacattgttattccgttcagtaaggaaccagaaaaaataaaatattgaaaacaatcgcctctccctctccctctccctctccctccgtctccctctccgtctccctctcggtctccctctccctctctttccatggtctccctctgatgccaagccgaagctggactgtactgctcccatctcggctcactgcaacctccctgcctgattctcctgcctcagcctgccgagtgcctgcaattgcaggcacgcgccgccacgcctgactggttttcgtatttttttggtggagacagggtttcactgtgttggccgggctggtctccagctcctaaccgtgagtgatctgccagcctcggcctcccaaggtgccgggattgcagacggagtctcgttcactcagtgctcaatggtgcccaggctggagtgcagtggcgtgatctcggctggctacaacctccacctcccagccgcctgccttggcctcccaaagtgccgagattgcagcctctgcccggccgccaccccatctgggaagcgaggagcgtctctgcctggtcgcccatcgtctgggatgtgaggagcccctctgcctggctgcccagtctggaaagtgaggagcgtctctgcccggccgccatcccatctaggaagtgaggagcgcctcttcccggccgccatcacatctaggaagtgaggagcgtctctgcccggccgcccgtcgtctgagatgtggggagcgcctctgccccgccgccctgtctgggatgtgaggagcgcctctgcccggccgcgacccgtctgggaggtgaggagcgtctctgcccggccgccccgtctgagaagtgaggagaccctctgcctggcaaccaccccgtctgagaagtgaggagcctctccgcccggcagccgccccgtcccggaggtgaggggcgcctctgcccggccgcccctactgggaagtgaggagcccctctgcccggccagccaccctgtccgggagggaggtgggggggtcagccccacgcccggccagccgccccgtctgggaggtgaggggcgcctctgcccggccgcccctgctgggaagtgaggagcccctctgcccggccaccaccctgtctgggaggtgtacccaacagctcattgagaacgggccaggatgacaatggcggttttgtggaatagaaaggggggaaaggtggggaaaagactgagaaatcggatggttgccgtgtctgtgtagaaagaagtagacatgggagacttttcattttgttctgtactaagaaaaattcttctgccttgggatcctgttgatctgtgaccttacccccaaccctgtgctctctgaaccatgtgctgtgtccactcaggggtcaatggattaagggcggtgcaagatgtgctttgttaaacagatgcttgaaggcagcatgctcgttaagagtcatcaccactccctaatctcaagtacccagggacacaaatactgtggaaggcagcagggtcctctgcctaggaaaaccagagaccttttttcacttgtttatctgctgaccttccctccactattgtcctatgaccctgccaaatccccctctgcgagaaacacccaagaatgatcaattaaaaaaaaataataaattaaaaaaaaaaaaagaaaatctaagttctaaccatagaagaagctgcagaagaaatgaagaaagggatgataatttagattttgatgttgatttagaagacacaggaggaggccaggtgtggtggcaagagccttgccggggtcttctgatgcttgtattgaaaaaactgcttttgctttgtaacaagcaaacataagtgttggtacttttgctctgagtcatttacgtgagatcatttatcaaacggcgctgaggaccagtttttgaggctagcaatataataatgtcatcttatttttatatgagctagttcttacataaccatcaattctgaatctggtttactttggtattaggtaatatacacagtttatattgttcatgtataaaatttgtttttctatagctttttctgatttcctcattaggatttcttttttttttttttttttttgctgctttttaactttttcaaaaatcagcacaatttttccctttgaaattaaatagattacttggtttccaacatttaattttgtctattatcagaaaaagttttcacgtaatgaaattaagcaatataatattaatggaaaacattattctcaggactaattactgcgcacctttgatgtgtacttgtttgcatttactatatgcatgacatactactactgtacaatgaatcgcagtgcagagtaatgatgattcaataaatgtagatctattttgcatatttgcacaacttaagaaataccaacatcattttctctgagaagccttccctgattttcagcctaggtacaattcctcagacatgtgttcacaaagctgcatacttttccttcacaatattatctaatgtcacatttcttcattaataattattaatgtcagtctacccactaaactagagtaccattgcttttctagtgttacaataaatgaataaatgaatcagtgaagtcatgtatcattaggatgtcgcagtatcttttatgaaatactcaaagtcaaaagttggtcagaatttcacattcttaaattggcttttaatatagtgatattaattcacttgatggtctcctcctgtgtctttttttttttttttgagacggagtcttgctctgtcacccaggctggagtgcagtggcacgatctcagctcactgcaagctccgcctcccaggttcacgccattctcctgcctcagcctcccaagtagctgggactataggcgcctgccaccacacccggctaattttttgtatttttggtagagacggggtttcactgtgttggccaggatggtcttgatctcttgacctcatgatccgcccacctcagcctcccaaagtgctgggattacaggcgtgagtcactgcgcccggcccatcatatcctttatgaataagaatttctagtcactaggtccaggagtctgtattttgaaattcctaggtgattttggtgaccatccaagtttgagacccactggccttaccgtcatgcctcaattttcaaatgaggaaactgaggactagggcgggaaagtgatttccttgcaattaaaggcagccagtggtaagacgagaccaaggacctttcggaggtcccttgcacccctgagagtcagtgactctctgttttcaccttggactgccgtgatgtctgactcatactgtagtcttcttcctaaaatcctcttctttttattttttatttttggcagtgtgttgaattctcctctagtttcattcagtgagtgctatttcttgcttcattataaaaggtggtgtgtcacaggtcctgtgtgatcacacaggctaagtgtaagctttgagaatgatctcttggaccctttttctcagatttcagtgttgtgcattattatctcatcgtggtggcttctttgtgatttagtttcccctcctcccttcaccataaaaaaagtcttatctcctgatgtatttttggctgcagaataactccagatggtacattttgtgtagggaaaaaaaataacagaatttttcacactcttctgtgaattattttttgactttcaattataatgaagttattaatcttacaaaggctcgctttgtaaagagactaatctgaataaacttgcttgtatacaataagtgccatggcaaaaattaagagtacagttattatcagagactaaaataacaatttaattttctagaaatagaaaattaagaaaaataacttttaatgctgggatttgacattaagaaatgaatgacaaaaatgggaccaaataaaatgctgtaattggccagacatggtagctcatgcctgtaatcccagcacttggggaggctgaggtggaaggatcacttgagctcaggagttcaagactagcctaggcaaaacctggtctgtatttaaaaaaaaaaaaaaaaaaaaaaaaccaggcatggtggtgtgtgcctacagtcccacctactcaggaggtagaggcaggaggatcacttgagcccaggaagttgaggctatagtgagccatgatcatgccactgtgctccaacctgggcaacagagtgagaccctgtctcaaaaaaaaaaaaaatagtaaatggtataactgaaagtaccttgaaaaaatatggcaatatgcagttgcaagttgctgatttttagaatcataattctaagccggatgtggtggctcacacctgtaatcccagcactttgggaggctgaagtgggtggatcacttaaggccaggagtttgagaccagcctggccaacatggtgaaaccccgtcttactaaaaatacaaaaattagccaggcgtggtggtgtgcatctgtaatctctgttcttggaaggctgaggcatgagaatcacttgaacctgggaggtggaggttgcagtgagctgagatcgtgccactgcactccagccaggctgacagagagagggcaccctgtctcaaaaaaaacccaaaaatcacaattctgatttgagagctgatgacagttgcagatgattaagagcttttacaaagagcgtgcatacatttagcaatctctaattgggaatgttttggaaaacactcctgagaatgtaggttatttatagaagatgtcctttactttgatataatcttcctaatgtggtttttatcagttggatttttctggatcaacgagaagacctatgagcctaaaatgtttgtaattctagctgtgtttctataagaacatgagagaacctcggcattaaccattcttgctggtctcacagaacaccccaaaaatctgtgcagttttgctggagtgatgacagagaatggaaaacaagtttatgaatttttttttttttttttgtgaggcggagttgcacttgtcacccaggctggagtgcaatctcagctcactgcaacctccgcctcccaggttcaagcgattctcttctttcagcctcctgagtagctgggattacagctgcgtgccaccatgccctgctaacttttgtatttttagtagagacagggtttcaccatgttggccaggctggtcttgaactcctgacctcaggtgatccgctcgcttcgacctcccaaagtgctaggagtacaggcaagagccacagtgcctggcctgtttatgaagattttataaacagatttctaaattcagaaagtatttaagggatcccctctggtggcactttaattcagatggggtccacaaaataggaaaatatttactaggaaatttgaacaatcttgaaatcactgaaaatggtgatgtgattctccagaaatttctgattgggaataagcactttgaagtaattggctatcttattaatctgctgttcctgaatttccccttagtagcggacatgctttattgtattaagttggataaccaccttagtagcaaagatgggcttgggcttcagtctggtcaataggcatcttattcaggtagatgccagatgggagggatggggacagcttagtgaagaaggatgaggctggaggtgactcttgaaaaatgattagtgttagttggaaagattaaggtgtgggagagtcccacgcaggggaacagcaggcagaaagccagggagagagaaaacagtgtgttttgaggacctcttctgctgtggctggaataaagagggctgtgttgaagagtgaagggagctgaggccaggcaaaaactcttgcatgccttgagaggaggttttacccaaaagacaagtgaggagggtggtgaaacattttagtcaagcttgtgtgttcttcaaagctcgtttgagctctggcatggaagaggatggatttcagttgggcaaaattcagagcagggaaaccagtcaggaagttgtggcaataatttggttaagaaactctaagggaccttactaaggtcaaggttagactttgtaaattttggggtccagaaaaactgttaataaacttaaccgacaggaagattcccctggcatcatagcctgtcactgtgaggatttaccttctttttcacatagtaatagattgtgaaaagtctccaaaaccatactcaaggattgaaggtcacattttctctttcgaccattctacacttaggtagaaaaaaatttcattaccaactagataataggatttgagctgttgtggttgacattcttgatgaaggactgatcagaaattcttggtcatcttatgtaagaataacttcttggagtaaatatgttcctgaagagctgccatttaaagtaaacttttgaatatcatatcttaaatgctttgtaatcataaacatttaaattctgtggttcaagtaatcatttttaagtaatttacttctaatttctctctcttttttttttggagacaaggctgtcacccaggctggagtgcagtggtgcaaacacacttcactgcagtctcaacctccttggctcaagcagtccttctgcctcagcctcttggtgtggctgggaccacagatgcatgctgccatacctagctaacttttcttttctttttattttttggtagagacgaggtctcgccgtgttgcccaggctggtcttgaacttctaggctcaggcagtcctccaccttgcctcccaaagtgctgggattacagtcatgagccactgcacccagtttgtttctctcttttttaaatccaaatttttctattaggctttgcaaataggcccttaaagaaataggcagcatggctggtaaacaaattttgttctttagatgtttccagagaaataatgtggtattttaagagcttttaacaagagacctcaagataattatttttaggatataccataatttaaaaaataacttctgaatatgagagtaatacattaaagaatattcctgtaatcctagagctaagccatgctataattctggtccagtttacggtttgcgctcacatatacactcacatttttataccctttgtttttatgggttgtattcatgctaaaaaattgttttgaaaacactttttatggctgtataaagtaggtgtaccctatttctaaagtaggtgtgccctattactggacatttagtttgtctgcagttgtttttttgtttttttttttttttgctactatagaaaagcacagtgatgagcatcactgcattcatatttttatctgaagttgccttttcccctagatccctgaaagtggatttgctgggtctgaggagttttacttaacacctttttcaaaggctgtgtcattcctgtgacctcactgcaggtggtggacctactgccctttgcaccaactgactgactgctgtggtagatgccttcgaacttaggcaagctagtaacattttatatggggtttggtttttactgaaaaggtttgcttctggaacatttatgtaagttacagcagtcttcatgctgaggacacatggacacgtctcttatgtctcaagcaaagatacccccagcctgatgtagaaatgtaattgactactgagtggatttcctttcatgtggaatagaatgagatttattggcttgtataaactagagcagaaaagttaatagaaataataaaagctatcagactctgtttagctctgttatgctattacactcagatcctttaaaaactgtgtttagaaaattgttgtgcagtttaatatgtctgcagaatattgaatacagtgtccatcagaaaatctaatccttttttaaagtttagatagaactaaataacatatcttttttttttttttttttttttgagacagggtctcactctattgcccagactgaagtgcagtggcacaatcagagctcactgcaacctccgcttcctgggttcaagggattctcccacctcagcctgctgcgtatctgggaccacaggcacacaccaccatgcctggctgatttttgcatgttttgtagagatggggtttcgccatgttgcccaggctggtctcaaactcctgggcttcagtaatcctcccacctcagcctcccaaagtgttggaattacaggcatgaaccaccgcacccggcctaaggagcatatcttgatgtttctagttttcttataatttccttctgtgttctgggttgctcttacatatatattctataaattgtgtgttttgtgttttcttttttggggggttgggggagacagtctaactcttgtcacgcagactggagtgcagtggcgtgatctcagctcactgcaacctccccctcccagattcaagtgattcttgtgcctcagcagagtaactgggactacaggtgtgtatcaccacgcctggctaatttttgtatttttagtagagacaaggttttgacatgttggcccggctagtcttgaactccttgcctcaagttatccacctgccttggcctcccaaagtgttgggattacaggcatgagccaccacacctggccttatttttatgtgttctgaatttaggttaaaattgaagaagagggtccaagactaagtgccaacatagatatttgcaggtgaaattgcttttctttgtgtagcccatgttgtattacttaatagcctcttaaactggagacccctgataccttacattcaaatgtgagtgatgatagggtgtctatcaaagacaacagaagttaatataacttccccaaagtcacgtgagtgggttactctctttacttggaacacatgcaaagaaagggtcctccttcaacacttgaagataatcacagtgtcatgctctttctcataaatgccactgtagagagtacagagaaaaatgcaattaatggtgctacccaaatcctgaaaagaatgaggtacggtgtaggaattggacagcagacagagtgcaagtttttacataattgtaattaatacagacatgacttacttgagaaatttaaaatgtgaatattttaaaaattacagaggatgattattcacattataaagtgactcatcatcccttttaaaaaggacttatcttttaagaggatattcctctggtgcatttgagtccttgtctgctcattgttttaaacaacttgcagtttttttaacaaattacagtatgacctgtgatattacccagacattcaattccgaggtatttaactagagatacctaggaatgaaatgaaaacacatattcgtacaaaaaaaatacacaaatgtttatagcagctttatttgtagtaaccccaaactggaaacaacctacatgtccatcatgggtgaatggataaacaaactgttgtagccatttaatggtatactattcagcagtaaaaacaaactattggtatatgtagcaacatcagtgaatctgagaataattatactgggtaagcagccagacaaaaaaagagttctaactgtatgattccatttatatagaaattacaaactaatctctagcgacagaaagcagatccatggtcgtctggaggtggagaataagggtaagtgaggatgggccaggaggcatggactccaaagaggcatgggaaacttaggagtgatgggtatgctcattttgttgatggcaatgatggtttcacaggtatatacataggtcaaaacttgccaaattgtgtaatatgcacattgtatatcagttatacctgaataaagctgtttttttttaaaaaaaaaaaaatgtcctgaaaaaagttctgtcttcccttgtctgccaattgcaccgttctttatatctcatccagcctgctcacagtcaagaacaggggcagaagtgggctgacaggtgtagtgcagtgtgtggaatgctgtgacaggtgtgggcacagaaggtacaatgaagaccccctggaggaggtgagcttgaggcgagtgtagagagggcatctcagaggcaattctgagaatcataggaggttgcaggtgtgtggcagaggttggtctggaggacagcagggaccatacatttggagcattgttttgaaagcgttgtacatcactgacgggtggtaagcaggggacagacaaaatcaactcggctttgcccactctgggaagatgaagaggcaggaatcccaggttcagagctcaaggaacccttatgtgatgccaccccctcaaatctgtttaaatcatattaggagaaccttgttgtccaagagggctctgtcttgctagacagttctgcgttgtccaggaaactgcagactacattggaatcctacctgtacaaatacttaagatgtttcatttcaaaaataaagtgttctctgtagaaattaaggaaaatacacttaagaaaaataagaaaatttaaattgcctttaatcccaccacccagtgctaaatacttttaacattttggtgtatattgtttcagatatatgtatgttttaaaacaaaattagaatcataatttgcatgtgtttttacctttatttcctctgagcattattccatgttttatgtagacataaaatatcattgtttttatttgatgcatgagagtctacatattatatgtatggtgatttatttaaccaataacctcttttggggatttttttggttgtataattttgtttaaaaattctgggaaaaccataattactttattaaaaagcaagtaaatcaaagaatatagttaatttttttattaacaggtgcagtttcttaattcatattaaagaaaaatagccttggtctagtagacattttaactaaatgaagggaggatggtccccttctagaagtacacatgggcttatacagtagttctttgttacccagtgataattatttcatctgtgctattcccaaaaagtaaccatctatgggaactctgttgttcccaaaggaagatttactccccatatcagaaatatgttaaaaaaaagtataaataggccaggcacgatgactcacacctgtaatcctagaactttgggaggctgaggcagggtggattgcctaagctcaggagttcgagaccagcctgggcaacacagtgaaaccccgtctctactaaaatacaaaaaattagccaggcatgttggcgggcgcctgtaatcccagctactcgggaggctgaggctggagaattgctagaacccaggaggcggaggttgcagtgagccgagattgcgccactgcactccagcctgggcgacagagtgatactccgtgtcttaaaaaaaaaaaaaaaaaaaagtatgaataacagtaacagctaacattttttttggaatacttttatcttctacatattattagaagcatttcacatgtattaacttatttagtcatcaaaacagttctagatgtaagttcagttatttttctgtttaacagatacgtagacagaagcacagaatgttagtaacttacccaaataaatgatcaacttatatgaaaacatatccatcatcactagtaagcagacttgcaaatgataataacaagctatcactttggagacctgcagtgatcttagaaacttaatacttgacgctgattaaggtagaaggaaacaggccctctgtacaaggttgatgggagggtccatttctgtagagcagttggtttccttctagaaaatttatcctatgaagataattggacaaggttataatgatattactgtgctcatggaagtattgagaatagtgaacaactatgtgtcctgtaatagggacttggttaaataaattttggtacatccatattgtagaacaccatacagctattacatatgatgatatgcgcatatgtttatggaagtcgttgctcaggaaattgtaaatggagataaacagacagcatggaacatgaagatacgaaatctgcttctggctgttggtctggggcccccaccaggaaaccagcacacctggcttccttcttttttaccgtaagaccagagaaaccctagagttgcagtgaggaactgtcttgggttctctgaaaatgagcatcatgaaaaatgcctggcttaaaagaagagaaggaattaatacattttgttacaggtattatattggcttcatttaacaaatgcaggaacaattttataactggaacatttagccactgcaaaaaccatgaattagttttttggtttttttcaagttttccactaagctcacttgagtactttcttccttcttcctttgagactcactctaaccaccagggagtcacctctttattgatctgcctcttgatgccaggaatttcctttcttctaccatactttacctatgtttggtgaaacatttgaattcacatgttactgaacagtgacttggtgtgttaaccttcttaggtttttaaactttgaacaactgcctttcctcaaaggcaaaactaacttttttgggaattgcagaaatcgtaactccccagggacagctcaccctcagtcctccaagccatagaatttaaagactgccttgatgccaccaaaaacctcagtaccttttgttacagaaagaacattgtgtggtatacttcctatgttttgaaaaatatctgcaaatattttgggaactgaattttgggaagggctaccctctggctgaactctgcttacaaaatccataaaaacagggttccagctctgcacagcaggacaggtgcaagtgtgcgccagtaacctcacagccggagaccatctctacaaacatcctgccaggagaagagtagagaataacaaaggaaaaaaacaagccctccagttggcattcttgttgaggaagtccatcaagaatcaagttcctgtcaacttgtttctgtattcttttgcttaaagaatcacagtagagagtcccaatctgaaaaaaactttgttatatttcttaggttggggatacatacagcatggagttggaacttcagtctgtggagccaaacccagactgaaaggcagcaagagagtagcagctaagagcatagactaagtgcttccactgggtggagcatgaccagtgcattcacaagacgggaatgttcggtagacttgctgccggccatgtgtgtggcttctgagcacatgtggctggtgtgaattttaaattttatttaatttaaattaaatttaaatagctacacatggcttgtgatgactgtgttagacagcacaggatagacttagaagctagactacttgggttcaaattccagcttcactatcgtttacctctgtgaccttggacaacattccctgagcgctttatgccacagttttctcatttgtaaagtgataaaaagataatagtgcctacctcaaaaaaggttattttgaggattaaatgagttaatatttgtaaagggcttagacctgggcacatagtaaaagctatatcagtgtttcctaaataacgcaactatatatacatccctaaagtgaaaaattgaacctagatccatactatattttttttcaagaagctcccatgcatccattgtcaatgcatttttcttaaacaccccttaaatattggggaaagcagaaaagtcatttatttgataaatatgtctggagcccgtactttatgccaaatgctgtgttgggtgctggagatacatgtgttggtgcatagagacttgattcatcctaataaaagggtaacggtcccgcagtgttttcacctagtggttaaggaactttataatacgaagggactttaaaagtagggtaaaggtgtagatgtagacggagaaacccaggagactttgcatttgctcctagtcagctggctgggacttcacccttcacctcctgttggctcatgcttttccctttgcacctgtggagcacaggtgtgtcctgaggccctcaccagccatgcagaagccttcaggtagggttaacatttgcccacttctggaagggatcgatctgttctcagatgacagtgataattcttggcctattttgactcaatagtggcaatattagtagtttttttgtatttgttttaatttttttctccttatttaaggaaaagttggaaactaatgttgcttcctccattttttttgtttgtttaaactttgctggttcatgagattgaaaagtctgtgcttagaccataccacccgatgcagtttgtgtaagccttaaaaaataaatatttcagccccaacattcatgtagtactaaaagtgagaggcttttgaaccataactgatttgacaagaaatggacataatggaggaaggtgactggttgtttgcgtgttgatttgctttcagcacttgctaaaacgtggagccaaggggagagaatccaccaggttgctttacatgtgaaaaatattaaaatgtcagcacagcccagccactgacataagaaaaaccgtttcacagttaagtctctaaataatgtcctaaaaacacaacatttgtaattatctaattaataaaggatacaggtaatagaagtaatatggaaggcattttctggtagataaagcttcagaaaccttcacatctgcacatgattatgaagcccctgttattactttgctttcccccttcctttagcccatgtttctcactatgaactaatagtacataataataaaaccctggatgtcagccaacacagagttttggctaacttttccagtgtttgttaaagttgaaaaagcattgcagctgttatgctgggtactttccaatggaggatgtgttttccagatgaaggcgcaaatggtaattgaaatgtaatcagtatttttggcatcttggaattataattctttttacgtttgtaatgttaattgttcatttcttaggatttgttttgtgtttttctgtgatctgtaatctactaaaagtgagagaatgaacaaatgttttaggcggtttttcattctttgaaagaaaaatggcaagtagtcacgtttgttaggtgatggcttattttaaataatcacaaaatttatgtttgagacattttattgtaagactcatgtttcaggcaacagaaaacagaaaatctaaatctcaaatacaacaaaattttagagatgaatggaaacttctagatcacttggataggctgaagactcagtgggcctcaggtgttcccaggaccaggctgctggagatgtccctttctttgagagatttgttctgtttttttttcatctcgatccactgtgttaaggaggggtggggtgtgtctgctgatggttttattggtatttgaggtttctaaagttttttgtttaagctagaaagagctctagctgattagtagctctcaatccttggctggatattttattttttgttttgttttgttttgagacagggtctggctctgttgcccaggctggagtgcagtggcgcaatcatggctcactgtaacctctgcctcccaggctcaagggatccacccacctcagcctcctgtagtagctgggactacagatgcatgccaccacgcctagctaatttttgtatagatgggattttgccatgttgcccaaggtggtctcaaactcctagcctcaagggatctgcctgccttggcttcccaaagtgttgggattataggtgtgagtcactgtgcctggctggctgcgcattttaaagatcttgatgctcactcatacctgagccagcataattaaatcacagtatctccacaggtgacagtgatgtgcagccaagaacagtgttcctttccagtcctctctttatagacgaggaaattgaggccctgagcagctagatgacttgtccaaagtcctctgctgggactgacccaaataaggaatggctgatttctggaagggatgtcagattctctgattacagatctctcgtgatcttctctcggggctcgtggactgtcctgtcaacagtcaggctaggcagctgcagagagcaggactctggggtccccagtgaggaggaagcaaagagtcctcatcttcctgtcccctttacccgagtagaaattgcccttccttatcccacatgagctaccagaggcatgataaactgcctctggggctttttggctctttggctctttttttttcttttttattcctttagaaagaaataggtttgtaattagctaactaagactgacaaataccagaccagttgctatatattacaaaggagcttcttgaatagctggtcacttctgcatattgtagaaaccttccttctcccttttagggaacactacacattatttaggtacagtgttagggataactgatcatttctaatgctgtgtatatccattaagggtaatttaaagcaattaaatgctaacctggctggacagccaggtgtaggtttgtggcatccagaaagaggagatggacttggtggattctgaattggtcagttccacctcttcgtgttttggaggctttgtctcgttacttgctcacctttctgctcagtgctccttgacatggcgggtcaggttgatgggaggtggtacctggatgccctttgctggcactgggcactgcaccggagagttaccacccctgcctggggatggagcctctctggggagaggacagtgcaaaggtgggggactggggagttgtgagaagtgggagctagaatatggagcaactagtgtgtatagagacttcgtgagaaaagctcgatcacgttttggtaagtatttgcagctccctgaaaatttgtgttgggaggtgatcattagcatcttctggaatatttgcgctaaagcaagactagattaaggagctttggttcatttccagacctgtcctgacagcatcactctccaaatgctaaactctgagagagagagtatgtgtatttttcttttcaggatgtcagtcaaataattcactcattcctttccccaaacacactggcctttgaaatgacaccctacccctgccaatagtgagactgtggttctgatcggggagctggcgagtttctgctttctagccccaaaggcctcacccttgctctcatctggaagctgatgggaaggtttgttagtcttctcaggagcctgtcacaggacctcaggaacgtagcctgtagtgggcagctggcatcaatttagtgctgtggggatggcaggctgtcagagtggttgcactttacctgcacgccccccaacccagccctctgtgaagggttggtttacatcagggatggctgctcctgacataattgtctatttccggcaacagaggaagataccttctgccatttagagaagagaaataaatattcacttcagagaatacactttgaagtggggctgtgtgtgcatgggtgacagctccctgcctacttttcctgcaaggttcttgtacatcaggaaaggttaatggacttcccttgaagtcagacagagatgtgttcatggaaaatccaagtgcaaaaccaagggcaaactctggctttcctgggggtttttttgttgttgtttctccttttagaatggacagtgaaagcaaggtgaagggcttcattattcctcttttgtaaagcctgttgagcaggaaccttctggagcttctagatggaggttcctggagattgtgtgagtggtgagcagtctggttgaagagggccagtgtttgttggctttgccctcattgtgtcaggaatgagctctgcacggactcagagagctaacagatcagctagggtacctcagagaagaatgcactcgaggctactgccatgttccctctgtggtcatgaggaaaggagaactacctgtgtggcttgggggcttccctgacatagtaatcacattggattttacaactgggtacattcttagccttcagtttggtgatccctgtgtttaaaaagaaaatccttttgttgtgtggaggttaatctgctgagcttatttttggtcatccattctcacctgccccacgacactggtcactggtgtctccatgctgatatattatgctcagcttttttgcatgctccgcatggagatatgaacacaattctcatgggaacttggcccatctttcagcacactatgtcagccagttgctgccttcctgttcatggaggactaggcgtagtgtgggggtctcattgctcatctggttagtggctttgcagtcagagcaagctgagggaacagtgccccctacctgtctgttctcctgcaggcccagtgtgggaacaagatgctcttcagagaaatctctttgacactggctgtctcacccagcacctacactcttgaaaatctgagggccttagcagaatttgaaagtgtccaagggttagaaatgagaagtctccatgagcatgaaagcgaccatccttgtaggtcattattttgatccatgctctcatcactggtttcacaaacaggcctttcctttctagtctttgaacataccaactcttttcgagtaacacagcaatattaaaaacatatacccattgccaaaaagcaaaaccaacccacttctggctgagaaactgctgaatacataactattcatccctcagtagctgagtgtggttacaatgaatggctttcccatattttcttgatgcttctaaatgtatgggttcacttttggggggaatattttggtgctgtcataatctatatatggaagatgttaaggatatttccaggaactgcattaaaacagccataacaaaccatattctgcagccttcaggtgtagtattttgattgcttggtttggtttatcaccaactactcttctgagtatcccccacactatattaggaatttgttacaatatgactaatgctgaatatgtgtgcattgatttttaagtgcactgggtgggactgacttgttcaaatctccgttaaagcaaatgtctgattaggagaaaagtaagggagtaatttgttaggaaaactactttctgaggtgcccccacctcccctccttccaacctgaagaggcagagaggtttgtgtaaacaaaggtcctgcaaggcacagctgttttacattctgatgttctatgactttcttaaataaaaaccttttggattttcatatctatttagctagtaggaatatttcctcctttttcggagaataaaatcctagacttaaggatattccttgggtgactgagaagtcataccagcctaagcagtacagctggccccctgtatccatggcttctgcatctgtgaattcaaccaaccatggatagaaaatatttgggaaaaaaaatccacaaagttcgaaaaagcagaagcacgatttgctgcttactgagaactgcattgaatccatgtgagtaaggtgatgtgtaggcgttgtattaggaattataagtaatctttaggtgatttaaagtatttgagaggatgtgtgtcggttttatacaaatactacaccattttatataagggacctgagcgtccatggattttggtattcataagaggtcctggaaccaattgcccatgggtagtgagggatgactgtattttctaattaaaaggttttttttttaataagcaaatgttttacttagtaccttataatattttaaaaagcgtaaaattcccaaataaagtaattggtttagtgataaatatttccagtggcgtacttaaaatgaatgttttcatcagaatgcagaagctgttttgagaactttttgctcattattttcagtggggttgtgaaatccaatgaaaacgtgtataaatgtttgtagaagaatactttgtttatagagtgcaaatattttcttgatatgacaacaccccaaacaaagaatggttacaattaaagtaatggtgattcagttaaacatagagctggaaaagccattattttgaaatatcttctgagcctcattgaagagagagtgtcttacacaccttgggaaccaagttttgcatattatagtattaccacattgtattcgatcacaagaatggtgtgaatacttggtggttaaacaaattattgatgcttgttagttggatgagatcttggaatgcatgcatcccggcttcccacacagtactcagttctttctgtagctatcctgttgaatatatggagagtacagtatactttcaggcaagatggtcatttaacaggtcattatttaaacattgtttcagtgtgtgctgtgaaaacaacaacaataacaacaacaaatcgaatacctctctgctctctgcatttttggagcgctctagctgttagaaagtacctcctaacccctagccactgtgaagttgttgctccctgcctgctgggaaatctgtgccagctctcccaggaaggctcctgaagctgcctgcacatacctgccaggtgtgtctcctggacttttccccaggggtcctagctcctgggctgggtctcctaggtgtcttacagcctggctgccccttctggacactcttggcttggtcagtacctggggtgatttaacttggcgtctaacagtgaagcttcctttagttgtatcttctgctgttgcttcacattgagcttgccacgttttccttgaattgctgtcagtttttctctcttccaaccttgggaactttatttttaaaaatctgggccaggcgcggtggctcacgcctgtaatcccagcactttgggaggctgaggcgggcggatctcgaggtcaggagatcgagaccatcctggctaacacggtgaaaccccatctctactaaaaaaacaaaaaattagctgggcgaggtgacgggtgcctgtagtcccagctacttgggaggttgaggcaggagaatggcgtcaacccgggaggtggagcttgcagtgagccaagatcgcgccactgcactccagcctgggcaacagagtgagactccgtctctaaataaataaataaataaataaataaataaataaataaaatctgaatgcaagactgtatgtgtgcttgaataatttgaatcctctcttggccctgggaccttccccgtgctacatgtgctttcggaggttgtgaggaaagggctgaccaggccatggacctgtcccagagccggcacccttgagcatggctgctcagacagcagtgaaaatttgtcttagaaatttgaagttgcttttgaagctttttggtcagtgagagaacttaaaaattctcatgtaaatataatttaaaaaatatagatgactcaatctacaagagcttatctgtttggtttttttttttctacttatagtttacatttgaaaaaatttaccacttgatgaactgagtaattttttcttcttgatagtagaggaattggtagggaaagtgcttctaatactcttcgaagctgagaaaattttaagtataaagtttgttcattaaacatttgtgtattgttgtctgggagctagacactatatttagggatacattgatgaaaaagagagaaatacccaatagttcttggagagtacagtatactttcaggcaagatagtcatttaataaatacacaggtaattatttaaacaccatcgtagtgcgtgctatgaaaaaacaacaaaccagtaggaacatagaacaggagaggccctgggctgggactaggggtttcagaagagtctctccagagaaagtaaagtttaggttgatctggttctctctcttttttttttttttgagcaacaagactgtttatttcacctgggtgcaggcaggctgagtccaaaaaaggagtcagcaaagggtggtgggattatcattagttcttacaggttttggaataggcggtggagttaagagcaatgttttgggggcagggggtggatctcacaaagtacattctcaagggtggggagattatatagaaccttcttaagggtggtggagattacaaagtacattgatcggttagggtggggcaggaacaaatcacaatggtggaatgttatcagttaaggctattttcacttcttttgtgtatcttcagttgcttcaggccatctggatgtatacgtgcaggtcactggggatatgatggcttagcttgggctcagaggcctgacattcctgtcttcttatattaataagaaaaataaaatagtggtaaagtgttggggtggggaaaattttggggggtggtatggagagataatgggcaatgtttctcagggctgctttgagcaggactggggcaacatggaaacctagtgtgggagagatgaagctgaaggaagattttgtggtaaggggtgataattgtcgggttgttagaagaaacatttgtcgtatagaatgattggtgatggcctggatatggttttggatgaattgagaaactaaatggaagacacaaggtctgaataagagaaggagaaaaacaggtataaaaggactaagaattgggaggacccaggacatctaattagagtgtccaaggggggttagtgtaattacttgcttggttggcaagcttttaggctctatctttgagttttttttaatgttgtcatataccaggccagattgatttaggtaaaaatagcactcttcatttaaaaatatagagtccccttttttttttttttagcagtaagtcgagacctttgtgattttggaagaaagagaaatgcaaagccagcaattgtttgttaaagaaggattagaaacggctaggagagagtaactgagattgatagtgtgatagagatagctggggagaggtagagggtggcataagaacgggaatgagaataagagtaagtataaaagtaaagaataggacttcatcagggtgaaagtattggagggtaccttgccactgaagatcttctatccacttaaagagagacttaagggtggcagtttgaggaaaaaccaggtgccactgaataccaacagcctgagaaactgcttgggtgatttgactagtaaaggccggtccgttatcggactgtatagaggtgagaaggccaaaccgaggaactatgtctgacagaagggaataaatgaccacggtggccttcttagaccctgtgggaaaggcctctacccatccagtgaaagtgtctacccagaccaagaggtattttagtttcctgactcgaggcatgtgagtaaagtcaatttgccagtcctgggcggggcaaatccccgagcttgatgtgtggggaagggagggggcctgagaaattcttgaggagtagtagaatagcagatggaacactgaaaagtgatttccttgaggatagatttttgcgatggaaaggaaatgagaggttctaagaggtgggctagcgggttctaagaggcgggctagcggcttgcaacctacatggaagaggttatgaaatgacgaatagaatgggcctgtgagactggaaggagatttttctttggtccaagaaccatttgctttgtgtgggaagagatgggtggaagtttcagcgagggagtaggtgggagtggccagatgagaaggaggaaaactgccctgagggatagaagttggaacgctagctgcttttttagctatcttatcagcataggcgttgtccagagcaatgggatctgaagccttttgatggcctttgcagtgaatgactccggctttctttggaagtaaagcagccttgagaagagttcttattaaagaggcattattgatggaggactcttgcatagtgaggaaacttctttctgcctatataacagcatggtggtgcaggatatggaaggcatatttagagtcagtataaatattgatgggtagtccctttgcaagagtgagggctcaagttaaggcagtgagttcagcttgctgagaggtaatggaggggggcagagcggtagcctcagtgatagatgtggaagatactatagcatagcctgcctttgctggtgagtggcgattaggcctggtggaactgccatcaataaaccaagtgtgatcagggtgaggaacaggaaagaaggaaacatggagaaagggagtgaatgtcatgtggatcagagagatacagtcatgggagtcagatgtatccggaatagtgtgggaggctggattgaagtccgggccaggaacaatggtaactgtgggagactcaacaaagagtgagtacagctgaaggagccggggagcagaaagtatatgcatcaggtgtgaggaagaaaatagattttggaagttatgagaactatagagagtgagttgagcatagtttgtgattttgagggcctctaaaagtgttagggcagcggcagctgctgcacggggacatgatggccagcctaaaacagtaaggtcaagttgttgatctggttctcatttatccattgtccttatctttaaaatcacaagatattgagagttagcagtgccattgctaatgagattagaaagccttcattaattacaggatccttggattgagattggagtttaatggcacagaaggcagctttagggttcacttggtgaattaatctgctcaggctgccataacagaatgccacagactgtatggattaaacaacagaaatttattttctcactgttctgtagggtagaagtccaagatcaaggagctgtcagttgatttctgatgaggcttctcttcctggcttgcagatggctgccgcctcactgtgtcctcacctggccttttctttgtgcaaatgggtgggtgcaggggaaccatagtgtctctttgttccttgctttctttctttttttttttttttttaatgataaggggtctcactctgtcacccagggtagagcgcagtggcatggtttctgctcactgcaacctccgcctcccaggctcaagtgattctcccacctcagcctcccaagtagctgggattacaggcacccacctctgcgcccggctaatttttgtatttttatttgagacagggtttcaccatgttggccaggctggtctcaacctcctgacctcaggtgatctgcccaaagtgctgggattataggcgtgagccactgtgcccggccattctttgttccttttctaataactacaccagtcctattggattagggccctaccattatgaccgcacttaacctagattacctccctacaggctctgtctccgaatacaatcacattaggggttactcctacaacatgtgaatttggaaggtgagcacaatttggtccataacactcaggcaccactaaaaatccagctactgctggtgcccagcccctgatacttctctctgtgcagagtcatagaatactaacagaatttagttccctctaaatgttccaaattgccctgacatccggttcattcttctgtgctgctgattttgacaacagaagcaactgctttgaaagcattttgagataggaaaaacaaagtgcatattatgttgcagatattttgggaaatagaaaacttgtttattagtaacatatttcaaggagatgaagttatggacttgattttggtcaagtaagtagttgaaaaatgcagtttcaaaaatcacatcaccagggagattttaaagaaattcagagtggtctggatgccctgatcttttcttctaagttttttccccctactgggagaacgcagaaacttgctgattccttttgctcttatacctgattgaagacttcaccagctaagatcttattttcattttgcagtcatttgagcgatagtaggagccagataagtttgaattacaagcccatgcagctttggacaggctgtgcattatcctgtgactttctggaaagtgtggtgaggtatccccagcctgggtgttgggctgattggcttggttggattagggtctggccccacagtagacatacttaacatacttaacttatggctgtcacctatgataaatgcactgtaaatcagagatctcctttgtggttctaaacttatggcaatattttaggcaccatcgctcatttttcttgtatactcatgtttagatattctggaagccaaagtgaatccacatttactttaactgacttttgttaccaagcttgatattgagttcctttgaaaataagcttttaagcagtcatgtgcaggcctctaatggattccagactgtgtagactgtattgttaaacaatattttgtttttaaaaatttttttcttcggattgatcaggtttaaacaaattttagtaatagaatagtggtctccaacctttttggcaccagggactagtttcgtggaagacagtttttccactgacgggttgtggggatggtttcgggatgattgaagcacattacttttattgtgcactttattattattacattgtaatatataatgaaataattctggccggacatggtggctcacccttgtaatcccagcatttagggaggccaaagtgggcaaatcacctgaggtcaggagttcgagaccagcctgaccaacatggtgaaacccagtctctactaaaaatacaaaaattagccaggtgtggtggtggcgcatgtctgcaatcccagctagggattgcagaggctgaggcaggagaacctcttgaacccaagaggtggaggttgcagtgagccaagatcatgccactgcactccagcctgggtgacagagctagactccatctcaaaaaataataataataataattctacaactcaccatgatatagaatcagtgggagccctgatcttgttttcctccaattagatggtccatcggcaggggtgatagaagacagtgacagatcgtctggcgttagattctcataaggagcgcacaatcctgatccctgtcatgtgcagttcacagtagggtttgcgctcctatgaggctgtaatgccaccatgaatctgacaggaggcagagctcagatggtaggtataagcaaactatggggaacagctgtacttcgcttgcttgtccgctgctcaccttctgctgtgtggcctcggggttggggacccctctaatagaggtttgatcatgttaaaatgataattatttgaatgttttttctaggattgatattctcttcctttcaagtatcataggccaatctttactcattttgtttatttgaaaggttatggatttctaagtaagtctgggaaacatttaccaagcatacaaaggggaaaggcttgttgctgcagtgttaatgcaagcgatggtagttatttgaacagctctttgagaaaatttaataaagtgtaaatctctggaaatctgggttgccatgacagtgtaggacctatttaggatattttacaaagagaaatgatcttaaaatcgtctacatttaaaataaatatgttaaaaggcaaatgctggtgagattgtgaaattagtgattactgcaatcctatccaaatatgacccctcatgttttgcgacagttgaaaataaatttataattttataacttacaaatttataaccttctctgaataaatctgagtaaagagaaggttgttcctgtgtaacaatgagaattttactgggatccaaagtacatactatttaggtaggaagaagcactatgttttagagttagattactctgctgcaatacagctcctaccatctgtgttgcatttcacaattgtttttgagcacctgctatggcttaggtgccatgctggttactaatggtttaaagatgaacagaataggctgggcacggtggcttaggcatgtaatcccagactttgggaggctgaggcgggcagatcacttgagcccaggagaccagcctaggcagcatggcgaaaccctggctctacagaagatacaaaaattagccaggcatggtggtgtgtgccagtggttccagctaccagggaggctgaggccctggaggcagaggttgcagtgagccaacactgcaccactgcactccagcctgggcaacggagtgaatccctgtctcaaaacaagcaagcaaacaaaaaagaaaccacactagaacagaacaaagaggatgctggcccttgcagagcttgtggtggtggggggaggtatatgtgtctcacatatcacttagtatagtgttggttttcagtgtagttttacatatttgtttcatttcattcccttccaggtaattgagatatgcatttccacttgatagatttgcagaggattttggcattgggttgctctaggagaagtcagattacaaataaaaagtgctttattgctcctgtgttgttcaggcacatatgatactaacttatgaaatttcacaacaaatagggcagtgaaatgccaaactcactgaaattcaggactggtattttggcagcagcaccattagaactatactctaatgtaatttaaaactatttggaagtaaatgtaagaccaaattgttatttgtggtggctagaaaccccacattagccataagaccatggtgctaggtctgtattgagttaatagtttctatttttaaaaataatttagtcaaccagaagacatcagttaatttcagttttttaatagctcttctctgtatgtggaacagaaacaaggatggccttgaactgccatgtatatgagaatagctgtgtatttatttggtaggacttaaaaaatattttagttggttcaagttaggtgatttcaagatttgtaactgaacattggaaaaattaacttttctctctagatctatctactttcaatattcagctgatttttcaaaatattaggacttacaaaattatatttagattttagagagtattatatgtaagcggagaagaagtactttaaaattttaatgtacgagtagtaaagaaggataaatttctatgcagcagataaagaattttcttctcagggactcaaataataaatccatttgtaatatcactgttccttgtgcagtttgctctgtaaaatggaggaaggtgagaggggtgccatgtttctgtctcataccgttttttgttatagagtgtattcatggttatactgtataataatgataataagttcttaaaccgtggtgatgagatctatttggcagaatgttttaaaataaacagtgtatttcccacgagtgaaatcttaaaaaacaattaatttccattatagtaagggtgaattttgctccttcaaagagtatagagcctggttgaatttgcccattaagaaaaaaaaatgtgtctattggactgtgttgtttgtaaagctagaatcaccttccagtggcgttttccatccttacaggaaagaggtttatctctgaatattgagaatggaggttcataatgggcattttagcgtttgaatgttgtaggaagaagatggctaaatcttcactgctcccctaaagtacacacgttagttctggtggggagtagccactctgagattttatatcagagacataatgaatgggacccatgatatgtgaaattctaattctttagtacagagaaatgtgctcttcatctttctgtcttctgaggcttttttcaagtgttcgaaactgccgttgcaaaactctaactgagacagtggaagagatctgtactaaccaactccatcttgcttctaacctccaagcagtccttgctctttcctgggcttaggccaaactaactttgagagggacttagtttgtagtttaaaacaaagatgataacaaaacccccttcttgcctggggactagattgcttttgtaggactagcaaattaaccacaacattagaaaatatggtttaggagtcatgctgctggaggctgcaagattctaaacctccccaaatggttcctgggaataacatcactattgcaaaacctaagatgagtgcttgtgacattttgcagaccctgtcctcgatggatcatttggcaccacccagatggataaactggcttatctggtcttgtggcccccacccaggactgactcaatgcaagaggacagcttcaactctgtattcatctccacccctaccaatcagaactgccaactcagtggacccctacccagcaaattatccttaaaaactccagtccccaaattcttggggagactgttttaagtaatagcaaaactctggtctgctgcacagccagctctgtgtgaataactttattgcaattcccctgtcttgataaataggctctgtctagacagtgggtgaggtgaaactgttgggtggttacatcttcattaaaggagatgagcatttttttctttagcttggatagtgtttttcatcatttttttcattattcccatcccttatcaggaattttttagattatttatttatttatttatttttgtgacagggtcttgctctgtcccccaggctgtagtgctttggcatgatcacagcttactgcagccttggcctcccaggctcaagtgatcctcccatttgaagatgaatggctgggactacaggcatgtgtcaccacacttgactaatttttaatttttttgtagagacgggctcactttgttgcccaggctggtctcgaactcatggcctcaaatgatcctcctgcctgggcctcccaaagcactgggattacagatgtgagccccctcgcccagtgtgaccctttttttcctcctaattgcccacccatgaaattttcatgccatagatacattatatatctatgctaatatgaaaaagaatacaattttttgcctcatccccaaaatgaattttcattccttgtgggggcaatatcacccccattgtgtatgtacaaggagacctggctgggtgggtaactggcctaggcgtaattagactttgatgcaggtcattcatttccttatttatttaagagccttgagtctttttgatatttttctgacatagaccactattaaagggttcttgccttagagggtaggccaatttgttcatttaaagcatgggctttggagtcatacccacttggttcaagtcctcttggtttcttcatttttttcctgtgccaccaccagcaaaactttagtttattcacctgtaaaatagggctaataatagtatctacttcaaaaggttgctgaggaggatggaatgagaaagcaaataaagcaccgcaccccagaaagagtaagccatcctcccaaaatgtaatttttagctgtgttagggtttagagtcatcacctctgcattttaaagattaggttgtgttcttatggtacaagattcaatagtgatgaagatattatgataaaagcatcatagctgtgtgacttgattgagttgtttaactcttggggccccagtttccatatttttgttaattatgattgaaaatacaaaataaattgactgaaacgtcaaatatggtagtaatcccaataaatgcaaatggattatgcttgccgactaagtgacagaggctcttgggttagattgaaacaaagagaggcatacctaagacaaagtgactctagaagtgtgaactcaaaatgtctgagacaagtctcagtcaatttagaaagtttattttgtcaaggttagggacacaccagtgacatagcctcaggaggtcctgataacatgtgcccaaggtggtcagggtacagcttgcttttatacattttagggagacacagtacatcaatcagtacatgtaagatttacattggtttgacctggaagggcaggataggggcagccttccaggtcataggtagatttaaattttttctgatggcaattggtcgaaagagtcattatcagtagaaaggaatgtctggcttatggtaaggggttgtggagacctaggttttatcatgcagatgaggcctccaagtagcaggcttcagagagaatagagtttgagtatttcttatcccacttaaggtctgagttgatgttaatgctggagggggatggatagtgaggcatgtccatcctccccttttccatcatggcctgaaagagattttcaggcaactccgggatgcccttggccaagagggcccattcagatggttgggggccttagaattttatttttagtttacagaaggtttgaaataaggggatagaaaaatacataccaggcaaatattactgtcaatcaaaatagagttcatatgttaatagagatacaacaatatttcataatattaacagctcatctggaagataaaataattatgatcttgtaacatactcagggaatgagaaagaaaatctgataatcatagtgggaaatattactatactctgtcattgataaataaaagttagtacagctatagattatttgaagtccaaaatactttattaacaagagtttagtaatttaataattattaataggtctcagagaacctttccctgtcaggatgatctgattttgtgaattttggctgaactgtatacagctctatggtgccttttttttttttttcttttgagacagagtctcgctctgccacccaggctggagtgtagtagcgctatctcagctcactgcaacctccatcacccgggttcaagcaattctgctgtctcagcctcctgagtagctgggattataggcgcccgccacctcgcccagctaatttttgtatttttagtagagacagggtttcaccatgttagccaggctggtctcgagctcctgacctcatgatccgcccgcctcagcctcccaaagtgctgggattacaggcatgagccactgtgcctggtattgtttttttttttttttaaacagtggatatgtttctgtaaagctgcagtacactggattgttttaaaagtgaaggctactttaataatagacattatatgcttgtgacttttcttgtgttgttaattatcatgccgtgacttttcatgtgtgtctttatatttatgagcagagaactctgaatgtttgggatgcaatctcggtccttttttggcactagccccatgtacctgagtaataataggtcagacaggttattaagaaacagtggtttcttgcatgttctcactcataggtgggaattgaacagtgagaacacttggacacagggcggggaacatcacacaccggggcctgtcatggggtggggagatgggggagggatagcattaggagaaatgcctaaagtaaatgacgaggtaatgggtgcagcaaaccaacacggcacacgtatacatatgtaacaaacctgcacattgtgcacatgtccactagaacctaaagtataattaaaaaaaaaaaaaaagaaacagtggtttcttgtagatactcctttttggcaactgaacagttgagatagttgaagcaaaattctcagacacacgatttgcagtttggtgccttcagagtccttagaaggcctttttaaagatagcataccagcatccagtgtacactttttcaagtcttttatgaataaagtgggagtgttttaagtgtttgcagaacatttgggtctctgaattctgccaaagtaattgttacatagttttcttcctcgaaaaggactggcaaacattggtcaccttcttcattttatttaatttatttgagccttttaagattgggtattaaggaagtgtgtgtatatgggtgtgtgcatatgtgtagtgccaatgaaaattccatgtattctctatttgttgctttactctctgaaatctgagtagttcagacaaaaaataatttttttacaagggtaaaaactaaatttaaaagggaaatctaaattttattatgtgtatggagaggcaccttataaaatattcactctttcattagcagcctattttaaaaaatgtgacttccttgaaagcagagtgtctaccagatctatctaaatcagaggagtatatgtttcaggcgttgtgactgatggagatagtaccagagtggcagctccaattgactttgcccctgtgctctcacctcccagtcctccctctgccacctgtccaggcagcccatttagaaacaaataattagcaagcacttaatgttaccaggcaccctgctaggagttataaagacagaatgatgggatcatgacctcaagaggccatggcttattgatggtaagtaaatagaaggtttgtaattatgaagcagtcttttaatgataggtcagcggtgcataaggtgtcggagggagtgcatgtgggcactgtctaaggttgtctaattcagaccaggtggtggtggtggtgagtgatttgaggaggttcctggatgtagtgatacctgagctaggatttgcaggaagagcaaagagctgttccaggtgataggtttggaactgagacaagaacatgattcttctctctcaggagttgcaagagcttaggacatggatagtgggaccaggctagagagatgggcaaggtcctcgtgaagaatctcattttctctcctaaggcttcttggcattattctgatggcattgggagccatttggtagattttagtttttagggggataaaataactggaattacattttagcacggtccctctggtagcattgtaggggaatggattagggattacaatgagagatgaggagctggaatgagaaactcctgctggaactaactcatgagattttcaggaggtacgagttaccttagggccaccctgtggagcgagagggagaaatgaaaggtgactgcgaaggtttgtgtctggggcggctaggagaagtggggatgccattcagcgagggagtggtggaggagatgcagggcgtagaggtcggggctgtgagttcggtgttcgacaggcggagttagtgattgttaggagacacctgcaccttgcagggagcagctgtcagcaccgggtaaccagcaaagacagagaagtggatgatgtcaccaaggaagattttgtagagtaacagtagaggatgctggaaagtagcctggggattattgtttcttcataaaacaaaaacctgcaagtttatctgataacctgtgcgacttagataataaatgtggtatcttgggaagtaagagaacaggtaaagtattttccctctgggctgttccaggtattgactttacgaactttaatcaatatagaggagaactaacagaatacttacaaagcctggcatggtaacattccagtttctttcctaatggttatgacctgtggtagctcatgccagagctgtagaagcctctttacctcaaaggtacaggatgataatttccacatccatttctgccttgatccacctgtttgaagaaatgaatttagtgtctgcttattgaagcagaaaataataaagcatctggaatttctgtgcatcttatggaaaattccagttcataggatgtaggattagagaagagtaatttgagggggaggatcttggcttttctacatattcctttttatacatacacacacccacaccctaccccatgccaccccaccccccaccccacaatagagaagagcagggaaagtagataggcactttcctatctttttgaaacctagtcacaaagaacatgggcattacccttgtcacacgcagggtattactgtttttattcattcaaaagttatttaacgagctcctactgtggtgagcaagtccagtggaatccaggcccttgctctgctattagagggatgagggcctttctcttcaaggggagattccctttccttgtgtcagccttacatagtcctttctgggtttcctaatggtggaaccaccaggcagagttccaagatggccaagccttcctcccttctcttcctaaacttcccacagctatttaagaagtacagatgacttcacagcccacgggaggcatggccaatagcaccttgagaaaacccagccctttttagataacctcctgggacacctgtatgtgtgatataaactgtcctcacagctggccctagtcccatgtggaagtgggttagaggatgatgatgtttgtagcatgctggagtttggagtctccatgccatgggcacactcttccatactgttgccctcactctgacttcttcaccctcacgtcactcccttgctgctgttgagtgcctagaagggacctttccatgatggctatggtgggagcgagggatgttttgccgtgaaattgccttgaaaataaaatagtgggttctatcactgtaaatactcagctttctttggacaaaggacattgtctttgaacagatggagaatattgaagaaaaaagatgtctctaccatcaaattctggacacttgagtgaaacagttgaataaaaagaactcagagcattgctttttttttgagacgaggctcactctgttgtttgggctggagtgcagtgacacgatcatggctcactgcggccttgacctcttgggctcaagtgatcctcccacctcagcctcccaagtagctgggactacgggcacgtgccaccgtgcccggctaatttttatagagatagtgaagaagggttgggagggtgtctcaccatcttgcccaggttggtctcaaactcctgggctcaagtgatctggccaccgtggcctcccaaattgttgagattacaggtgtgagccactgtgcttggcatatatttatttatttattttgtacacagactagtggataatttggatactttgacttcccattcacctttctgttttttgtttttttcttttgagacagagtctggctgtgtcacccagggtggagtgcagtggcacagttatggttcactgcaacctccacctccctggctcgagtggtcctcctacctcagcctcccaagtagctggaaccacaggcgcatgccaccacagctggctattttttttttttatttttgtggagatgggggtgtcactgtgttgtccagtctggtctttaacgcctgggctcaagtgatctgcctcccttggcctcccaaagtgctgggattacaggcgtgagccaccactcttggcctaacctttccgttttaaggaacaatagtagtgtttttaaggaataccattaagaaagaacattaggaaaaaaggtgctttagttctctgagtgacttcttttaagcttaagacaagaattatcacttacttactaagtaatctgtgggctgggcaaggtaggctcgcacctgtaatcccaggactttgtgaggccaaagcaagcagattacccgagttcaggagtttgagactagcctggccaacatggtgaaaccccatttctactaaaaatacaaaaattagtcaggcatgatagtgcacacctgtaattccagctactcaggagggtgaggcaggagaattgcttgaacctgggaggtggaggttgtagtgagctgagatcatgccactgcactccagcctgggtgacagagcgagactctgtctcaaaaagaaagaaagaaagagagagagaaagagagagagagagagagaggagagagagagagagagagagaaagaaagaaaggaaagaaagaaagaaagaaagaaatctgtggaaagcagttgttggttcagtgatagaaagagagattcgcaggtgggggcagggcaggggccaggctgggcttctgcaggagtcaggtgcggtggatgttgcagcgcaggtatagcagccctgggggtttcttctcattggtcagcaggtggcaccaaatagctaaaacttatctggggagaggcatgccttgcttgggttttaccttgggttgggttggattaaattttactttctgtactttcagaatttgggattaatagcactttcacattttctccctagagatagaatcctccaagtttgaattttataaaagtctctgatattgataatagtcatgaaagttaactatattcaagatcagatgattgcatgacattattaattttcattttttggaagggtttatgactttgaatgttaaatgccactgtaagatcattcaatggaatatacttactcgattagatttctgaagtttttgtgtttttatgaaatcccataaataaattgctaacgtaggtgtgaaaattaatacacccgtgaatgtacttaattgagattgagtatgtctctctgatgagaatccaggattttacttccattcaggatttttctattagagcagagatgggtgacagtttgagtcacagatgttgtggctcagtggtaaagtggattcagtgcttcttcctcaggaacatgtggggtgtgttggctgtgttcttggatagcatgtgagaaaacagccatgacaaaagagcaggcagttgtgtgctggtaccacccaagagcctactgtttatttaaggtgcagttaatttgtttcagcttatttactatggaaacttggttgcatgtggcatgtgtggttatgtgctggaacttttaaaaagctgcatttcaagcacgataaatgtttcttttctacatatatgggtttgtttattttttgtgtggtggcatatgtgagggggaagaatcatctcttgaatgatccttctgtgttgctgagtggtgtctggtttggttagcacgcaggctgtggtgaggaggcctgctgactctggcctaggtgcacatcttggtgcacactgaacaaggctttcactaagtgagcatccagctacaaaaacctgacaataaatttttgagttttaagatgttgataacagccgggcatggtggctcacgcctgtaatcccagcactttgggaggccaaggtgggcagatcacaaggtctaggagttcgagaccagcctggccaatatagtgaaaccccgtctctaccaaaaatacagaaattagctgggcatggtggctcgcgcctgtagtcccagctactcgggaggctgaggcagaagaattgcttgaacccaggaggcggaggctgcagtgagccgagatggtgccactgcactccagcctgggtgacagagcgaaactccatctcaaaaaaaaaaatgttgataatttattttttttcttgggatagcttcataccactttaaaaggggtgttgtcttttcactcctttcttcctacatttgcagattaacaacttacttagatagcttcatatgcctgactgagcctgtttccccccagtgaaatttaaaatatgcgggaatttaaccacatttaaccacacccataggcatcaggcatagcactagctcagtttctcaatgtctcgggtctagtcagtccttcaccaggccctgtcagttctccctccaaagcacatccacctctaagcacatccacctcttaaccatccccgcttctccacccagagctgcaccgccatcatttctggagtagcctcccaagtggcccctgcttccattattgccgcctagaatctgttttccacacagccctgggaagaatattttacaaatacactcaagggtggtgtcggttattagcttaaaatcctgcagttgcttcccgccacacttgggctcgcccacctccctccctaaccttgtctccgagtctctcccgctgcccactagactcagccacattgaacttgccgttcctcctgcatgctatgctgcttcctttgcctgaaacactattattcttgatctgtgcgtgactcattcctcttgacattgagttctcagtttcaggacccactcgagaggccttccctgatcaccagatctaaaaatagtcacatgactctgctgtcatttttttttatttaaactatcttgccttttcttgtgtgctttttgtccagctcctaccactaggatataagcttccctagagccaggtccttattgcgttcatttttatccctagcatctggtccagcacagagtacgtagtaagtcttcattgtattttggttcaatgagtgaataatagctatattgaagggagaagctgtgtttaaagcttatcagttcaggataaagaatagcaagcgtgtattgagcatctaccatgcactggtactgtccttggttgccatacacttacatcttaattttttttttttattggagttttgctcctgttgcccaggttagagtgcaatggtatgatgtcggctcaaccaaaacctccggctcctcggttcaagcaattttccagccttggcctcccaagtagctgggattataggcatgcgccaccacgcccagctaattttttatttttagtagtgatgggttggtcaggctgaactggaactcccgacctcaggtgatccgcccgcctcagcctcccaaagtgctgggattagaggcgtgagtcactgtgcctggccttacatcttaatcttaagcatcagttttctaatatgtaagtgagatgtttagataaaatgatctgctagttctcttatataacattttatgaatttccaggagaagcttaaagattataatttatggtgatacacaatgggaataaatgagttcattcagaagccccacgtaggtgttgatctacctccgataacatttctttttttttctttttgagacggagtctcgctctgttgcccaggcaagagtgcaatggcacgatatcggctcactacaacctccgcctcccagattcgagcaattctccctgcctcagccacccaagtagctgggattacaggcatgtgccaccacgcccagctaatttttgtatctttggtagagacgggttttcaccatgttggccaggctggcctcgaactcctgacctcaggtgatctgcccacctcggcctcctaaagtgctggaattacaggcgtgagccactgcacctggccctctgataacatttttaaattgcagagtttaaactttagaaagaaggaataaacccaccattttgggggtatccatcatctcattcagtcctgtcaacaacctctgaagtatcttccctctttaatggttggggaaactgaggcttagagatactaagtaacttggctaaggtcacacatctattatgagacagtgctaaaacctaaaaccagcattgctccagaagacctattcttggcaagcactgtttttattttctgctcactcttatcccagttggttccgtggggactgtatacacttcagacgtctaaatgtttttccttttctttctcatagaactctaagaaggagctgatgtggaggagcagctgagacagttcaagatgacgaccacagtagccacagactatgacaacattgagatccagcagcagtacagtgatgtcaacaaccgctgggatgtcgacgactgggacaatgagaacagctctgcgcggctttttgagcggtcccgcatcaaggctctggcaggtgagtccttcacacctgtcacagaggcccaggatgcctaaaatcaggatgccccttaaaatcatccaccctgttcccatgacgctgtcatgttcgaaggttgtctcacttctatttaaatgtgtccttgagagccagctgaccattttataaggtagtcagttccatatttggagagctgtcaactctaatggccaaaattattcagagcacagagtgttatttatagcaattcaagaacagctgccctaagtttgtaagaattcttttatttttgacaaatcttacattccaaaatatcaaagcatactattccttatactcaaaaatatacaaattaacctgtgtacttagtgcctgtgatacattaactggcctgacctgtaccaagatgggttagtattacacgcaaggattttacatctgaaaagcaaaagctgaatctggtaaaggcacatttaatacagtaacgagtaagtttgccattggtccattagttcgtggaacatgtccttactttgtgatttctcattcccttgttgctggtgaacacctagagcacactttctccatggccccagtgagggtgaggagtgttttaccctaaaattgccctgaaaatcaggaaagcgttctgtggctctgaaaactcagctgtactgaatatatgtaaaccaagtatcaaaaccgagttttttcaaggtcctgcatctgtactttgagatttcaaatgaaatttcagatgaagtttattccaaatgatttttttctaatgtctttaattgtgacaagtaaatcaaagtcatgacttgagaagttaagtttactgttaattctaactacataactcacatttttgttgcctttatagtggaatctgattatgaagcatgcatcatttagagtcatcttgattgtggacaaaggaaacctaacccagagtggtttaagtgacaaagaggatttattggtcacacagtaggcaaattcagtctttaagcaagacttactcctggacttaaatggtgtgaccaggatctagtttctttctctctactctggctttattttctagtgcaggctctgttcacaagcaggctccatcctgtagtcccaagatggctgccccaggtccctggcccccttggactatggacatccagcagaaaagaggatgcttttctgcttaccatggcccggatatatcagtctcactggcgtgattgatcatgacttggatcatgtgcttctcccgctggtgttggagaatctcatgtgctgttaacttctaaacaggatgcaccccttagagtgaaagtttggtcagtctcaaccaaacaagttggctagaaagattggaatataacagaaaagaggaagaggagaatggatgttgggggtacagctaacaatgtactacagaaaaactattcagctgctttaggataatttgtctcttgagtggtgttgatttaaagatctttcttgagctggcctgaatgaatgattaatcagtcactctagaattggggcttcattatcattcattaacatggaactctatggagatcatgaccctggcttgtgctagtaaagtgatttgtattttaatctctcacctctttttcttgtattttcatttgagtctttaggccagtatgctagtgatggccagttacctttgatcttgagtcttactttctgattccaggctatgtattatctcctttctaaaggaccattttgtttgcaaactacagaacagttccttgttctttgcatgtggtctttcctacagtttgagaggagagcctccagctgtccttagtatccatcatttgtcttaacctttctaggatgtttacctaggtccctcagtaactgtagtcataataatagcaagcactcaatatagtacttatactgtgtgccaggcactgtgggaaatgccggcatatattaacagttaatcccataacaatcatatgagagagattattactgtctacattgtatagatgataaaacaggttccagagagattaagaagcttgcccaagggcttactgctgctaagtggctgaaggcatactaactctgcagtgtatactctttttcagtattcagtaaagtaaaaaaaaaaaaaaaagatgtaaagctcattggcagagagcattgctagtgaggtaattcaaacatgttaaaaagatctttggaattctcaggaatgcatcctgtggtctagaagaaaccagggcaaaatattgaaaaggaaagatgctgcttccaggttaaatgatactggatgggggggcaggaattgcattcagtgaatttacaagataccaggaaacccatctgttggaggaaggtaatgaaggaaattatcttatcctacttattattttacttccttattctgtgggacagaagaatctcttgagtcctctaaaaaactatatgctgatagcaggagttacagaacaattcagtagtgtctggaatagaacagtggtttgaaaagtagagggcttgttaaagcacgggatgctgattcagtaggccttgagtggggataatttacatatccaacaggccaggtgatgccctggcttggggatcacattttgtgactgatgcagagtactgatggtcatccagtccccttccttcggtgtttgagaccacttcatctggaccgagctaaagtctaggaagaaataaagtttcaaacccagtagagttacctcaaagatacacttgagacccttttcagaagatggcaccgaaagtgaagaaggaagctcctggcccgcctaaagctgaagccaaagcaaaggctttaaaggccaagaaggtagtgttgaaaggtgtccacggccacaaaaaaaagaagatccgcatgtcacccaccttccagcggcccaagacactgagactctggaggccgcccagatatcctcggaagaccacccccaggagaaacaagcttgaccactatgctatcatcaagtttcctctgaccactgagtttgccatgaagaagataaaagacaacaacacccttgtgttcactgtggatgttaaagccaacaagcaccagatcaaacaggctgtgaagaagctctgtgacattgatggggccaaggtcaacaccctgatggagagatgaaggcatatgttccactggctcctgattatgatgctttggatgttgccaacaaaattgggatcatccaaactgagtccatctggctaattctaaatatacatatctcttttcaccaaaaaaaaaaaaaaaaaaaaaaaaaaaaaaaaggtccacttgatgtgggagtggtgtggtaggctaaccacttgactttgaggaaagggagatatcttcctgtcccttataggggagtgatacagtgataggcccaacaggagggagtgctattgtggggtttctgctgaacatgcatgttctaaagcgagacattttgcttagagccataaaaatgtacatatcacatttcctgtgtccctctagggctttcggtagatacaatctaatctaggtttcagtctgaattctgaggcagatctgcaaaacatgtaggaattcatcttttaatggtgtagttcatcttgtactgatagtggaaccaccacctgtgccctttactaagctgctttcagggtttatgtatctaaggaaatagggtgaggtaaactacttgttactaattctcacccagttgacagatacttcctattattaggttatctgtgaattgtaaaaaactttttttttttttttttttttttgagacggagtcttgctctgtcgtccaggctggagtgcagtggtgcaatctcggctcactgcaagctccacctcctggcttcatgccattctgctgcctcagcctctcaagtagctgggactacaggcgcccgccaccaccccagctaattttttgtatttttcgtagagacggggtttcgccgtgttatccaggacggtctcgatctcctgacctcatgatctgcccgcctcggcctcccaaagtgctgagattacaggcatgagccaccgcgcccggcttaaaaaacatttttaaaataacttttactttacgtgtcttcatcttattcaccctcaggaattgcttttaattcaatgcagtataataagaaatatatttggtctttgttctgggttcctggcatagagctcctaaaaccaatggagtctgccgagtgatgggagtgtcttttgttacccataaggtgtcccttttctgacacctgagtttgtgctaattccatgactttgggtggggatagtctcccatccctagctagcctcaggatgatgctgtgcacccaagactgagcagttagagaattggaactttcagcatcatccactcatctgtggggggagttggtgtaggtagggtggggtgccctgagaggacatggaagccccacctcaccccagtaccttgccctgtgcacttttccatttggccgttcctgagttgtaacctttataataaattggtaaacataaaggggaaattgttttcctgagttctgtgagttgttctagcatattattgaacctgagggggttcttgggaacccctgaatttacagcctgcggcctgggacttggaactggcatctgatatgggggcagtcttgtgggaccaagccctttatcctatgggatttaacaataatgtcaggtagaggtgtcagaattgaattgaattgtagcatacccagttggtactggggaatcagactactaagatatttcacaggggagatagcatctctagtatagtaggcagggtgtcagctggttttcttgtttgtttagaaatggggtctttctgtgttgctcaggctagagtacagtggtagagtcatagctaactacagccttgaattcctgatctccagtgatcctcctgcctcagcctcttgagtagctgggactataagtgtgtgccacaaagcctggctatatcggtttttgttttttgttttttttttttaatgtagaaatcaggcctgtgatcacttgtccagtaccagcttatcattacaacaatgaatcggccagcaatcagtcacttccagtgcctagttctttcattttccttaaactctgctgcttgaaaatcagtctgattcatatctgcgtcactcatcgccacccccagctccttagtagccagaaacatcagcgtgatgatcaggaggaaatacagagaacttgacctggagcacctggcaggattgaaagcaacagctttttctccaagcagagaaaagcttcatctgaaagcttccccctcatgcaagttgaatgataagaaacctcaagtcttcagcttgtaaaaatttaagacttagatgtgttttaagaaaataattagaattgccgggcgcagtggctcacgtttgtaatctcaacactttgggaggccgaggctggtggatcatgaggtcaggcgttcaaaaccagcctggccaacgtagcgaaaccccatctctgctaaaaatacaaaaaattagctgggcgtggtggcgggcgcctataatcccagctagttgggaggctgagacaggagaatcggttgaacctgggaggcggaggttgcagtgagccgagatcacgccactgcactccagcccgggcgacagtatgagactccgtctcaaaaataataatagttagaattaacattgagtattgtcatatactccaaaattttatgtttatatccaagaatatttatagatatccaaaatatattaacatgcaatcctcatgaaaagttattaatgagacactttacattttttatactacgtctttgaaatatacatcttttgtatatgtaacagactggcaagatatatacttattcctaaagtggaatgtggagtgaaaacatggtagatggtacttccccacttctgaggtgttactgtttacagtttggaaggaagctgaggagagcgttggtcaatcctgttaactagcacagtgaagtagtttttatgttttctgtaaatgattgcttgcatcccgtgattgcaggcccactttcctgacctctgaccagttgccttggtatcatggaacatgcagtgattcaaactaagctggactttttggaaaccagcattttatttgaagtaaaaagaaaacagttacacaattttttaaagactacgtcttcccctaatttgtgttgattctactgtgagacaagaaaaatgcatttctgcttgaggtgcagtaacaaaactagcacaaatttctttccttcttaactatttctcggatagaagattcattcttaacatagaccttatcattataggatttttttttcttttcttgttgagaacttttactttttcacttaaaggaagcatttgacagtcgcttctttttagcatatctgaattgccagcccagggccattattaagtcaaataagggttacctgacagttaatctgataatcaagacggctgctaagtgactaacagggagcgtctgcagtgtgtgtctgctggacaaagggatgattcacataccaggcgggatggagcgagatggcgcaagatttcatcacagtgctcaggatggcatgcaatttaaaacgtatgaattgcctatttcttcagtttttcatttcatatttccagaccatggttgactgaaggtaactgaaccatggaaagtgaaacccaggctaaaggggactagtgtgtgtgtgtgtgtgtgtgtgtgtgtgtgtgtgtgtgtgtgtgtctaaaccatttgacttctagtgaacgaacagagccaacctcttcctgaatatgtaaagaaatctataaaacatggcctagaatgatctaattaggaggaggaaacctatttacatgagactatatatgtatacaagtgcctggaagttagtataggcaatgattgctgtagtaagatggagtttcgctcttgtcacccaggctgtagtacgatggcgcgatcttggctcactgcaacctccgcctcctgggtccaagtgattctcctgcctcagcttcccgagtagctgggactacaggcacccgccaccacacctggctaatttttgtatttttagtagagacggggtttcaccatgttggccaggctggtctcgaactcctgaccccaggtgatccgcccgccttggcctcccaaagtgctgggattacaggcgtgagcctccacgcccggcctgctgtagtaatttagggggaaagattgatctctctctctgtctctctctcacacacacacacacacacacacacacgcacgcacgcacacaaacacacacaccccagtcattttaaggggtagggtctagtgacctaaagagcactggaacttggagagaggaatctgggacctgagtctcgtcgtggctgcttcattttccactgcagcaaaattgaagaggctaggctgcaggtctctgagaacacctctccttaaaacagaaagtctgctttgggctgcttaagatagtatatgccatctcacgcctggactcattgtctaaatcatgttagggctcttcttgttcgcacacctaacattctgttcagaggtgacactttcctgccccaagggaaagagaacagcttcttgcatggtggaatgggtttttacagagaggattaacagggatttaatagctacccattattttcctcatctactcttcaggctgtatccctaaattatgcattatttgggactatttgtgaaagaggtgtggcccctagcacacagtaactatactaccattgtttgtgaaatctgaatctgaaagagcattttatatccaagttgttcatgaaagctattgagagaaagtctgttgaggtctttgcacgtagtcctagattataccctcaatttatttttcacatataaatggtttccatggttttctcaccatagaggtggaagaatctttgctttacttttttaggtgtagttttcctctggttccttctccctcctctgtctgttcaccactatagacccagtttctcccctgcttctgaaatcagcttggattccttctcctgttctacctcagactctcttctcacctcagcaatggctgaaatctcacagtcgctgaggtgagtgatccaggcatgggagaacatgcagatggaagcctcgtgctcccagagtttctgactattcaccatgcactcatcccccttcctggcccagcccctattcctgcacctcactctttgagagcccaggttctccttcctcagtcacctcagagaacctctcttgatcctcattcccctttttgtctcctgttccacccctagcctttgtctgaactcctcattctctccactccaccagaattctttccctaagtcactcacttacttttgaggcgctccgttcttctgtgaaaaatctcatagaattgagagttgatttatgactgaattaaaggaatacaattgctcttcatttggggactgcctgtgtaagcaaaagaggaaaaatgtatgtgacctttctgccttcttatccttttcctggctctgtctgcatacatgttctctcacacacacatatcagctttattgcagtacaatttacataccataaaatataccccctttgaagtataccattcagcagtttttaaaatatactcagagttatgtgacaattaccactaattccagagcatttttattacttcccaaagaaatcccatgtacgttagcggttacttcccattttcctttcccccagccccaggcaactactagtctacattcagaccctatggatttgcctattctggacatttcctaaaaattgaatcatgtaatctgtggcctttttgtgtctaacttctttcacttaacaaaactttttcaggtttcatccgtgctgtagcatgtatcagtaccttatttctgtctctgctctcttagataagtaatagtggtagattagagagaaagagcagaaaatactctgtaaaagctactagtaccatagtgctgtgatttttatttggtggttgcctggaaacagatggcaaatctgttgtaggcatcagaaactactgtaggccagatgcagtggctcacacctgtaatcccagccaaggcaagtggatcacctgagatcaggagttcatgaccagcctggccaacatggtaaaaacccatctctactaaaaatacaaaatgagccggatgtggtggtgcacacctgttacatgtgagtaaccacctattcaggaggctgagacaggagaatcacttgaatctgggaggcggaagttgcagtgagccaagattgcgccattgcactccagcctggctgggtgacaagagcaagactctgtctcaaaaatagagtaagtactgtagacttaggaagtttttcatttccccaaatgtggtcatcataaaggcctattggtgggtgtttggtgtctcagatggttctatttgttgccgttattaaattcacttacacagttaacccctttgccagttttctaccaaagtggacctgtgagaaagtactatcataggatgataaaaggtataaatttaatttatatataaggcacttgtaaagttatgtgtattttaaaaataaaacatgtcccatgataaaagcaaactcagaatgacacaaagtatatttttaaatttaacagtgcaacgcagctctctagaattttatttaacctccatcttcagtgataccattcaatttaattttctaattaggagagaaaattgatgctaggtagatgttaaatagtttcttaagttgcatttgatttttgataccaagtcaattaaagaagatagttgtgattattaagctataaattcaccagtagtttgacatgatcatattcaatagcagtccagtggagaggggtccaggtgacagcagagctaaatatttggtctatgtctaatgattgacttctgaaaaaaatcatgcttagaaaattatttttggttaggtccttctggttgtaaggaatacagattcacttgagttctctgaacaacaaagatatgtgtgtggtggatatggggtaaaagaaggagaggccgggagctgtggttcatgcctgttatcccagcactttgggaggctgaggtgggaggattgtttgagtccagtagttaaagaccagcctggccaacatagtgagaccctgtgtctctgaaaagtaaaaaaaattagctgaacacagtggcacacacctatagtcccagctacttgtgaggctgaggtgggaggattgcttcagcccaggaggctgaggctacagtgagccgtgattgtgccactgcacttcagactgggtgacagaacaagaccctgtctttaaaaaataaatacatacatacaagagagttattacaaagtttcatgcaaatgagccctgaaaaatctatgtgacagtggctgctgtggacctggaggcattacttatatttccgatgggccatgcgcctcattcattggaaccctctgcttagtatctgctcctccttgactcagctcacatgtggctttggtatactgtcattccaaccccagctcttgcctatcctttgccttttgtcctcattgctaaatgactgaatatccttgtttcctgtagttcaaatgtctgtaaggttgggtacagagatggggttttgattgacccggaagatccttttataccagatcatggccaaccggatacttagagtggataccttcagaagaggtgtccccaaacattggtgaggagctggaagccatatgtacagaacacatcagctccatccatccatagctcagaggcatctgactggcagttggaggatactgttggcatgcctaatgcagaagaattgtggtggggtggaggaaggcattttatagtaggacttttggggaaagagactggagtatcttggatgatcaagggaagggctaaatagccaatctgaagaaagggtgaagggcccctaggacaacagaaattaaggcttttcatctctccatctcttgttgttagtgaccttgtgtaagtgggcttctgtctctgccccttgtaggtagtcttctagatgacaggaaacatggctgccatctgctcctgggcttcactctctaccacctttcattttttctggttccagttggaaatattaggggtgtttgggagaaaggctgtaatttaccaggctttactcaaatgtctagagcagtgaactggagtatggagtgtggagggacataagagcatggcagctctccctggaaccacatggaactgtttcccccaaaggggaaagtttgctgggaagatgacagtaagtaacaatgaatgtttacgacacattttcagatagactgatgttcttgattcagagataaagacattttataaaatgcaaggtgatgtttaccattggttggttacttaaaaaaaaggagcccaataatggacagtttcatttaagatttttgaataaacaaaattaacaaagagaaacaaacattagcgtttcagtctttagaatatgcctttaacatggtgtttcatttgcattgaagttattgtcttgtgaatatgtgtggttgataacttggaaacagtctatcccaagcttgcatctttggattctcaagaaccaagcatcactcttagagcatgacaggtgcttagtactagagtgccattctagattctttagcagtacagtgatataagtactctattaacactttgttccttactcacatgtaacctcttttggggaatagacaatgtgtataaaacaagcaatgaattaatatgaaagtgttgtgatacttcctgaaaacctgaatcttagccttttcatcctctggttgagaaatacatctgttttctacaattcttatttcttctgtatttttattagttaatcttcaagggaatttgcagagctctgaattttgacctctttgctgcaagcctgtgaattttcagaactctcagataatgacatcattgactgatgggtacctgttattgggtgaggctgataagaattttgccattcaggtttaaatttctgcagacgccttagactttttgaacatgtatgtgaagtcgccttattagtcacaagattgtgtctttaggcatcctaagaaacagatggactgaagtcggagatgccgggccatttgcgggttctcagcccttccctgtgttacatgtttacctattggttcactctaagtttgcaggaaacccaagctctccccactgcctccactctgagctccagccctggccaggagccctcttgcctgtatggttcacagtaacctttcctcttcaagaaacttccttggcccttgctattctgtaccccatgttctctgtgtcttattagtgtcatgtgtgtacttaggtgggtgtatccatagtctccctccagctgatgactaaattccttgaagacagtgacagtggtaacatttgtttccacattccctacaagcacctcacctaagtctgaatgcacctctgctttttattgagtgcttgtcagactgaagaactcattcatggtcagagctattaattatcactttcatctggggaaaatttcctcctaatttttgtgatacctattaaagatttctttgtgtttaataattttacattaaaatgcattataaaatcatgtattacattgtacattacagtgcatgcattgcaaaaaaaagttcaaacactgcagaagtggacaataaatgtttctctttccccaaagcctttcccatctttctccctaaagataattccttttaaaagtttgatgtgtatcttttgagatattttctgtgtacttttttgttgagacagggtcttgctctgtcatccagactggagtgcagtggtgcgattttggctcattgcgacctccaccttccgtactcaagtcatcctcccacctcagcctcataagtagctgggacaacaggcacacaccaccatgcccagctaatttttatatttgtttggtggagacgaattttggccatgttgtccaggctggtcttgaactcctgggctcaagaaatcagcccacgttggcttcccagagtgctgagataataggtgtgagccactgtgcgtggactctgtgtacattattgaaaacattatgagctgaatgtttgttcctcccactcaaactcatatggtgaaatcttaacccacaccatgagggtgttaggaggtgaggtctttggcgggtaattaggtcatgaaagtggagccctcgtgaatgggattcatgtccgtataaagtagacatgggaaatgatctttctccctaccatgtgagaatctgagaggatggctgtctgtaaaccaggaagaggtccttcaccaagaacccaaccatgctggcaccct

SEQ ID NO: 5634 - DNA, 687928 bp, Homo sapiens
  LOC440867 gene - 65575496 - 66223423 of chr2; NCBI Entrez Gene ID: 440867; Build 35; sequence includes 20,000 bases upstream of initiation codon and 20,000 bases downstream of termination codon of the gene
gaaatggatcaagccttaccatggcaaagctgggtgggacctcctaggcgtctgtgggaccttgggctctccggatactgtgtcttggtttggggactattttcattctgtctcaagcctaggtttgtagatgcccttggccatgatacttactagctgtgtgattcagtacagaggacaagccccactttattcggagttaacctatggtgcagtggccttagaaaaacttaagagtaaaaagctaccataaaaaatgctggttatatgtatgaccagacggtcaactcctccttcttctctctctttgctataacagcacctgttggcttctaagtgcacagagttctcacaacaatgtgccaaaaccgccacccttcccatcctggcacccacctccccccaccccaggagacctgcatatcagatattacttcctgctgtctatgaccacaccaccttggcagttaacatcaaaagcaaacacatggggagaacagaaggcactggagcagcgggggaagaacaagcataggtaatgtttcataaacatttttctggtgcccaggtgcaaaaaccttggaacttcacatgtatttcagctgatcatctaaggacccaccttctctctcccaggatagtgagctgaaggcccttccctgcctccactcccagtgctcctgtacctggaacacagacatgcggaaaccaaagcttaagacccctacctaccatgttcaggagagctacacaagaagagcatctgggaagctcatctacctccacctcatgcagggtgtgaccaaggctagccatctgttcaatgctggtggttcaacatctacctgggccacctttatctcaattaatttccaccatctttttcctatctcctgagggttcagtaactcaaagcagttgtcatgaatgtttaacacagtacccaaaacaggcctggaaccagatgatatctcactgatctagcccaaactaactagctttgtgaccctgagttagtcactcagcctctccagattgcaaattatgtgtaaaaaagagggagctgagctcgtattttcctaagatcctctctagttctaaaaggttatggtcagatggaaaccattttacttcagcgagaaagggcaaagcattcaccacttcactgacgagtgctgtgagaagtaacaatactgaaaccaaacaaaaacaaaacttcacttgggttaattctaggctgtatgtctgatttacaaaataagttggctaattttgttctgaatttcacagcccccttgaccatcttccccaacaactatctcttcacaatatatgtttctatatccaggctcactgcatttaactaaagtcagagagaaaaatccagctgagatctgtcagacagaattattagtggtctccctgactccagcctagcctgcactctctaactaatctgtttgattctaccaacatatcacttcatcgtctctttgtttcaaagcctcaaccagctctgttctactcaaagaacaaaagtccaaatacgtgctttgtcagcctggctggtactcaatatcctcccaaatttagcctcacctgacttgactggctttctctgagctcccccagcataaactcagacatggagtgtccctatctgtggaagaaacctttggacatgagatgtctcctctccaccttgctgacctgtctcctcccctaaatactaccatcatccttttctgagtcctcaaagactcaagactcaccttgtcggaagtgaactctcccctggctggtgcagtgataaatatttctttctttctttcctttttctttctttcttttttctttttttttgacagggtctcactttgttgcccgggctggagcatactggcacgaccttggctcactgcaacctccgtctcctgggtttaagtcattctcatgtctcagcctcccaagtagctgggactacacatgcacgccaccacgcccagctaagtttttgtatttttagtagagatgggatttcaccatattggccaggctggtctcaaactcctgacctgaagtgatctgcccacctcagcctcccaaagtgctgggattacaggtatgagccaccgcacctggcctttaatttcttatcatttttttttatttaaaacaagaatattatgcttataagtaagaataaaagtctttttttaaaaaatataaattctgcttgcaatatttagaatgaaaagaatccttaaatattactttattattcaatccctttattctagagatgagaaaactgagtctagggatgctgacaatcttgctcaaggccacacagcaggtcagtggcagacctaagttttctgactcccatcccagaacttaccacacttggcaagcaggtacctatctgctttagacttggtatccacattcaagaacttttagtgttgagtgtatcctcttttccacttgtgtaccacacagacaaggtgctaactccaagagtagaaaggggacagagctggcagacagaagattcactcccctaactcttcctcctttaatcagacgacccaaactttatacatagtctgtaggttagactcacttgtaactccccccatccaactccaactaaacatgtcctttgctttccttcagaccttccactaaatccactccagagtaccaaggcaccctctgtgtattcatccctcacccccaaagagtgcccacacttacgttcttatatccagaatgcggttcataacaataattcccaactttccaagcacaaggactcaaagggaaaaaattcagggagcacttcccttcacagggattatagttgtgtgtgtgtgtgtgtgtgtgtgtgtgtgtgtgtgtgtgtttattaactgtgagccaagaaaaatatatgccaaacatccactgtgaattcagtagtattgtaataaggttgtattttattattctacaaatgtagctacatactctgaaagacagtaatacatatgcttgggagacattacgtatttggttcacaaacaatgcatggagtgcatatggtttcccagacactagtttgggaaccactggctagtagcatcagttcaagacttgcagatgagatatctaaatgctggggagagaccttaagttttattcaccttcttctgaaagaaaaatgtgacagccaggccaggcgcggtggctcacacctgtaatcccagcactttgggaggctgaggtgggcagatcacttgaggtcaggagttcgagaccagccaggacaacatggtgaaacccctcctctactaaaaatacaaaaattagctgggcgtggtggcgcttgcctgtagacccagctacttgggaggcagaggtgggaggatcgcttgaacccaggaggcggcagttgcagtgagccaagactgcaccactgcattccagcctgggcaacagagcaagactctgtctcaaaaaaaaaaaaaaaaaaaaaaaaggaaaaatatgacaacctaatgaagatacaactggagggtctatagtttatttcagatttcccattgtacccacctccgtgttggagttattgacagcacaggccttcgtatttttagtaccccttttggggggaaacaaaggggcctctcacttgtttcagtcctctagtttattcttgactttcccagcaaagctgcctcaagtagaaagccctattccaattcatattccagtctcttcccgatttctcaccagaattatctgtaaagagtaagcactgacaagtgatggataatttgcattttaaccctattcaaatttgggtaaatggtttaatatgcatgctaatattccatcattattccaattaaggaaactattatgttaaagtgtttaatcaggagaattagggagaactccagacacctaaaattaacctctaatagtcttgacattcatttcatttaagtgcaatttgccaagctacaaccaactcccgcttaagacttctgcttaggcacgtggggattcctgataagacctaaaagcaattcatttcctaactacattgctgtctaaaagaataaactaaaaggaccacaatacaatcaaatccccaagcagtcacattccaagagatttaaacatcatcatcttgattcccagtaacaacaatgctctttgcatcagaaacaacacaaccacttcctctttctctgaccttctctgtttaattacttcctgtgatttcttctagggctgagcgcccaagcttcccagggcggcagcctttccgtgcatacatgactgatttgtctgacagtcagacattacacatacagtttgggacttcacatttctttttaagtgatggatctcatgggcctcctagcattcaccgagaactttctttcagccataaaaaaagaaaaaattcttctagtacatttccatttaaaatcaagctgtacctcaaagctggaagtcctgctaagaatggggagggacaggcacctgatgatacctctcagtgtatgatcaccaccttcttatcaaatgagcctcttcagcaaacattcaaaatgccaaagatgtgaagtcatctttttattagggtctggacaatgaagataaaaccatcacagccatggataagcccatgaaccctcagtggcataattcctggggagtttgttaagaatgcagaatctcaggatcagaatcctcattttaccagatttccccagggaatccctatgtaagctcaggtttgagaagcacggctacaggatcctccccacaaaacagcaaggctacaatacaggtccaggtgaacacaatgctgtgttagccacattgctctcacaagctttccatcaggggtaagttggcttactctttccaaaacaagtatttgtagagttgctgtttatatctcagtacagaaaaggccacctggattggcactggctccctattccacagagctgaacaggaatgcaaggaagaaatgtcactacatagttctgaggtgtttacaggattctaaatgagttctaatttcatttgctcaacagtaatataaaccaagctattcagataacacaattttttatacgagaaaactgaggccctgtgaggttgtaacacagactgttgttctacagatgttaagatttgaagtcaaaggacctgggttaaaaataacaaatcctgctgtgtgtgtgagacctcaggcaagacagggccctctcagaatcttttcctcacctgtggtatgtggacacttgacggttggacatattccatccatgtgtgaatgtgtacgtgcttgtatgtacaacacacacacacacacacacacacacactctctctctctctctctctctctctctctcttaccctcactcattctttctctcatacctaaaaacgacttgaaaagcttgcttgtttgaagattctggcaagggcctgtaggtccttcaatgctgtgcatgaagagttcccctaccccaaatatgagaaccccaacacatcacatttctagtttgcagctctaggaggaacccagcaggaaggaggggaagaaaaaggaaaacaactctagttagtaatcagttagtcagtcatcaagagggctgtcctcacaccttaaagcagatgaaactgtctagcatcctagaatgtaagtgccccgagagcagggacttcctgagccacagctctggtattgtatggcaggctaggtgctctatatttgcagtaagtgaatggcacatggtaggcattcaatggctagtggctccctctcctctggctgtacttccactcatttattttatccaatacaataatttacacataattttgcaactggggcctaagtacattctaaattcaagttattccgattcacagtatatcacactccaaatcaacacctataatctagtatccccaattttccttagtacaaaagacatcttagaatggacggtaaggtcttcaaaggttttttgttgttgttttttattttaacaaacagcagagtactgttctgaagtgtgctcacacacagatcaatgagaaggcaaccaattattaggccttcagggccagaggtgagctgttgagcccaggcacatcattctagcaaggcagatttgctttgcgagtctgagcctgagaaaaaaatcaaacttgacttaacctttaagcaaaagggagaaatgtaataactatattaagactatagtcacacttacgctgctttaaaagatctataaaaatgagtaaaattactgggatgttgataaattaaacctctagtctagcactatgtctgtattcccactccatcgtccactttattccttggctggaaaaataaaatgaaatgccaaacatggcattcaagtagacaaaacatgtcataagccaagtgactcctaagaggatggtcagtcccacccatccacaccaagcctactgacttttgttttagagagaatttgaatgctgctggtaataaggtatctagaccacatatcaggaatggcgtagggatggcaggggagccaaggatgctattacaggtaggtactcttaccctaagagaacagacaagctataaaactcagaatctcaaaaagcacagccaactgggatcactgagtaaaggggccaatggtcagctgggcattattgattatcacagtacaaaaactaccaggacaccattagaaagccaaaagaaacagtcagtcttagaacatgacttctaaatcctaattatcctcccacaagctccctgaggagccttgagcaagtcatttcagctctctaaggtacaaagtgaaaatcttgtttcctgccttgtaaagttcatggatctcctctgccttgtaaattctgaaaagaaagaacaccttattacatgatgggggacagacctggggtagatggatgctactgaatctcaatttctcaggtgctgtgctaaaatgttttaccaaggctacctcatttatgcttttttttttttttctttgagatggagttctgctcttgttgaccaggctggagtgcaatggtgcaatctctgcttagcacgatctctgcttggcataacctccgcctcccaggttcaagcgattctcctgccccagcctcccgagtagctgggattacaggcatgtgctagcatgctcaactaattttgtatatttagtagagatggggtttctccatcttggttgggctggtctcgaactcctgacctcaggtggtcggcccacctcggactcccaaagtgatgggattacaggcatgaaccaccatgcctggtccatttctactttttaacagcctattaggtatacagcagaatgaacctcatttacattaatccagggctggtggcttgggatacttagcagggtcccttagtggcaggggaagaggtacggtctcactccaaagtccatgattcttccactaccatcatggcagcctctcctttagtagttttgaaaaagcaactcaaagtcttttttggatataggtatccaaaaaagataattgttaaattgtgaaaaattgttaaatttttatacacggtacaattattttttcaattaatgaatagttacttcaaccaattgataactgtttacagaaagcctactatgtgctcagtgttctgccaggccatgggtatgagggttaataaattattctcaaagggcatggtggtgtacacctgtggtcgcagctacttgggaggctgagatgggagcactgcttgagcccaggagttcaaggctccagtaagccatgattgcacccctgcactccagcctgggcaacagagcaagaccccatctctaaaaaaaaagtaataaaaataaaagataaagctattcccatgccaggtgcaggtggctcatgcctataatcccagcactctggaaggtcgagacaggaggactgcttaaggctaggagctgaaggccatcctgggcaacgttaagaagacctcacctctactaaaaatttaaaaattagccaggtgtggtggcgcacacctacaatcccagctactcaggaggccaaggcagaaggatcacttggaatactccagcctggacaacagatcaagagtctgtttcaaaaacaaacaaacaaacaaacaaacctattcccacacctagaaagacagatgggccaagcttctctgtgcattctcagttagtatggatgcaaatacaaaataaacagtgcgtatctgaaaagtcagtactggaggccagagccaaagcaaagcagtaagaaaaagaaacaagaggaataaataatgaaaatgaaaagacaaagatgtcattaccagatgaacaaatgaaagtcaattaaaaacttaactgataattaagttttaagcatttataaatggaccacaggaaatatatcaaagaataaaaacaaccagatctgaaaaatcgttatttcaggacacagaggagccaaaaccatacattttagaagctcccaatatttgttctaatctcttcaatcacaagtgttaaatgctaagggtgaagtcaaaatctgtttctttacctttaccctctaagtgcaagtaaacacagaaagtttgtttttaaataaatattcaactaccctttgagagtagcaggaagaacataagcacaatttgataatacgtgtgcaatatgccacatgtgaacataatgttgataaaggttacatgagaaagggaaatgggtagttatgaaacaattgttacttaatttagcaaactcccatgatcctggcctgactttctttccatgacatgggacatatgtcaagatgtaacaatccttcatgtctatccagggaaagcatataaaaaatatattttgttccacggggcactggagcatcaatacaaaatatttcttctacttcaaagtcactaagagccctagaaaatgccttaaaagcaccatcacaatgttctagatttaaatagtaatttttaaatatttctaagaataagttatcaagtttattgagatgacggggtctttttaaaaaactcggcctaatttaccttagtaaaaacaagcccaaacaaataatcacatacaccaaaactttctggtctgcctctattatcacttgttcaatttctgaaaattttgctgttagactgtatttgtgttcagccggcaatacaagaatgatgccaatattggagttcatcagcacagctgtatccaccctcaagtgttaagactccagcagaaccctgcagctattgaaaattgttaatactgtgatttctgcagagattctcctacagaggcatagaaacaggccctgtcttattgtggtcaagattttttacttgtcagttctcgcaacaatgaatggaataaaaatgggttttgagttaccaatgacagatcactaccaccagatagttctgcatggaatttccacaaaataccagaggctcaatgtgaacatggttgagtttctcaggaggcttatatatatatataccctaagttaaccaaatacaacaattgtaattattgcattagtcagtagggatgaaacagcactttaaaataattaaatccattattttattcaatagacattaagcaaccacaatgtgcccaatggtgttgggccaacaactagaaaactaggcatttgagaagtaaccttgaatccaaaaaactcaaattcggatgcagaatctagctgggtataagcccaacttgaaataataattgccatgtaatgtagggaaaaaaataatacacacagacattgattttgacttgcattttgactttgacttgattttgactgggaggagggggttatggtgggaaagtcaaaaaggaccacccaaacgcaatggctcagagatggctgggggcatgagcagaatgtcacctactggagaagtgaaggaagaaagaagagaatttcagaataaaagcaagagtaagcaaattgctaaggcaaaacagttttgggtattgctactgatccactttgtatatattgtactggataaaaggacaggaaagcagaggggaccagctttagttagaaaggaggttgcatttgctaatattcccatggaaacaaacccagaccacaaccagctgatggagcttagtccactccaggtctaccacctcactagctgttcagccttgcactaggcacttaagtttatactatgacaggtcctagcttacaagctccttaaggtcttttcaggttttttttgttttttcttacttttaagatttttttttcctggagacagggtgtcactctgtcgcccaggctagagtgcagtggtacgatcacagctcattgcagcctcgacctcctggcctgaagccatcctctcccctcagcctcctgagtagctgggactacaggtgtgcgctaccacacgcggctaatttttattttttatttttttggtagagacagggtctcactgtgttgcccaggctggttttcctggcctcaagctatcatcctccaggcctgggtctccagtagtgtggggattttctgaggaataaatcaagattctaattctgcacagtcaactccatatttttaacatttaagggttctactcatgtatagtagaaccataccccctggtagaaacatacctccctttttaaggcaaacacaaagaaaatggatcaatactcactgtatcggtttaatttccacaactgttatttcagttaacatagatctaacattccaataataaccaactctgaatttgcactactcccattatctttgaggtgtatcacagaattctcaagcccaaatttatttaaatccattttaattcagtatgcccctcatgcttcacagcattttctgggaagataagtgaagtgagaaaaatgatggcaatgacagattgtcaccagttcagaagaataatgaacaagcatgattggcagaaaggctgcgagctctgagtcagaacgactgaggctggaccaccccaatggttcatagtggttagttaagagcacagagaccttcctgaaccaggctactggagtgctccattcccagctccttcagttactcacaggatgaccttgaggaaaggacttcacctctctgtgcctcacttctccctattataatagggataataataccaactacctcgcaggatttttaagaagactaaatgaataaagtgctttaaaaaaatgtttgctgtctcgggcaactaacttgaccttggctttctcatcagttaaatgggggtaataccttcttcacagggttatctgaaaatgaagctcagcctgaaagaaatctatctcagtgccctgcaaagagccacatagggcacctgttttatgcctagccctgtactataagctttacgtaggctgtctcatttaattctcacagcagctccacaaaataggtagtgtctattcccattttgtccactccatataaaactgacatgacatatgaaagtaaactgccttagatcataaagtgagcaaatggctaagccttaagccttaaatacacgttacaaacgcatttaactcggggtcttcgattggtctctggctgaataaccagttataaaagacatttttgcagacaattcaggcagagtgttaaagacaccagggaattattaattttgtaaaatgtgataatagtattgtggtttcacagaacagtatttttatctcttgagaagtaagctcaaatatttaggtacaacagtcccaatgtctgcaatgtctttgaaatggttcagcaaaaatacttacacctgttttattaatgggaaacatttcaacgttagggaaaatatgactgaaagggaagctgcaaatccattcccagcaagaagtgggttacagagaagagttcatgaaaggaacaaaagaaaaagctgaatggcagctcgatgtctccagggttagagcttggttcagtaaggtttatcttgtctgcaaatttccaaaccattcatagccatgatcaaacgctttaaagatagtgacaaaataggtatggatttaaaaaaattttccaaccctatgcacagaggacgacttacaatagtttgctgatgctcttcgcttcttaaattatatttttaaaagtctgtataattgtaaattttaacatgcatttttatgtggaggggggacgaaagagaatggtcagtgtattttctatatggaagatatcttttgggaccattatcaacaagagcaaagaaactttcctgaattaccatatattagaagaattttaaattgacatggaaaacaacattagaaaacaaaacattatttttttaaattaagcacaattttaccatttgcaagattctgatttactgcattctgatgctaaatgaaacagatattatctggaccattcaacaaaacctttactacatgtagactatcaagtctattttacctaaagtacaaatatatctttcctaggtctccagtttgatgccaccagttctcttaagtagcaaaccctgcctggttccaaaggtatctgagagacctcaaacataaaatcattacaagaaaaaaacagatcaaattcacccaaagtaggaatctagcaaaaatctaaccaaatatggctaccttaatcaaacaataattttagctctagacttaaagacagtggcagcaaacaacaataaaacaacaaaaaagcaatcacagcaagctctgtaattcagagagaaaaaccttactgtcactaacatttaaaaggaatttttcagatgcgtcattacacaggtacgttgaacaaaataatagacagtggctaccatggcagtttacagcccacgaagtcgctttcttctcaggcattttaagttttgagccaaggtcatcacattaaaaataacccctataagcccatttcttcagtggctaaggtgccaaggctttctcagtctctaagtgaaactagaactcctcaaatatctatcctctcaactggactcgtgacagcagtggaggctacggcttcatgctgaacttgctctgagagcctgaaatggagctattctttcctcgctggtgatcccactcgaaatccttctgctttggatagcagatggagaaagatgcaaggctgacaagctgccacaaaaagagccaggtcaggcctgtattcccaaggggtggagccaaggtagagtggtcaaacctctccaagaatctgcaaggccagagcacagcaaccagcctcactgctactactgctactctgtgtgcaggtacaatcgagggcccataaaaatattgatttattggtcacgttcaaaaggcagcaaggcccagcagcatattccttctctgtatttcagccctaaaagcgcaactttttttcattttaccattttaagatgctatatacgaagacaaagcaaaacgtctgaaatagaaacaccagcagatgcggtgggacgtctgcgacaggcacagcagcagggatcctctcctgtgacggctgtctggaagatcaggggttactgcagtcaaagttccctggggactcacaggaaggaaactgaaattccctttcccaaacaccagccccactcccgcccggactggcaacagcagacgccaaaggataaagggggtatatttaataaagtgagtagatttcctagagtagggcacagcactgtcacctgctgcaagagacaagcctcccagtcgcccagccctgagtcacttcccctcccagcactcttgaggctcaatgcctgcggggggcaaaagacctggggcctccggagcacgccttccgaagcccacactcccctgcaaagacgcgcgcggggcctccctccagggcgcgtccccgcggctgccaaccagctctttgcgcccaagcccgcgccgccgctaccttggctaatggcagcactgaatgaaaggaacggatgcaggctccggatttatgaatgtgcaggggaggaggggagggatatcatgtgacaataaaggagcgcgtcttattcacaaaaaaaaaaaagtggctggtggcgggcacagccactgagcagcagcggcggccgccgcgcggtgaccgctcaaaccccaggcataagacttgaggcgtcgggccccgcggccccgcccccgtcgcacccgagactgaaaacgcctcagaccagggagggaaaatgccaaactggacccctggaccgcgaggcaggaggcagctgcacctccgccccgggctggcgacagtcacgggtcccgcgcggggcggcccaggatccctccggcggagcgccccgagcattgttcccctcgggcccgcgggccaggcacaagcccgtgcacgcgcacccgcgaggacactcacatacacacacacacacgcgcgcccccagcgcgatgccccgcacgcccccgccgcacacgcctcggtccgccccgagccgcccgaccccgcaggacgcgtgtgccggccacaagcgcgtgcacaggcactcacgcgccgcggggcccctcgggcggctccagcacgccggcccgcgcggggaccctggcgcaccagacccccgcgcagcccgcgcctgtcctcctctcgctccgccgtgttttttatgaatgaaaatgtggtatgcaaatgagagcgattcaagaaaacgaaatggcggagcctaggccccagtgggctccggagcggactgcagggctcgcggggcggcgggagtcacaaagtcactgtgcaaaaacccaccagccccgggaagccggagtgggggtgtcaggtcttccgctctagccgccgaggatttcgggggcgggggagctgtaagtcctccgagagggagcggagaccgccgggaggtcacccgcacgcccttggcccccggagctgccaccagcccgccgaccctaggcgtgcgcccgccagcccgcagcagtttttgccctctcctcacttcaacaagcagggaagcctcgcgtcccaacgccgaaaggtcagcgagtcgctgcaccccacgccaagttcacccaataagcgtccccgcccgcatcctcagccccggcccccacgctgcccctgaggggcaccctcgtcccaccccgcgaccaaacttactcgtctgggtgtgtttcttcggtcattttcttgttcacctagacgcctgtcccgcggcgggcagctttgctcccttcatcttcctgtccgctcgccccccttcttcacatctccggagatcgcctgatttggggagggggggcggctagagatgaagagggcgccgcagcagaaggggaagcagggcgcgggatagggtttgggggaaggggtgcaaaggcaggctgcgcggggagtgaacgccgcagcgccgtggggagaggcgggcggaggctccgggggctcgggagcgggcagagggggcgagatttgggaaggggacggcggtgggggagagcaggagaaaaacaagcgcgcctcggagcggcagggactgctgcgaggaggaggagagcgccggccgcgggtgggggggctcagtccggggtcgcccccggggggccgggccaatcacggttccggggagcggtcggcggccgggggaggtgcgcctgggaggcggtgcagggcgccccgtccgagccccatctctcgactccaccgatttactccatattggattctcaccgccgccaacaggaggaggaagtagggcggaagcgatgacgtcttcccagcggccagaggtggtggagtgcaaaaagcttcctacttgcgaccgaaaaaaagggagaagaaaaaaaaaaaaactttgtcccgcctactgagcacgccccgcttcctctccccctccctcctggcttccactcccgggggagccgcggagccgagttgtttgcttgcgccgcgaccgtctggctccgaatcctccttgattagggctccgggttttaggaagcccgagaggagggaggaggcgggagcggaggactcgtacacatctggctcccgtttttgccccctccctccttccaaacaccaagattaaaaatcggggggttgggcgggggcagagatgggaaactcaagggaggggagggagtaaaacagctgaagaggtgctcaggctcagaggcacaactacccccaccgcggggtgggaaggtaggggcggcgcaggtgccaggggctggcttctccagcccaacccaaccagagaggggagggggttcgactttgccaaggttctgaaaggcagaggcttttccgtttcacgtgaatcttgtgattttttttcttttttgtctcaatagaggaatggatttttgttttgttttgttttgagatggagtctcgctctgtcctcaggctggagtgcagtggcgcgatctaggctcactgcaacctccacctcctgggttcaagtgattctcctgcctcagcctcccgagtagctgcgactacaggcgcgcgccaccacgcccagctaatttttgtatttttagtagggagggggtttcatcatgttggccaggatggtctcgatttcttgacctcgtgatccgcctgcctcggcatcccaaagtgctgggattataggcatgggccaccgcacccggccaaggaacggatgtttttaagaatcattactcatgcaaagaaaaaggtcaacccagcacagcccagaaacgtttgcatttccgtagaaattatggaatttctcgcgttaagaagcagccccggccgggcgcggtggcacacgcctgtaatcccagcactttggaaggccgaggcgggcagatcacctgaggtcgggagttcgagaccagcctgaccaacatggtgaaacatcgtctgtactaaaaatacagaattagccgggcgtggtggcgcgtgcctgtaatcccagctactcgggagctgaggcaggagaatcgcttgaccccaggaggtgaaggtggcggtgagccaagattgtgccactgcaccccagcctgggcaacaagagcaaaactccatctcaaaaaaaaaaaaaaagaagaagaaagaaagaaagaaaaagaaacaagagacatagtccctatcccttgctgctctccaaacacagtagacttttccatcctcttgaatgtccatgggacaatccagatacgatgttaactaaatagcaaccactgaacaggttaagagattaaatatttgcctcaggctgggcgcagtggctcatgcctgtaatcccagcactttgggaggctgaggtgggcggatcacctgaggtcaggcgtttgagaccagcctggccaacatggcaaaaccctgtctctactaaaaatataaaaattagttgggtgtggtggtgggcacccataatcccagctactcagtaggccgaggcaggagaattgtttgaacccaggaggaggaggctgcagtgtaccgagattgcaccattgcactccagcctgggcaacaagagcaaaactttgtctctaaataaataaataaatgcctcaaatttagtattcctaaaatttacatacatataagagccacaaatgctccaaaaagtttcaccttgagtcagggataaactggtggtttactccaggctttgtgcttatcacagccatgatctctgtagacatggagtagggttcacgctggtgatgtgtggtggtggggagggcatgaaccaggggatggaacagcttggttctggttttctcctagcagtcctgagaccccgagtgagtttctttataaaacaggaataacaaggccaagcttgtctttatcagtttttgaggccattgagagttcctgagaaagtactaagcaaaggcaagatctcattgtcttccaaatcctcagatggctaaggaatctacccaagtctcacctttggccatggttgctcttctccctgggagtgctgaaagagatcccaccctgttattcctgaacttcccagaacacaggcacttacccatgtcaaaattatccaccctgtgggcatctcttgggctccaccctccagtttcaaggtacacaaatggcaaggtggcaggtgaggtgattaatttctgcaggtaggccagctctatgagcaggttaaattggtgtcatcaccactcactcagccagctctctgcttaatagcagcgaacgactggcccagcctatggaccaggttgccaggggaacaatgataaatattctgaggtccagaagtccccaagtccccactgggatcacctggtaccatactccagctgggctatctcaggcaggcccttaggtccactgagccttgggttcagtgtctgttgggtcggaatagtacccacaacatagggttgctgggaatcttaaatgggctatacagattcctgatagccctttcctctctctggccagctggtttaccaaatgcccccctccactctgtccttcatgttcctttaaatgaagcctgccagttctcttctgtcttgttcaacacccaaaaggggccttttgatggaaacattactagcaggtcacttcttggtcctccccatcaattactgtggttgaggcaagtctgactcctgcagctccatagaataaatgaggacattgggcgaataactcagatatgtctgttgatctgaacatcaaggtgttatcaaagtccattggattgttgctggaataggggatatcacagatttagggctttaattgatgtcactgctgaaagagctaaggacccacatccctgtctctccccacaaccggcagaacagggggctgcgggaatctctgaacacgatcaaatcaatagtgctcagtcagagtaggatcgtaaagcttcaaaagtaatatcgatctgctcacaacttcacgcaaacccagcggggcccccagcaggtcccccacctacaggcttctcagttccgagtcctgggcgagggagcacccccaccccggcccttcccgcgggctgcccggaaagtccggagcgcggagccggagcgaccctccgcggccggggacgggcatgctcagtagccccgcaggtcctgtttcactgggaagccgtccgcggcccccacccctcccgcctggctcgggcgccaggagaagcggacattttagcctcctctgcaatccgctctctcgttcgtgtccttctcccccctctcgtccggtagggccggcagtgtagatttccccaggggcgggggtgggatctgagcaatcactcgccctcccccctcccaggggcggggagggggtgatttagggaggactccacggggcccaaaggttcgcaccgccccgccgcggcccagcctgcagaagccccccgctgccgcggcgcccccgctccccgccccgcgaggcgcgcgcagctgcgcccgggcctgtcctcgcttcacccccactctgccccttcggtatttctcaatgaccggcgctccgaggacacttccgacgcggagggagggggtgtcattagcgctcggttatcagttccttccggtctccccgagctcaaccctgcgcgcggccgggccgcgcctcgggcgatctggtgcctttattatgatgtttaagtaagcagtcgtgtgtgccaagtgagtttgtagcccagctgtctcccccaagccccgctggcaggaatggaaacccaagctctctcgtaatgcaggggatgatgcaaacttagaaactgacccggcgcccgggaatgaggcccccccgccccgggcgtgcggcggcccagtcggggcatgaatggctggagcccgattgcataatccgcgcggtataaatagccggcgggcgggccgctgacgcgctcggttgtgccgttatcgtgcaatgcttcatccccggtgccgttcaatcccaggtcgttttccctttcagctgcaatgccgggattttaaatagcagagatgaaaggcccctgcccccgcctccctcctcccctgagttcatgtattatgaatgaaacggcagcctcgctgcttcctgaggtgctccacttcaggtaggagagagactcaatgtcaaggcagctggctactaaaagttgggtgtgtgcgcgcgttggggagggacggagaccaggaaataattgacaggctgggaaacattcttttcgagaaaatgtaaccgctcagggtttgcctctggagtttcagtttacaactgtacaagcctcagtcaatttaagaatggattatgcaaaggggctttcgactgcggcttgctcgccctcacaccctaggccgctgtctctgtggaaagtgctgtttcattcagaggagctggtttctgccctcccagggaggcagcacacatcccctctcccctctcatcccccactttaagatgagccctgagaacccttgagggtctcgagaaaagcgaatgctggtcactgtagccattctctagttccagaacctcttggaagcctcagcgaggtccaaagctgagtaagttttaaaacgtattttttttccaacagtttttcaacaataggtagtcattttaaaaattaaaggatgaagcaagttttcgtcttctcatgaataccagatttcaacttaatttcttaacataaaaatggccagttcttcacaaatgcatttctgacatgtgaagggcaatggtcaaggtcatgatttttttcactggatacccattgctccagtctgccttgaaagcaccagggctctatgaggcagtggggatacaggagtgaagaaacccaggctccttccctccagggattcggtcagctggggcaacaggcatgtaaaaaacacatgaggccgcgaggtaacagctctgaaaaatggagtaagcagaagagaaagcaggggtcagggaaaggatccttgaaagatgctgggagtgcccttagataactggaaggggagagatctcggggataaagagccgggttaccacaaaggccctaggtgcgaaataactttgggaggagggggaaggaggtgcgggaaagggtggagaagggtagaagccaggtcagggaggtcacacaggccttgctgaagaaggttaccctttattttgaaatcatggaaccttttgtagtcgattcacagctgatctttgtctagtcccagatcactgcagtggctcccaaagttatgcaaatgtggggcaagtgggcatccattgttctgggattagggcatcaaaccaaattcacaaactgacagctcctaggccagataaggccccagacaagttttgttttgcctgtttttttttgttgttgttgttgttttttaatcaagctaacagcttaaaaccagaatatttcacataaaactcaatatttttggttcctcctgaaaaaaattaaagacttagcaactgtgagtgccagatttctgcggggtaacagtggatggttgctgagtggaggctgccctgtctgtcaggcttctggctcctggaggcatttgagcttttgacccctggcataacaggatgttttgtgactgggtgaaggccccactctgagaccccaggctggtagagcttgtcactgggtaaaagcaatttgcatgaggagcgctgggcctcttgggaggccaatccccaatctccttaccaaagacactgtattctacctaggcaggcagcccacaggcagggagcagtgaggctcctaaaataacaatgaacattgatcccagcttgggctctgtttctagggaacccaacctaagagaagtaggctctctcccaccaggggagctggaggggctcaagtgatcagctgagaaaatcaccaaatttgtggaacaagttttacaagttacataaccaaatagtttaagcagggaatgctaggctcaggttttatactttaataggttattctaggcttgaaggatggtttgttgggagcagagcaaagactggtttgggagaaattttcctcttccatgacaggagtaacaatgcatgataaagcacagtgacaagggccatggaaagaagtaaccaattccaaagacacaaatggggtagaaatgacttggctttatgatctgttagatatgggggctcattgagaggtctaggataaattccaagtttctttcccttttccttgggaaattgggtgttttctggtctcttaacatgattagggtaataagtggggagtaggaagaaggctgggatcactcaagatggagaagcacgatgagcagttgctgccacacaagtctgggacccacacaataggtcagagactgagggatatacataggacaagactgagtgcagcagatcctggaggtggagatggggagacagttccctgaatacatcttttgagcaactggattcaatcttgcctgaagcctgaggatgatctggacttttaagatgtaaaagccaatatattgttttttgcttgagctaggttgagttgggcttttgtcacttggagcccccaaaattctagctaacaaagtagaaaaccatactttggatagtgaaaaagattgagaggaactaaggaatggaacataaggggaattttagaatgtgtgtttgcaatttaacacagggacatctggggtctttgccagggagtttcatagagactctgatttactagaacaaacttctcccaggaagttagtcaacactttatgggttgtgctgtcctctgtttttagtctcagcatcctaccatcaccaccttaattcacatgttcacctcccttctcactcctaaaaacatgcctcatttttactacctttatttcccgtcccttctgtaaagaccaaagctgggaaaggaagcttaataatataagagaatcagagcttttagaattggaagaaaatgaaggatcgtatgttgtggcaactctgacttcagtaaaccaaacatcttacccaacctttttggaatggagaaaggaagaaaacaaaatacaatatgatatggtccctgtatcagttagcttttggtgtataacaaaccaccacaaaatctagtggcttaaaatgatgaacattttactgtttctcatgagtctctggtctgggctggctcagctagggctggatggtctaggatggcctcgctgatgtatgtcgtgtttggcaagctgattgctctggtagggcctgaggtgggccagctcgtctctgctccacatgatctgttatcctccaacaggccagcctgaactgcatcacatggtggtggtggcagggttcccagatcagcaagagagaacaacccccaatgtgcatgtacttgttaagcctctgcttgcatcacatttgttactatcccattagcaaaagaagtcacacagttggacaggcgcggtggctcacacctgtaatcccagcactttgggaggccgagactggtggatcacctgaggtcaggagttcaagaccagcctggccaacagagtgaaaccctgtctctactaaaaatataaaaaattagctgggcgtggtggcaggcacctgtaatcccagctactcgggaggctgaggcaggaaaaccaatggaaaccaggaggcgaaggttgcagtgagctgagatcatgccattgcactccagcctgggcgacaagaacgaaactccgtctcaaaaaaaaaaacaacaaagaaaataagaagtcacacagtcaacccagagtcagagtcaaggagtagtgacatagactctccttgttgatgagaagaatggcaaagtcatatcacaagggatgtgcatacaagatgagaggaatctgtagccatcttaataatctacctcaacccctaacccaaattttacaacatagaaaaagatatttgttttttgtttttgttttggtggtttttttctttttctttttctttctttctttctttttttttttttttttttttgagatggagtcttgctttgtcacccaggctggagtgcagtggtgtgatctcagctcactgcaacctccacctcctgggttcatgcaattctcctgcgtcagcctcctgagtagctgggattacagacatgcaccaccatgcccagctaattttttttgtatttttagtagagatggggtttcactatgttggccaggctggtctcgaactcccaatctcaagtgactcacctgccttggcctcccaaagtgctgggattacaggtgtgagtcaccatgcctggcctgtttttgtgcttttttttttgagacagtgtctcgctgtgtcactcaggctggagtgcagtggtgcaatcttggctcactgcaccctcaacccaggctcaagcgatcttcccacctcagcatccctagtgactggggctacaggtggtcaccatcatgcctagttaatttttttaatttttagtacagatgaggtcttgctatgttgtccaggctggtcttgaactcctgagatcaaatgatactcctgccttggcctcccaaagtgttgggatacaggtgtgagccaccgtgcccagccagggtatttgtaataataatatacatttatctcatatatgatatattgtatacttacatatacaaatataaaatataaacatgatacatatataagtacatgtatcatgtatttacataagtatatttttatatagatatactatttctatatagcagtactattgatgaaattcacttttccctttacagtccctgatttatggccaactaaaactgcttaatgtttagtagatttgtgcatgctataaaactcttctcaattaatttaatgaatcaagaaagagtccttaaaaactttttatacttgcccttctctgtcagcttgaaaatcctatttctgttatgcttacatcttaaaataggcatgctactgaagagatctgggcaattaaaatgtttgtaaaccaaagcacattttaaaaacactagggaagcttaactatttagggttactttagattagataatttggaaaagcaaataatcattcctgaatttgttcatagaactcatatcttaaatatagttttgggattagttaaagcaaggctcacctgtgtgcttttttgatgacgacagaggtggtgctcatggtgatgatggtggtggtggtgatgatgatggtgttgagagatagcagtggagatggtgatgggaaggatgaggatgatagtggtgatggtggtaaaggtgatggtggtggagatagtgacggtgattttggaaatgatggtggtggaaggatctgagatagacacttttagtttgctgcagtggtttccctgtggtccatctaccagattgcaggctatacagatagctggggcaaatgcattagaaaaaggaatagaaggccgggcaaggtggctcacgcctgtaatcctagcactttgggaggccgaggtgggcagatcacgaggtcaggagatcaagatcatcctggccaacatggttaaaccccatctgtactaaaatacaaaaaaaaattagccggccatgctggtgcatgcctgtagtcccagctgcttgggaggctaaagcaggggaatcacttgaagctgggaggcagaggttgcagtgagccaagatcacgccattacactccagcctggaaactgagcgagactctgttaaaaaaaaaaaaaaaaaggaatagaaaaacagcaagtcaaagaaaagaagaaaagcaggtagagtatatgatgacatgcctgctaggccagacagttccccacaatgccaggagaggcaaccaagtactcttccttcaggcctcatttggataaaacttcctccaggaagccttctctcatctcacctcaactgggcgaggtgcaaggcatgtataccctctcctctgtcccagtcctctccatacctttcggtaattgctcttctacatttccttcccactagattgtaagcttactgagggcagggaccacatcttattctctcttattcaatcttgagccactatggcacatagtgcatgccctgtgatgcttactgagtaaatgaacgacaagtcagcacaacttgctttcttctttccctctaaaagtgcattttactccacagcatcagagaaagtatcctgaatggcttctcaagtgtccttgcctaaggccctgggcttgctggtgtcaggtggctgggaaggtgctccagccgattttatagcataaaaccatgtagtactagagttctaaaggacattaaggaactacctgttttaagatgaggaaactggggcccagataagcaaagtaactcaattatgtcacacagatagtcagagtcacaccaaaccataactcggggaactcagagtccaaattttataatcgatgtgactttgttggaataatgctggatacaccttttgcacccactgctaattatgctggtgggaggcagtgttgcttatcattgttgtaattcattcacataagagaaaatgaagacttgcttttaggtttccaaagactgactcagggatatttatatggcttgcatttgtggctcacattaaattctattggacactgctggtctagggcaataatgatgatcatggtaatccccttctctgggccagttcttgatttagggatggctgtgtttcttcttttaactgagcatagtttttttccctgtgcttttccttacaccgaactgtcacagtgtggccaataaaatgtaggaaaatgtctgctaggaacagacattttgggaaagatttgaatccctgagaaaaagaaagatgagtgagcagaaatgccaccacccaccccttcctgcctttagaagttcttgtgtgaagcagtgatgccaggagctaccaggaggggaaagccatggaagtcaaaggaaagctgacctagaatcctgaaatcgtcaagataactgacataaccagtcttggaaactacctatatctggacttcacattatgtgaagtagtaagcgtctattatttaagccacctttattctgtgtcttgttactttcagccaaactaagtgattcacacagcatggcttcattgtgtgcattccctgctctgcagggttgtaagtaaatctcagtcttccagcagcgggtgcctgggcttggtttgccaccttgcagaagaggactaagcagcagtttttagacatatctctttgagatgtcatctgctgatatttgtaggctgagaaatttttggtgctttttgtgtaacaacttaacattgggcaatctacaaaaatgtaaaaacctctagcctatgtatgcttacaagcatgcgttatatgcttgtaacttattgttgctgtataaaactctatgttttttttccattgttatttgtgcttatgaaataacacaagccttaatttaaaaaaaaaaaaaacttggccgggcgcggtggctcacgcctgtaatcccagcactttgggaggccgaggcgggcagatcatgaggtcaggagatcgagaccatcctggctaacacagtggaaccccatctctactaaaaatataaaaaattacccggatatggtggtgggcgcctgtagtcccagctattcaggaggctgaggcaggagaatggcgtgaacccgggaggcggagcttgcagtgagccgagatggcaccactgcactccagcctgggcgacagagcgagactccgtctcaaaaaaaaaaaaaaaaaaaaatagccaagtgcagtgacacatatctatagtcctagccactcagaaaactgaggcaggaagattggttgagctcaggagttcgagactagctgggtaacataacaagaccctgtctcaattttaaaaaaagaaaagtaaaaagaaatgtaagccttgttcactgtataaacagttaaagtgcaaaaaagtattgagaaaagaataatgtcccagtaatctcaccactcagatataacccctgctattaatggttgatttttcttttctttctttctttctttctttctttctttctttctttctttctttctttctttctttctttctttctttctttcttttctttctttctttttttttttaaagaagttttgctctgtcgccaggctggagtgcagtggcgtgatcttggctcatggcaacctccacctccagggttcaaacgattctcctgcctcagcctcccgagtacctggcacatgccaccacgcccagctaatttttgtattttagtagagacaggatttcaccatgttggccaggatagtctcgatcttttgacctcgtgatctgcccacctcggcctcccaaagtgctaggattataggcatgagccaccgcaccccaccgggtttttcttttttgagacagggtctcgctttgtctcccaggttggagtgccatggcatgatcttggctcactgtagcttccgccttccgggatcaagctaacctcttgcctcagcctttcaagtagctggaactacagttgtgtgccaccatgcccagctaatttttgtatattttgaagagatgggtttttgccatgttgcccaggctggtatttaactcctgggctcaagtgctctacccgccttgaactcccaaagtgctgagattacagatgtgagccaccgtgcctggccatgtttttacattaaaaaaaaaaaaaaaattgggggtctgggctcacacctgtaatctcggcactttgggaggccgagacaggtagataacctgaggtcaggagttcaagaccagccagaccaacatggtgaaaccccacctctactaaaaatacaaaattagccaggcatggtgatgcatgcctgtaatcccagctagtcgggacgctgaggcacaagaatcgcttgaacccggaggcggaggttgcagtgagctgaaatcacacccttgctctccagcctgggcaacaagagcgaaactccctctcaaaaaaaagaaaaaaaaaattctaatttttaatttttgtgggtacatagtaggtgcatatatttatggtgtacatgagatattttggtacagacatgcaatgcataataatcacatggaaagtggggtatccatcccctcaagcatgtatcttttgtgttataaacaatccagttatactctaagttctttatttttatttttattttttttgagacggagtctcgctctgtcccccgggctggagtgcagtggcgcgatctcggctcactgcaagctccgcctcccgggttcacgccattctcctgcctcagcctcccgagtagctgggactacaggcgcccgccaccaccgactaattttttaaaaaatgtacaattaaattattattgactatagtcgccctgttatgttatcaaataataggtcttattcattctttctatttttttgtacccattaactgtctccatctccccactgccacccccgactacccttcccagcctctggtaaccattcttttgctctctatctccatgagttcaattgttttgatgtttgggatcccacacataagtgaagacatgctatgtttgtctttttgtgcctggcttatttcagttaatgatttccagttccatccatgttgttacaaataacaggagctcattttcttctatggctgagtagcactccattgtgtatatgtaccatattttctttctttcttttttcttttcttttcttttctttttttttttttggagacagagtctcagtctattgcccaggctggagtgcagtggcgcgatctcagctcactgcaacctccgcctcccaggttcaagtgattctcatgcctcagcctcccgagtagttgggattataggtatgcaccaccatgcccggctaatttttgtatttttggtagagaggggtttcaccatgttggccaggctggtctcgaactcctgacttcgtgatctgcctgccttggcctcccaaagtgccgagattacagatgtgagccactgcgcccggccttgtaccatattttctttatctgttcatctgttaatggacatgtaggttgcttccaaatcttgactattgtgaacagtgctgcaacaaatataggagtgcagatatcgctttaatatactgatttcctttcttttgggtacacatctagcagtgggattgctgggtcatttggtagtcatatttttagtttcttgaggaaccttcaaactgtccctatagtggctgtactaatctacattctcatcaacagtgtacaggggttcccttttcttcacatacttgccaacatttgttattgcctgtcttttggttacgagctgttttagctggggttaagatgatatctcattgtagttttgatttgcatttctctgatgatcagtgatgttgagcaccttttcttttcttttttttttttttgtttgagacagagtttcactcttgttgcctaggctggagtgcagtggcatgatcttgactcactgcaacctccatctcccgggttcaagcgattctcctgcctcagcctcctgagtagctgggattacaggtacacaccaccacacctggctaatttttgtatttttagtagaggcggggtttcaccacgttggccaggctgatctcgaactcctgacctcaggtgatccacccgcctcagcctcccaaagtgctggaattagaggcatgagccacggtgcccagctgagcaccttttcatatgcctgtttgccatttgtatctcttcttctgagaaatgtttattcaaatcttttgcccatttttaaattgtattattagatttttccctatagcattgtttgagttccttgtatattctggttattaatcccctgtctgatgggtagtttgcagatattttcttccattctgtgggttgtctcttcactttgttgattgctttctttgtcatgtggaagctttttaacttgatgggatcccatttgtccatttttgctttggttgcctgtgcttgaagggtattactcaagaaatgtttgcccagaccaatgtcctggagactttcccctaatgttttcttgtagaagtttcatagtttgaggtcttagatttaagtctttaatccattttgatacgattattctatgtagtgagagatacgggtctagttttattcttctgcatatggatatccagtttttccagcaccatttattgaagagactgtcttttccccagtggatgttcttggcacctttgttaaaaatgagttcacagtaggtgtgtggatttgtttctgggttctctattctgttccatatgtctatgtatctgtttttatgccagtaccatgctgttttggttaatatagctctgtagtgtaatttgaagtcagtaatgtgattcctccagttttgttctttttgcttgggatagctttggctattctgggtcttttgtggttccatataagttttaggatttttttttctatttctgtgaagaatgccattggtattttgataggaattgcattgaatctgcagattgctttgtgcagtatgggcattttaacaatattgattctttcaatccatggacatggaatatatttccttttttgtgtgtcctcttcaatttcttttatcagtgttttgttattttcattatagatatctttcacttctttggttaattcctaggtatttaattttatgtgtggctattgtaaatgggattactttgtaaaatttctttttcagattgctcactgttggcatatagaaatgctactgatttttgtgtgttgagttttttttttttttttttttttttttttttttttttgagacagacctggctctgttgcccaggctagaaagcagtgtgatcttgactcactggaacctctgcttcctgggctcaaggcatcctgccatctgccagcctccctagtagctgggtgtgtgccacaatgcctggctaattttttgcactttttttgagatggtgtttcgtcatgttgctcagactggtcttgaattcctgagcccaagtgatctacccaccttggcctcccaaagtgctgggattacaggcatgagccaccacttctggttctgtgtagattttgtatcctgcaactttactaaatttgttgatcagttcttgttttttttttttttttttttttttttttgagatggagtcttgctctgtcgccaggctggagtgcagtggtgcgatcttggctcattgcaacgtctgcctcctaggttcaagcgattctcctgcctcagcctcccgagtagctgggactacaggcacgctccaccacccccagctaatttttgtatttttagtagagacagggtttcaccatgttggccaggatggtctccacctcttgacctcgtgatccacccacctgggcctcccaaagtgctgggattacaggcgttagccaccatgcccagtgatcagttctaatagatatttttgtgtgtgtgcaattgttagatttttccaaatataagatcatatcatctgcaaacaaggataatttcacttcttcctttcaaatttggatgcattttatttcattctcgtgtctgattgccctagctagaacttccagtactaagttgaataatagtggtaaaaatgggcatttttgttgtgttctagatcatggagaaaaggcttttagttattccccattcagtatgatactagctgtgggtcactgctaatgttttaagtgtgtatttttatagtctttttctgtatagaaagtataattttaataaaaataagatcatgctgaacatactcctttgtagccccttaaaagaaaaacaactcagtggtaatatgcagaggtcctaaatgtctcatgcatgttttctagaaagcagctatgacttgataccattctctttagtcttaatgccacagatgtatagagcttttcacagatgtgaaaatagttttaaatacattattttattattttgtgcccccaccataacccatctacacttctacaaatagtgaacttatttgcttaactgattttctttaccaactaaatcaagaatttctggaggcggtggggaaagcaactatcaaataaactaaattttatacccacataattatatctgtcagaatgcctagtgtatataaagtactcagtacaaatttatagaatgaacaaaaatatgcttgtatagtttttgttttgtcacgactgtaattgttctgttggtaaatttacactactgtctccattgaaattctcatttcaaactagttaagatcacacagtgattaagatcacaaaagaaagaaagaaacattatcatcatcagcatcatcatatgcctcaccattattaaaccctttaatggttctggactttaaggttctgcctgctagttgtagacgtgaattttaagcattgaaattttacccaaacccaaacagctcaaagataagaggaaacttcatcagatattccaatatttcaataagcctgatattttttggtgagccgatttaaaaaattcaggtagcaggccaaatgtgttcatttttatcttgatacttgtcatcatataatctccactttcctatctcttcttcttcatttccatttcctcctaaaccagtcgcagaccagcgcctgtcctcactacttcacacaagctgctctttggtcaggtcacttcatctgattgccaaatctgccagtctttcttcagtccttggcttgtcacttaacagggctgaccacttctactatcttgaaactcttccatcagtgacttctgtaaccccaacttctggttcctctttacctctccattcattgatttattcagcaaaaaatttaactgagtactggtgttaggtgctacagtaaaggaatgcaatcatattaataaagctggtattaattgagtgtcttaccaagtgctagtcaatgattcaaaaatttaaacactttacatgtttacatgtgtgaactactttaatctcactagaacaagggacagcaaaccttttctttaagggccagatagtaaatattttcagctgtacaagccatatggtctgtgttgcaaccactgaacccaacctttgtagcatgcacgtggccatagataatacataatctaaagggtgtggccatgtaccaataaaactttataaaacaagtgactaagtttggtcaggagctgtagattgccaacccctgcactagaatctatctaagttccaccagggcaggaattttggttggtttcaatatagaaaaacaaatgcttagttaatatttaatgaatgaaggctctccttctaagatagaaactatttgaatccccattttataaataagacaaccaaaacacagaggttaagtagcatgcccaatgtgaccaactgaattggcaaatccaggatcaaaacccacatagtttggcattagaacttatattcttaatcactgtactgtacagtggtgacacagagaaggttgttaactgttctctgggaagtgggagtgggagccaggagaggtaattttaactggatcttgaagaatgaagaattcaccaggaagaaaagtagaggagagggagaggctttgcgttctagcatgtggaaactgcaggtataagaaacagatgtctgatacaacatggtattatgagcaaattggcaataaaggaaaaccattgcttagggaatgcactcaattttcagcaattcacatgtctggacacaggttttgaggtggagagtggcagagatgggctaaagaaatatgccgggggccttgtgtgacatgtggatgaatttggattttaacttggtggcagatgggctactgaagtgttttgagcatgagaaagaatgaccatatttgcattttaggtcaatttttaaaattacattttattttaaaattagatgatacatgcatattgtacagccttcaaaagctgaaaaggtcttcttcctgcttgtttccactatccagttctgtcttccaaaggcgcccactgtttccagttagaaagatgactttcggccaggcgcagtggctcacacctgtaatcctagcactttgggaggccaaggcgggtgatcatctgaggtcgggagtttgagaccagcctgaccaacttggagaaaccctgtctctactaaaaatacagaaaattagccaggcatggtggcgcatgcctgtaatcccagctactcgggaggctgaggcaggagaatcactcgaacccgggaggcaaaggttgcagtgagccgagatcaggccactgcactccagcctgggtgacagagcaagactccatctctaaaaaaaaaagaaagaaagaaagaaagaaagaaagatgactttcactgtagtgtgaagaatggatcagtcctggggccataccaatctcttgacagaatgtcacagctctcagatgtctccgacttccagtaatacctccctccctcaccacttctggccttgagatggtatctcagtcactagcctggagggctgtggtatcactatggtttccctctccatgcattcttacattctaaatgggggtaatattgcctctaaaggggtgaaaattagtctgggggagcaaaacaatcttagatatgaaatggtttgttggcctccaaagctcaaccctactcaccaaaattttgtcaagggaaatttaaatttttctcttaggatgaaataaggagataatgacaaaaggttgagcaacactgctctacacgtttgtaaatatttccttgactagatccttttcaaatgactcaggctgaatgtgcacctgtttccgcccaggtacctaactgatccaggagataatggaattcagaggcttgaatggaggatggtgatccatgtggtcatagagaaaaggcagtgtaacatcttgggagtaagtgtggactgctgggattagatcctggctctgccatttactattggctgtgtgactttaacccctcgttgcctctgcaaagtaggggataacaattgtacctgtctcctggttttgctcaggatattgctcagcatatgttagctattgctcaaagactcagatggtagagcatcaaaggaggagggagttttgctggaggttggaagagctaaaggtttagaagtaggattgaggaatgtggagagcgccagtaccactttccatacccatgggttgtggggcatgggaaaatgagtagcatcctttctagaattcagcaatggaatcatgttccttagggattacagttacttttcagttaaggcaaggaatgagccaggaggttaaaagtggaaagaagtttatatacaattgaatgaaagcagggcacagaagaaagatctgggaaggaagaaggtagaaggtggagaggaagcccagagcaggatagcagattggagattagggtaagggagaagagacctccagaggcaggagcaccgcacaagatggctcagactgaacagagcaggaggtggtgaactatggccggatctagccagctgcttatttttgtatagctcgcaaactaagaataatttttacattttaaatgggtttttaaaaatgaatatgagagcatttcatgatacatgaaaatgatatgaagttcaatgtcagtgtccataaataaagtttttttggatcatagccatgcccgctcatttaaacattgtctatggctgcattcccactacaacagcagaaatgagtagttgcaacagagattgtgtggcccacacagtggagactattggccctatctggccctttatagaagtttattgcccaggcacagtggctcatgccactgtaatcccagcactttgggaggctgagatgggcagattgcttgagctgagaagttcaggaccaacctgggtaacatggcaaaaccccatctcttaaaaaaaaaaaaaaaaagaaaaaaattagccaggcatgtcagtgtgcacctgtagtcctagctactcaggaggctgtggtgagaggatcgcttgagcccaggaggtagaggttgtagtgagccttgtgttcataccattgcattccaccctgtctcaaaaaaaaaaaaagaaagaaagaaagaaaatttgctggctcctgttctagcacatcattcatagtctgcaatatgaatggcacctccaggagttgtgcaacacagatgacctggctctaggagcactcagtttggataagtgataaaggattacagtgaggagaagaatggatggaattaaatggcctcaaggctctttttggaatgtagtcacaaagttgttatgttagaaaaaagcaaggctgtcagcctggattcaagccaccacctcttggctggtgaggagctaggtgtggtagacacttctggttgcccacacaatttttgtttctccttttgttccttattaacagaaggctgattttatcaaggtagcaatgtaccctgttaaaaataataatctcaataagaaaagtccccaaagaatgatggggacatgtcaataggacacagagccagcttaaaggggttcctaatggccaatctgggacaattccatgttaaaataaactctgatagtaatgggttgtaacttatcaagtagaataaaaatctttgagtccgtacggaaataaatgaataagtggagaaaggaaagctttccatatggtgcaaggcaaactcatacatggaaagacagaattagaaaattaccatcttattgtttcaggcaaggattatcaatggatgctaaaactagtgggtgaagttttgatgagaaacatgatatttatatcatctcaaagcctctcctcacagattcttattaatttcaaagggtaaaatagggactttatagtagagaaatctgacggatactaccttaccaccttaaccaagttatcaaagctaatatcattagtaacagaacaagtcaaaatagggtagcttctgccatgatgcatcgagaaggttgcagcatcacttctgtggtattctagccaaaaatacctaacctgaatcctgaggaactgtcagacaaacccaaataagggatgttctgcaaagtaactggacttcagttttcaaaaataccaacaacatgaaaggcaaagacagattgaggaactatttcatgttaaagtagactaaaccaacatgacaacgaaatgcaatgtttggtcctggattggttcctggaccagaaaaaaagcttcttctctgttataaaggacattagtgggacaattgacaaaagctgtagattaaataatagccttgtatcagtgttaatattctgattttgatcattgtactgtggttatgtaagagaaagtctttatttttaggaagcacataccaaactagaagtaaatgagcatcacgcatgcatgagagagagagaaagaaaatgataaagtaattgtggtaaatgttagtattgggaaattttgggtgaaaaaatacaagaattctttgtactacttttgcaaattttgtccatttgaaattattccaaagcaaaaagtttaaaaaaatactcattttgccctggtactcatgcagtgatatattcatatacccaatcttggccaatgggttgtaggttttagtccagtgaatagggcttatcagaaaatgattgtttttcctcataaaaagggagagacttggcaaatgccttttgccctttgtccttccccttcctgcttggaataagagcttaatacctggatgtggagcaatcatctatgattatgaggacagaaggagctggaagtagcacgggtcttgatggcttctttgggcatcagccttggactgcctgcctctgaataagaagtctgttagtacactgtagttgggtttctgttacatatagtcaaatccaactccaactgagctagactgtctaaggctcccaatgatgtttacagttttgagtttgtgtggcttgactcctcaatctccttcacaggcagctgcttttggttgcccctcacatgtgggtgttctgcaagtttggtcctcggccttctcctccctctgcggtctgtctacatgggctgcctcatccactcccacttaccatatagactctgatgattcgcaattaccatcttcacctagaattttctcctgatttgcaggctacatattcagctacctagggatatctatgtctatggtccatattcacttcaacagttgcaaagctaaattgccttttcagctacacacacataatcatgcacacatccagcccacaatctaaccactttcccaagccagaaatgcaggagtcatcatcctctcttcttcctacttttttaccccctacatgcaattagtcatctagatcttgatgactgtacctcctaagtagtttctgaatccatctcctcttctccattcccatcaggtaggtgcctcatcatctgtcactggtattttttattaatgttttaaatagtctccctgtctctgtcctttgttcccctaacaaactgctatccattattttctaaaatgcaaatatgatcaccatactctcctatgtaaaaatttcctaccacttcaactgctaatggtaattccccccaaccccgtcccctccccccgactccaattcctactgtgacataacaatgctcataggataacctcttggctgcccttctgtgccatttcttgatgaaggaaggactgttgactgcccctggctgatttattttattcttaggaggcagattctcccaagtctccataaaccagtgatcttcctttggccccaactgtctcttacccacagcaatttgtacctcactttattccatgtcaaaagacctgcagtgttcttttacttgtcacaaaaataaattttatacattgatcaaaatgaagtgttcgggccactctgtgtgataagtgagggttgaacactgcctgaatccagcaaacaccattcatactacacttgatcttaaccaaaaggctgagaagcaataacaaacaccattcatatgatgacattttaatcagttcgtagtagcccaggtaggcaagctccagggatgtttataaggcaacctggccccacattatgagtctcctgtcttggctacttttgagttaagcaatcctgggctcccgggactgattcctccatttcctgaggcaagctgctggggtttgggtggaatatgtgattaagaatctttagtcacagagcaggaaacaagggtacccagctttggaggcaccagccattcaccttttcccttaataaccttccccatcctgttctaccacacctagtattattattatttttttttttttgagatggagtctcactctgtcgcctaggctggagtgcagtggagcgatctcagctcactgcaagctccacctcctgagttcaagcaattctcctgcctcagcctcccgagtagctgggactacaggtgctcaccaccatgcctggctaattttttgtatttttagtagagacggggtttcacggtgttagccaggatgatctcaatctcctgacctcatgatccgcctgccttggcctcccaaagtgctgggattgtaggcatgagccaccgtgcccggcctatttttttttttaaacccagatcaaatggaacctattaaaggtagagttggacattcctcctatgagcagagttagacagtcctcctagagcttctgtggtatttattacactctaatacaattatgtgtttgtatgtccgtttccctgcatttggtttcttttaatagcatccaaatgcaaatctgaccttttttttgtttgtccttctatcagcatacaatagagcctgacatagagaataatcaataagtatatattgattgattaaatgaatggattttttttttttgttccaggtagagtgtagtggaaaaagcctagaccctggtactattcccagttcctctgctaacttgctatgtgaccatagtctctcagcagctccttcacctcatcaatgaagtggagtcagtaccacccactttggaataattgttttgaagattaaaagagttaatgatcatttatccattcaattgtagggatatgctgaatgcttcttatgagccaggcactgtggtaggtactaaggctataacattgtcttttcctcataaagcttttcaatctagcgggaaagacaagtaattaaacaagcatctacaataacatatagtgaaaattggaataggagaagaataaggtcctatgggaacatacaacagggggcccaccttaatcgaggggttaggaagaacctccccaaatggtatgaaagaattgtaaagtactatactcatgtcaggtaggatgttattactatagatgagactgccgttgagctcatagaaggaagccatcacactgtggagagtgaggcttcctggaaaagtggagtgttgagctggacttaacttcctttgatgttgctggctgattttcattaggaagatgtgcccttcgaatggtgtctccaggatcagagatggatctgtcttcatctgtccataccccaactcaccttgttgctataagaaactgagccctccagttcaagaatacaaaccacagagaggggaatactgaagggaaatctaaaaggtcagtgatgtttctaggcaaggcatctgtggaaagctgacttctgccttcaaatgcatctggaatccaaccacctctcaccacctcctctgtaaccccctgtctagaccactctcattggtcactagattgcagagaccttcagactggtcctcctgtttccacccatgccctcttagaatttcttcatgcacattccagctccaaatgtctgtgttcctgctttgggcacattgaggtgaagaagaccagtgatttgccaaggaaagaagggcttgtctgaaagagtcaggaaggaaatttatgctcccttagaagatgagaaaacagagataggggctgctcacctacccctcagtgtcaacttgtagtaggtaaataaacaacaccaaataagtcttcctctgttgtttttatactaaaggattttcagataagccactgctcgttgaccctttcccagcctcccctcctcctcatttcccagacattccctaagttgtctcctggctacaaacttcccatctctctgccccctcatctgtttcccagcctttttctgactcacccttcacagtctcttccagcagtgcacaaacatcctcttgtctatcaaagtcaacttccaaacagtcatcatggtgcaccagactggaggaaggagcaggggagccagcaccctctttggtcagctcctgagtatgctgaatggacactcagcgtgggtttgcagggaggattgttaacttgacccaggcttcggacagggctgcctcctgcaaggatgatctatttcaggttgtggcagttttctcttctttttttctttctttttttttttttttttgtagacagagtcttgctttgttgcccaggctggagtgcagtggcgcgatattggctcactgcaacctccgcctctcaggttcaagggattctcctgcctcagcctcccgagtagctgggactacaggcgtgtgccaccacgcccggctaattttttgtatttttagtagatactgggcttcactgtgttagccaggatggtctcgatctcctgaccttgtgatccactcacctcggcctcccaaagtgctgggattacaggcatgagccaccgcgcccagctggttgtggcatttttcaaatgacagcaaggtaagagacagagacaccatcttttccaaaaccttcatttttttcttccccccaatttttattctgaaaatatttcaaacctacagttaagctgaaagaaaacccccacaaaattaatatattcttcacctagattcagcagttgttaacatttgctttctctgtctgccttttttttcctctctttctcttttgagatagctgtctgcctgtctatgtatgcatgtatccatccatttctgtaagcacacacacaatgtgacaaaccctttgaaagtaaattgcagagaacttgacatatcatcttgaacactctatcatgcatttcctaagaataaggccattatttttcctacatactatgatatgattatcacacttacaagaattaacattagtgcaataatactactacctaaaatatagtccagacttttgtagttgtcccaaaaatgtctttgaacactccccctgccaccctcaaatccaattaaggatcaagaatatcttcttttaacccagaaatttccagggcaataccaagtttggaagaggcaatatggttcccagaaacagggctttgtagctatatacaattgggttcaaatgtcaggtttttcccagctatgtgaccatggacagattatttcactttctcacctcagtttcttcatataatgggaatgctgttacccagtctaaagattttgtaaggatgaagaatgatgtagttttcgtgcttgtcaagtagtaggcactcagggcaagttgctcctctggaaagagaagcagagaagggaactcagttgggttatataaatggctgagaacttgtgtagctaaacaaatgtaagtgagcttactacatcaaggttaagacattttaaaactatttcccctgctcaacgtaagcctgtagcaaatgcctcttgcatatgggaatacaaactttgtgggagcagggatttcctctgtttcattcaatgttttgttcccagtatctgaaacacagctcattagacaacttttgaatgaatgaacaagtgaataaatacatcttactaggtaagttaccacttttatgtaactcaaaaatgtgagcctctactcttcactcccttttctttcttttttttttttgagatggagtctcactctgtcaccaggctggagtacagccgtctggagtgcagtggtgcgatctcggctcactgcaacctccgccccctgggttcaagtgattttcctgactcagcctcccgagtagatgggactacaggcgtgtgccaccacacccagctaatttttgtattttcattagagacagggtttcaccatgttggccaggatggtcttgatctcttgacctcgtgatccacctgtctcagcctcccaaagtgctgggattacaggcgtgagccactgcacccagcctcttcactcccttttctagagttgatttcctctgacataaggtggtgtctctgtccgttattaccacagttattctaacaaattattctgaagctcagttactcaaaacaacaatcatttgttttcatgctcaaaggtctacaggttgggctacaacttggactgagctaggctagctcttggctttgggcttcaagctccaggttggatccagttgtgtttcttatgtccctcaccctccttggaccagtgacatgcaatcttttccctgtatctcattctggggcccaaagtgaagggtgcgggtgtaggggtgtggacatggtctctctaagctgagttgacttttaggtttccctcatcacatagctgcagcatgaatagtcattctcctaacaatttcaataggcggtttttgaacttgctagacagatatatgcatgcacttcacattcccttcccaaagacaaacacgatttcttacaggcattataagctactaggaataagaagggagtgatcacctcttagtggatgttctcttacttcctgaactttctggaagggacttgactaaattcttggccaagagctcttgttctcagttttcatggagataagagcagggagtggtttattctctaagttaaacctgtgtaacaaatcatggtaggatgaagaaaaaacagtgtgactacaacaaacctttacagttcttcttcagccctccatccgcatccaggcttcctcatgccacccaacactgctatgtcttattgcagatgactttgctgctgagactattagacaggaggcactgcagcctatctgtgcatgccccatctgccatcttgtccatgtctccatctacctttgctttcttccattttcctgtccaaggctaatcctgacatctctgttaaaatatcattccagattttcaatataccaaatgactcccattctctcttctctcttcaatctctttctcaccacgtgctgatttctttgtccatttaagcctcttccctctgaaacaaaacaaaacaaacccaaaaaaacctagctgggcatggtagctcatgcctgtaatctcagctacttgggaggctgaggtgggaggattgcttgagcccaggagtttgaggctgcagtgagccatgatcactccagcctggagtgacagagtgagacccccctctataaaaaataaataaataaaaattaagaataccatgcttgatcttgtatctccctctggatttggccatacagagttgtccatgggaatctaactgaaaaaggaagaggactcctatgggaaatggcagttcttgggaaataaagctagttgagaaagaagttgtcagatgagacaaatgtattattgtttgatggtgaaggaaacaaccaacaaagaattagatctaatacatgagttcaggaaggttgctggtcaacatataaaaattaatagtatttatctaagcaataaccacctaataatgtaattaaaaatatgagaggctggatgtgatggcttagacctataatcccagcactttgggaggccaatgtagaaggattgcttgagcttagtagttcaaggctagcccgggcaacatgatgagaccctgtctctattaaaaaaaagagagagaaagagaaaaaaagaaagagagagagagagaaagaaagaaaaagaaagaaaggaaagaaaagagatggagagggagaaagagaaagaaaggaaggaatgaaagaaagaaaagaaagaaagattattaaaaaatatgagaacattcaaaaatggtcatcaaaacccataaagtatgtaggaattagcctaaccaagtgttatgagctgaattatggtcctggtcctccaaatttcataggttgaactcctaacccccaatacctcagaatgtgactatatttggaggtagagtttttacagaggcaattaagttaatgtggggtcattagggtgagccctactccgatatgactggtgtccttataagaagaagtgactaggtacacaagcacacacacagaagaccatgtgaagaatcagggaggagaaagtcatttacaccaaggagagaggtctcagaagaaaccaaccctgccaacaccttgaccttggacttccagcctccagaactgtaagaaaataaatttgtattgtttaagccacccagcctgtggtactttgttatggcagtcctagcaaactgatataccaaaaatatacaagacctctgttgatgtaggtttgaaaactctcagcaagcttctttttcctgtttcttgtcctccctgcctgtgctatttggtccttagccattagatggggcagagcaaggtggccttctgctgggcttggggatgggagctggtgacagagtgaaccaaacaagaaaaggtaaagggttgtagaacagctgtgttctgtatagagtggggtggaaacccaaggaatctatgttatggatgagctttggggaatggcttcctagtttccttttaaattttccttgactaaaatataaaggcacttataggttgtataatccccactccttcctttcttctggtggcaataatacaagtgaaagtgcatttcttctggcacctactttctctttgttacaaggcagggagtcttctcattcaatttggagctgtgttcctgtcactctaaacaaagtagattgctttcctttcctataagcaggggccatctggtgagggggcatttggcttgagcttggagaatgaagcagccactcaggcatcctaccttatgcttgaaatgccattgtcaatgataatgactaatatttattgagcacttattatggtgtcagcactgtttgaagtatatcacatatattacttcattgagtctgccaaccatcctatgagatgtggcactattaatatcaaaccttttttagagataaggaaaactagatacagaaaggttaagtagttggcctaaggtctctcactggcagctagggatggaagcaggattggaacctgggaagcctggctcccaggtctaggctggtgtttactacactgcactgtccctggtatttagaccctacactgggaatttacttctctaaatgtctttttttttgttcagccgtctacaccgagaagttgatagggaaatccattttcagtcattcacactgccgtgtaaattagattctcagatgatttcatatccacttgagagtagattaccaagacactagaagttttgatattgaggagaatgtatttcacacacgaaattaacattcactgggtgccaactgggatttgacaattgttgttttatagaaccctcccaaatggccctgcagggtaagaattaattaccttccttttatgttagaaggaaatgggtgtcttagaggttggagcccaaatctggtccctgggcattctcgatggctgcttgaggccctctgacacttgtggctggctgggaagacacagaggcttctggaggggagtggcaggatgctaaggccaaacgtcatagttttgtgcagttccaggtctaggaaacagctggttttatttagtgaaaataattgctgcaggccagtgtctccctacctctcatggacttttgtggtagggtggaagatgggtatgtagcaatatgttctgtaactgcaatttagtgccacaggcctcctgaatcctccacctcctaagcaggagcattttaatagtcgaggacagagaagagagaactagagctaatttataactttaaaatcttgtattacctttcctacttgcctccagtctttcaaatacatatatcccaaatgcatcaatttctatgcgtcttgaatctggaatctacagcccaccaccccctacacagaccgttcttcgttttgtgaattaactttatctgctgtgcatttcagcttagtctggaaacctctgcttaggattgccagcttcggcttttttcagaggtctaaagaagaggtggttctggcaggtgtaagctctctgatgtttcagcctacaaatatgtgaaccgaagtcatgtcgatttgcatttctggattagcaacagatggtagttatgaactaactgactatctgacagagaggccccattggaagcagtatgggagcagatccaggctctgctgtgcagttatcagttggtctaactcttctttcagaaaatattctctccggaggagaggcctcaaattgcagatccccatctaggcattgaaaaggcagcgtacaaccctccttttgtaggcacctcccaaaataactttcagcaggatatggcttgttatattagttctgtaattttattttccaaatgatgcttgtctttgaagcttggctaggggaactgtagctaagattaaatggggtccaatgttttgtgacaatacttccttagatttacatgacttttaaaaaatagattttttttttaatctcttaaaatctgtgacagagaatattgggattttccatcctgccatttgtttcccatatttgttataagtaatgagcacttcttatttgtcaggccctgcattggcgctggggaagacacaacagtgcgcagaaaccaaccagcctctaattgcaaaaaacttcacagcccagtgaggaggctgacattaatccaaggatcacacaatgcaactacaaaatgtgctaaggaggcaagcgtctggtgctaggagagtgtgtaatttgatatagtctgagaggtcagggtatggatgtgtaagccaatgaggagaacagcctgtgcaaaagccctggactgtgtctggtaccaggacttagccagttagggcgagcagagcaagggaggggtgggcggtggagctgagactggagaggcaagacgtgccagaccatgaggcttttgcaacatttagcccctaggccccacccacaaagattccgattcaactgggagagagggggagagatatgggtagtttttttgttttgttgtgttttgagacagagtctcactctatctcccaggctagagtgcagtggtgtgatctcggctcactgccacctctctgcaacctccacctcccgggttcaagcgattctcctgcctcagcctcccaagtagctgggattacaggcatgtgccaccacgcccagttaattttatatttttagtagagatggggtttctccatgttggtcaggctggtcttgaactcctgacctcaggtgatctgcctgcctcagcctcccaaagtgctgggattacaggtgtgagtcactgtgccaggccagatatgggtagttttttaaagttcctgaggtaaagcatccagggttaagaatcattagcctggacttatttggtccgtattctaagagctgtgggaaaccactgaattgtttgtggcaggacaaacaattcagatgtacatcttgtatcctcaggatgcctgcacatatagacaccgaaaattactagggtgggcccagaaatctgtattactctgctgcacgataatatcagaagcactgtcaacctcagcattgtttgatcaaacaggaagtacatagataaaccccaaaagtagaccactaagatgatcccatttcaattttcttccttccttccttccttccttccttccttccttccttccttccttccttccttctttccttccttcctttgagacagtcttgctctgtcatccaggctggagtgcagtggcacgatctcggctcactgcaagttctgcctcccgggttcatgccattctcctgcctcagcctcctgagtagctgggactccaggtgcccgccaccacgcccggctaattttttgtatttttaggagagacagggtttcaccatgttagccaggatggtctcgatctcctgacctcgtgatctgcccacctcggcctcccaaagtgctgagattacaggcgtaagccaccgcgcccggcctcaattctctttttttaagacaagttcttgctctgtggcccatgctatagtgcagtggcgcagtgaactgtggttgtgccattgctctacagcctcgacttcctaggctcaagtgatccttccacctcggccttctgagtagttgggactacaggtgcatgccaccatgcctggataattttttaattttatttatttatttttttgtagagatggattcccactatatttctcagggtggtattgaactcctgggctcaagtgatcctttcgccttggcttcccaaaatgtcaggattataggtgtgagccactgtgcccagccttcaatttttttttttttttgctttatctttctactattacttccaatcttcccattcttgctcagaccctctacttggagtggtaaagaaggcctggttgtgtgctccttactacaccctgtggcttcaaaacttggaagacttgttttatactgaggcagtttccaaaaagcactactttcagcaacagcatcacttcatatttactgtgcacaatgggcagagtaaatgaaagaaattactttaatacatgagtgagccagaatatgtatgtataggcccatgaacaagaagatagcattaatacttgagaaagtgtcttttaggaaggatgtattcaggattttctctccttacactgccagattcccagagaccagacctaacacctacctccacatcactcatttattcaaattcctgaaacatcaatgattccaaagtaaattaaccaggcattttggtggtctctgcaatattggacactttagttaggattctttgcatcttcagagcactagttacacagacactgtaaactctctagggtgataaggaggaacaaagggcaccgaatgctttcttctttgtgtggatacggaaactgagtggttaagtgacttccttagatgactttttagaaggggcatcggagtggagaagggaagtcagggactctgggcttcaacacacggctccggccatttggcctgataagcattcatctttaaagacctgaagatggtgaacttttttgaatgacttgtcagacagatggagtgatggcttccagccatggaactcacttatcgtggatgtctgtcagggttaaaagttctatttgcaggcctctcccatcaggttgtttttttgtgtgtgttctatcccccactagtatggatcctaactggcttggttggcttggataatggcattcatcttctgctccctggggcatcagatcacagaggggtaaaggtgtgggcactatgccagagcataagctcaggaatagtgctagctaagagcaatttctgttgacttatctagaaatcacgccctagcatccattaggatgccagtgtatttttctagggcagcaaattgaccaaataaccatacaaacctgcttcctccctgtttccattttcttgcaatgttgtttttccatccactagggatgaatgaaatatcctctcaagtagatctctaaataaataaaaatagaataggaaatccatgtagtgcttactctgtgccaagatctcttcaaagtgccttacatacattcttaactcatttaatccttacaattgcccctctgagatgggtaccattactatccctgttttacagacggaggcacagagaagttaaattatttgttcaggatcacacaactagtaagcaatatagctgaaatttggatctaggcagtttgattccagacttggtgttcccagttacttccctaattatcctctttataaagggtaaattaaactgaaatttcattgggctgatcaatgcggaactgtaaaaaaataaatgaataaatacactgagattccaatcttaacttcgctatacatatatctacaacaggttatcatactgaccacagcaaaaaattcatttggatgtttctagtgcaactagaaagtgcactgcttgagggcaggggcctctaagtcctccttgtagacctaataccttacatatagtaaaagctcactaagtatcccttgaatgttatgcaaaagcatttggaaaactgtgaaatactgtgaaatattactacacatgtttacatatacctatatctctaagccaagcaggactacctataattagtatctctaccatttcctcccccccccccctccccgctctctctctctctcatgcatgtttttttgtttgggtttgcttgtttggttgggttttttttgagatgaagtcttgctctgttgcccaggctggggtgcaatggctcgatctcggctcagtgcaacctctgcttcccgggttcaagtgattctcctgcgtcagcctcccaagcagctgtgaatacaggtatgcaccaccacatctggctaattttttgtatttttagtagagatggggtttcaccatgttggccaggctgatctcaaactcatgacctcaagtgatccgcctgcctcggcctcccaaagtgctgggattacaggcatgagccaccatgccctgccttataatgcatgctttgtacagacattcctcaacccaccaagctttgcaattattccttagttgccccttatggcagctgtatgtagcagaatatacccagcaatagtggcgggcaagtctcaatttgctgatgtactcccctctgcccttccttcctcccctttctcaacagcttggaatagtccatgctttgaaaaaaaaaaatttaacttaaaaattattttcagtgattacaaaacagttaaatcactttaaaacaaccccactgtcattactgcattaattggcaatgatttgaaatataaggaatacagaactttcaagcatttaagaaagggactctcttatcaacatgatttctcttcaaacttatgtttcaaatggaattccagtctttatttatttatttattttttgagaccaagtctcactctgtcaccctggccagagtgcagtgatgcaatctcggctcattgcaacttccgcctcccatgttcaagcaatccttgtgcctcagactattgagtagctaggattacaggtgtgtgtcaccatgactggctaatttttgtatttttagtagagatggggttttgctatgttggccagctggtcttgagctcctggcctcaagtgatccacccgcctcagcctcccatagtgctgggattataggtgtgagccaccgtgcttggctggaattccagtatttataaaattaattttataaccaaagccaggactgggcacaatggctcatgcctataatctgagcactttgggaggccaaggcaggaggattgcctgaggtcaggacctcgagaccagcctgggctacatagtgagaccctgtctctaaaaaataaaaaataataataactaaaaaagaaaaaaaatacccgaatccagtttttgttgtttatgcagccatttgtaagtggatcaacccacttgagaaggaaccagatttttgctagtacgtggtgtatgtatgaccatgagcctcatgtttgtattgtccaggatgatcattataaccagccatctcttacatcagttaacagtgcccccactgaaaacttggctcttagggctctggccccagaccttagaaggaactgacctcaaccctgtgaagctgtgagagccaggaagttacctgagcaggatggtgggtggttccatggcctgaatgtctttgtcccccaaccccaacatttatatgttgaaatcctaatccccatgttaatggttaggaggtgaggcctctgggagatgatcaggtcatgagagtggaatcctcatgaatgggattagtgcccttataaagagaccccagagggctaggcttaccccttctaccatgtgaggatgcagagagaacaggaaatggaccctcaccagaatcttctggtaccttgatcctggacttcctggcctccagaactgtgagaaataaatttcaggtgtttataagccacctggtccatgttattttcctatggctgtccaaacaaactaatacaagtgggctccaggattaaacttcatctgctctatgctgcctgcttcatgcccccagagataacagtggcaccatcccgaggctattggagagctgtgagaaatggaacacagccagcaacaggggagacaagcacagacaggtaggcctgacacctttcagacttggaagtgtcagccagcagagaccaacatcttctcagctaaaaggtcaaacttgctccagaaagcttgaagacttcccaggtatgatcttaagacttcatctggctgggcacggtggctcatgccagtaatcttaacactttgggaggccgaggcaggaggactgcttgaggccagaagttcaagaccagcctgggcaacatagcaagaccccatctctacaaaaaattaaattagccagatgtgtgcgtgcctatagttttagctactggggatgctgaggcaggaggatcacttcagcccagcaggtgaaggttccagtgaactagggttgtaccactgcactccagcctgggtgatagagtgacaccctgtctaaaaaaaaaaagacttcattccagctgtgtctgtctcatccataccctgcctctgatttccccttgctcattaactacagacaaccacattagtctgtgcctctctgatttttgcctgcttgtttgtgacagttttgggtcagccctgaggcttccactcagagatctttagtcctctgcccatgccttttgctccaatgtatataccatcacgattttacatttacataggctaatttatgacagccagtacttatgtagcatttactttgtgtcaggcacttttgtaagcacaaaattatgtttacttagaacagaggaaagtcatgtttccttagaccagtacaccaatcctggacagcttgttaattacagaaatcccagagtttctgatttaataggtctggagtggtgcttaagaatttgtgtttataacagtgttgatgcttctggtccaggcaccatactttgagaacctgtgttacagaatgtcagataacctgtaggtgggcttgttagaaaatgctcttgtatgacattggaaaggcatgcagtaatctttttgctttactttcaacttggatggttttccttaacaaaggaaaagctgaactgaactattcattacagttctctttcaagggttggatattgatagatcatagcactctggaactggaatatcaggtgtttcttagggacttcagcagttggactttagagtggagggagaggctagggaaatgcaccaccataggtgagtacctgctgtgtgtcaggcactgtattgggcacttggctgccataattatctcatggagtcaatcacccagtggtgttggtattattctcccattttgcagatgaggaaaccatgaccgtggcttagagggcagagggtctccagcagagcttcccaactggtatgttggaatgcgtaatgaatgtatgctgagctattgatctcagtgctagtggtgctgggatggggcccaaggtgcctggagcaccctgcccctgtcagtttacccccagggtactctggccacaggacagaccctcagtgagctcaggtccaggggtagacactgctcctccatcctctgacactcacagctctgtgagtgaggggcaggactcaaggagtcctcgggagcctgctcatggtcacaggcagtgttcctggaggtggaagacactcaggattaaggctgaggggctacactggcaaaaacctcctgggtacctttggggaaagaagactccctttcagttatggaaacaaaagttctctgatgatgcttatgcaccacaccttaggctacagctaagacaaggcaaaacaggaccctcagtcattccagctccataaagctgcctctcagtgaggacgaaaggttatcagactttgtccttggtgaactgtgacagaagtgaagatttatgacccatactttaatagtttcttgattggatgattagagctccctatatctttatctgctagctaagtagtttggtgtctgcacaaggcccaaatgctgtagtcagactcctggagagtcaatggccatatatgttgggggaaagcttaagtaactcaattgactttcagttgttgaaagcattgattttttttaattgcacttatggcttaagacccaaaatagctttggacgatagagcagaggttgcactattagttctgtagtcaattcttgacatattctgccctctaaaagggccagttactacatcggttactatattaggagcttccagttcaggcctaagattttcattgatatgacttaaggacaattgatgcttagattcttccattgagaaggtaacttcaggagattctcatgtctccaccaaggtttcaggagatactctgcacaaataagacatgactggggaggtttgcagcctcttctgttttgaatgtgatctgtgatctgctggccttttctgtttccctagggacttttgctctcagaaactttctaccagcttgtgctgtggggaaaggaaggcattttccagggagaccagtcattcttcatgtttgtatagtgctttccagtctttagtgttacagagaacattaaaatattttaggctaatcctgcttttaaaaatgaagaattgaggtctaaggaggctaagtgattatctgaaatgtcacaacaagaggcagggcccatgattataaatccagggttcttgccaggatgcaagactaatctatttatgggtaggggatacaggctccactaggtccattgagagacgctcttattaagtttatacaggtatgttacttctctgctatcttcatgtgtaggattggggtggggagacaaggtcacactcaaatgagagtgtgggagaacaaccacagctcccctgcctctcctgtggcaggtccgagaaggctatggagaggtgctccttttcccatcatctccccaatttggaaaggagttcaggaaaccaaagctaatggaatcaatgttaaatagattcgctctttcattggcttaagtggtccagctgaagaaatgtttgggaacaagataccagagaggcaaggtacttacacaattaaaatataaagaatttaaagactgtgactgagtggtctttttgaggtgactcttaaatgaagggcagccatatgtactgacaaggtaaaaccagagctagacagtaattgaagtggtaaaaacaggtttctgtttatgactatctcactaggggaaaagagatcacagtgtagacctggattcacttctgaatacagtgtgggcaagtgggaatttatagccaggagcagggtgggggttggcgggtgggataagggagactctagcttaacaggatttttgctgaagacagggcagggtgatcacacatcacctggggatggtggaggatgaggaacccaatcagatatggagagggatcagatatggagggtgggggattctggctaaaccaatttagccgggttcttgctaaacttgtctttacaaggaagtgtacagataaatgtaggagaagattcaggagcctgactaaagtttggtcaaacaaagcatctttgtcagatcaaatctgggaaagcaagaatttaaaggctggccggcgttcgttttgacccaaacacataggccatagtactagcactgattacatagatcaaccctggagaagaaaggagagcatttaatagcttcccgtgaatgagttctgtaagggtttacagaacatgtactgtgtgttccaggtgtggatgtacagacatgaatgaggcctcatggcccagtctctatgagttctcagtgcaacaaagagatgagaacatgtgagctggaggggaggtggtagcagggtgagagctggtactgtgagctcagtgggggttgagagtgagtagggctgtcccctggggcagggcaacagtgatctcattacatctgcagcccacagggctcagttctgctgtggtctcagagggatcaccctatagcatctcttggattcactcttccctgtaaatggatgtcaggttcataaaggcactcagttgggttacatgagtcagtaggctttaccccataccccctcccatgctcagaatctaagacattgttttagatatcacattttcagccaaatgtcaatatgcctggtctgacatctgaagataatttgaaatcaatggcaataattttcccatccttggaagtatggttttagccattgttacctaaaaggtcttgcttaaatcaacctccatccaaagtctctttaataagaaaagtagctgacattttttgatcacttactctgtgacaggcattatatatgcattagctcatttaatcttcccaacatccctatggataagtcctattattacccccgttttacaggtaagtaactgaggctaagaggatatatgagtagctgaaaatcacacaagggggaggtgctgagtgggaatttgtaactcctgagcccatgctttgagttcaagctgcttatcaccacattaaactgggtctttacctgaaataatgcaacacccaaagcaacttcatgtttcagggattctcagaggagtagaaggggcttctcagccttgcagaagggtgaagcttggagggaattatgcttaccataatgtttattatatactttatagtttgaaaatgataataataaagattctcatacagtcttcgtgaagggaaggcacacatccataatgtccgaggtgggagaagccacaggccaattgtagtacatccctgggtgtcattaaaggaaaggcagcaatgaagtggagaatagtttccctatctatgaggtgggaggaataacagtatggcatctcgctctgtcaccaggttggagtgcagtggtgctgtgtctggagtttgttcctgccgttgggtttgtggtcttgctgacttcaagaatgaagccacggaccttcacggtgagtgttatagctctttttttttttttttttttttttttttgagacagagtctggctctgtcgcccaggctggagtgcagtggcgccatctcggctcactgcaagctccgcctcctgggttcacgccattctcctgcctcagcctcccgagtagctgggactataggcgcccgccaccaagcccagctaatttttttatgtgtttttagtagagacggggtttcaccgtgttagccaggatggtctcaagctcctgacctcatgatccgcctgcctcggcctcccaaagtgctgggattacaggcgtgagccacggcgcccggccatgttatagctcttaaaggtggcacggacccaaagagtgagcagcagcaagatttattgtgaagagcgaaagaacaaagcttccacagcgtagaaaaggaacacagcgggttgccgatgctggctggagtggccagcttttattctcttattggcccttccggtattccctttctgtcctactagagtgtcctttttttcaatcctccctgcaattggctacttttaggatcctgctgatgggtgcattttacagagcgctgattggtgcattttactgagcgctgattggcgcatttcacaatgctcttgctagctacagagcgctgatcggtgtgtttttacagagcgctgactggtgcattttacaatccccttgctaagacagaaaagttcttcaagtacccacttgacccaggaagtccatctggcttcacctctcattgagatcttggctcactgcaacctccacctcccaggttcaaaagattctcctgcttcagcctcccgagtagctgggactacaggtgcctgccacaatgcctggctaatttttgtatttttagtagagatggggtttcaccatgttggccaggatggtctccatctcttgacctcgtgatctgcccacctcggcctcccaaagtgctgggattacaggcgtgagccaccgcacccagccctttgtctatattttaaaagatatagatcgaacttcaaataattttgatgcccgttatggggccttttcaggctctgcctcagacatctctcttgcttgcttttggggagagccctttctgagtttaatggcttcagtaactggaaagggggtcagcttatttccctcgagatgtaaatgaagcccttgagacctggacacctacattggcccatttcgaggtggttgttttttaggactcctttgtctaatgatagtgggaaggttttagaccacccggagaaggcaggtgggaggggattggtctccagaaaccatctagaaagagggccccaccctcctgtgatcctttctaagaagactggcaaggctgaagaatcctggtcgcttcctcttgtatgttgtttgcttatctcctttccatttcctttagagattagcggtaaaacacaagcaagcacttttgagaaacaggctgacctaataccattatttattttcctcggatctgacatccagagagatggtgctagtcctcacagtcacatagaaaattaggatgtaggctcatacctgtaatcccagcacttggaaggctgaggcaagaggatgagttgaggccaggaacttaaggatgcagtgagctatgatggagccactgcattccagcctgggtgacagagcaagaatccatctctaaaaaaaaaaaaaaagaaaagaaaagaaagaaaattagaatctgatctagagattcaaacacaagttttccaaggtttgtccttgtacactttccacactagaccacttgcatctcaacagagcacttctggacatcatggttaccagctctggatgtagagctagacagatctgagtttgaatcccttttatgggttgcatgacagtggaacctttcatgactctgttaaaacctcagccccccacccccaaccccaaactcctgtaaatgtggggactgaaggaggtgatctacttaaaagcttagcacaggtagagcctggtagaaagcaagtcttgaggagatgtcagctgttcatattcttttttgtaagtaattcaaagaacaaagaagtgtattttgggatttaggggggtggaatctgatggtttttcaagtccacatccagggagtttactgccttctcacctcatttggaagatgctcagaaccatcctgactcggaacgatcctatggaaaacttgaagtgtttctgcagcacataaaatcctggcaaatatgtagcaataacacctgggttaaggaagctggactccttgatatacctttccaaccaacggaggtggcatagtcaccaagaaaagggaagtgtctatgtggcagccttgtgtcccactgcgtgagacttctgtgttggagggtggctaggctggagccagtcatggtgtgcagttccacacacaagtcattgcacttaagaagacctagtttgccgggaaaaggttttactcagcagatgaaaaggagcagaaccgcccatgttgcttactgcctcagggaaaattgcccagtccaggagcccattaggaggctgtagctccgacatccccaggtgctggccagtaagtaggtttcctggactgtctctaacctggtttataaaggaagtcagccctctggaatttctgacaggtttacaaacacccaggttcaggcagggtagagaagcatgctgggcagcaaggagtccttgtcttgctgagagaatttgcagaccaggagtaaagagaaaactccatccctggcacacacaggaagcttgcatctgacaacaggaaggctggaacgccacttggatttgctcaaggagggtacaagcatctcctgctcattgtctcctttgttatgaatgtatgtaggggatcagcccaaacaacctgaaaagagataggattctgtacccatataggccacatgtccaggctcaggtacatgtggggatacaggctccagggaggctgacttgcattcggtgcctgtctgggcttttctctaaactgtgagacaagagacaacagtgggacaaggcaacagcgggaacccacctggctccttctaattgcgtttattacaaacgagatgagtgatgagttcaagttataagaagtagacttggaagacagacaaggatgaaggttcccttttaactcttttctgacaaacacacgcttaatagttaggactgatgcaaagatcccacccttttctccccccctcccgttttccgggccctgagtagttggaggaagagtctacaaagccagattatttttagcctttgaggcgaggctgattcacccctcccctcgccccttcctttgaaacgcacagtcctttttattccctggcccagccagggcacccgagttctctcgggagctgcccttgagcaaagcttgctcaaagctgctccatcagcaggttgtcagcccggggtccagcgaggagtatggaggaggagctgacctgctagtatgaagggtttaaaggaacttaaggccgcatgtggtggctcacgcctgtaatcccagcactttgggaggccgaggcaggctgatcaccggaggtcaggagtttgagaccagtctggccaacatggcaaaaccttgtctctactaaaaatacaaaaattagctgggtgtgatggtccatgcctgtaatcccagctactagggaggctgaggcaggagaattgcttgaacccggaaggcagaggttgcagtgagccgagattgtgccactgcactgcagcctgggcaacagagcaagaatccttctcaaaaattaaaaaaatcaaaaagtaagagaataaaggaacttaagtacccgccagttcactcgttcatccaatcatcggtataggcaggatcctgtgcaacattcagaggggagagggagaacgaatcagtggggtgttatatccaaggaataattgattgctcagctagacacagaaataccctttctgtgatgaaaaatgccctgtaccacagttttcatgactacttaagaagggatggtgtctcttaaaaaaatgattgagaaatatttcaaacgtgaaaaagtgcagagtgcattataactcataggtatggactccgaacacccctatttaacttttggctttattgaattgacttacaaatgttttaaggaataaaaccttaaaaatatcagttgaagccctcctgtgctctctccccattctcctaccgcattcgaggggccgtgtatctttctagtccttcacaagtagtctcaaagcagcaaaaggaatggaaacttgtaaattagctacttccattaaaaacactcctttaacttctttttttttttcaattaataacaattatagaaacgggccttgctctgttgcccaggctggtctttaactcctgggctcaagtgattcttccacctcggcctcccaaagtgctgggattgtggcatgagccatcatgcctgccccactttaacttcttcctcttctccaggttggaagcatcctcatcttcaccaccactgtcgccaccattatcagttcccatagaactatcttctagccaccactgattacaatgcaatttccaagtcatagagccctggaatgggtccagaatgggcctttaaaatcacagtggagaggccgggtgcggtggctcatgcctgtaatcccagcactttgggaagccgaggtgggtggatcacttgaggtcagtagtttgagaatagcctggccaacatggtgaaaccttgtctctactaaaaatataaaaattccaaaaaaacaaaagtaagccaggctcggtggctcacacctataattcaagcactttgggaggccgagttgagaccatcctggccaacttggcgaaaccctgtctctactaaaagtacaaaaatgagccaggcatggtggtgggcgcctgtaatcccagctactcgggaggctgaagcaggagaattgcttgaacctgggaggcagaggttgcggtgagccaagatcgcaccacttcctccagtctggcaacagagcaagagtccatctaaaaaaaaaccacagtggagaaacagagaccccaacaggtggggtatctgcatattgacagcatgtatactcaggttcagaagctgggaaggagctatgtgactgcctagaggtccagcactcctggcacagacagggtgctccataaactctaacagcatgattgtccctgtcaaatcctgcccacagtgcacatgtggttagtgccccgaacttcatcctaaccaatgaaaatatatcaggaagtgttcatcttgttacttaatataatgaatgggacatttcacataacttcctaactatgaaaaagtctgcttgggatctttaaaacagttaagttggacagaaagttttcaagagaaagtgttagctaggcaatatgacacacacacttgccccctaaaactaaagaaaaaagagtattagaacctataatcaaacaatgtttcgtgtagtctaataaaatgccaagaagctagctgccctggggtggtacctcccaggaatccaggctgggcagagggccacttggaaggaggtgggggatagagcacagggcagacagatttttaagcccacctgagaagtgacttcatactgtgactgttggctggctagtcatagtgagatctaatgcagaatgggtgttggacactgcattacatatacacattcactatatcctcctaacctgtgaaccaggaactattgcatcaccatgtacagatgaggataccaaggcccagaaagcttaaggaacttgtccaaggtcacacagctaaggaaatggtggggctgaggttctgtaacaggctagtgaccccaaggcccatgtctttttttttttttttttttttgatgtatataacctgggagcagtggcgtgcgccaatagtcccagctactctagaggctgaggcatgattgggcaacataaggagacctctgtctttaaaaataaagaaataaataatttaaattgaggtataatctacataaagtaaaattcactttgttttggcagtgtacaattctatgaggattgacaagtgaaataccaccatgataaagatacagaacagctccatcaccctcaaaaattcccttgcgtccttttgtaatcaatcccttccttctaatttttttttttttttttttggaaacggagtctccctctgtcacccaggctggaatgcagtggcgcaatcttggctcactgactgcaacctccgtctccccaggttcaagcgattctcctgcctcagcctcccaagtaggtggaactgcaggcatgcaccactacacctggctaatttttgtatttttggtagagacagggtttcaccatgttggccaggctggtctcaaactcctgacctcacgtgatcctcctgcctcgactgcccaaagcgctgggattacaggtgtgagccactgcacccagcctcgatcccttccttctatttgcccctgccccctgtatacgcagcgatcagttttctgtttactttttctagaatgttatacaaatggaatcatacagccctttgagactattttctttcatttagcaaaatctgcatacatccatcttttgttcctttttgttgcagagaaatattacgttgtatggatgtaccactgtttgtttatccattcttcaggtgaaggacatgtgggttgtgcccagcgcgggctgaataaaggtgggtaaacatttgtgcaggttttcatgtgaatgtagcttttcatttctcttgagtaagtacctaggagtgggattgcacagctcatgcttctagctagccttcaggatgttgtataactaagtagatactcaggactttggtagatgtcaacagctccctgctgccagagaaggacatggagaaaaggaggtttttttttttttccccacacactttcgaaaaattcagaaataactttttgttccagcgttcacatttttaatatatcaaaatgataagtttataacttataaaacagttagttttgagcttaaaatgtgaattttgatctgtgatgagtgctgaaaactgaaacactactttttttgtttttttttttttaactatttgcagtcttaattttcccactccagataaaactcaacctttaccatgcatgacacatatctttctggatgttttctgtcgctttgaaaacgactacggtcagaccttggtactcaaacagaagaagatgtagatgagttctttccttctctttagaattctgctctttcctctcgggtttattttaactcgaatcccatctttctcccactttcccaaccccctcccttattctcacctatcatctgctttggaagagggagctggattctcaaattgaagactccttgctatatttggttaaaatctcgatgttgggttgagggcacttagacatcagccaaaccacgtcaccccactttgagtcctgatgtgtgtatgtaagaagcgtgtgaaacatcccacttctaatgaaacttatcttcccatttttgcatggtgagtcagtggtcctcccacaagatgagttctagtgaatcaacaaagtgaaacgggatttagtgaaaagaattcacctgttatgcctatccactgtagatagagggatcatctcctcctccttctatgggttgcatgaggacttctcagagtcaatgtctgactggttacaagagaaaaggttcatgtgcagcaccaacagaggacgggatctaaggagacccacaccactgtgccctactgggtcactttcagaagccaagtgatatcttttgagattcctaagtaccttagctgaggcacctataataaaagacaagttaacaagaaagaagcatattcaggccaggtgcagtggctcacgcctgtaatcccagcactttgggaggctgaagcatgtgggtcacctgaggtcaggagttcaagaccaccctggccaacatagtgaaaccccatctctactaaaaatacaaaaaaaattagctgggcatggtggtgagcatctgtagccccagctacttgggaggctaaggcaagagaatcacttgaaccctggagacagaggttgcagtgagccgagatcacaccactgcactacagcctgggcgacagagcgagactccatctcaaacaaataaataaacaaataaaaataagcatattaacttatttaatatatttgatgtagcatgcggccttcagaaatgaagaaccggctgagcgtggtggctcatgcctataatcctagcactttgggaggctgaggcaggcagatcacctgacgtcaggagtttgagaccagcctggccaacatgatgaaaccccgactctactaaaaatacaaaattagctgggcgtggtggcacttgcctgttgtcccagctactcgggaggctgaggcaggagaattgtttgaacttgggaggtggaggttgcagtgaaccgagatcacaccacttcactccagcctgggcaacacagcaagactccatctcaaaacaaacaaacaaacaaaaaaatgaagaaccacgaaagagggaagcttgtgtggtttttttttttttttttttttttttttgagatggagtgttgctctgtcacccaggtggagtgcagtggcgcgatctcagctcactgcaacctctacctcccaggttcaagcgattctcctggctcaacctcccgagtagctggggctacaggcgagcgccaccacgcctggctaatttttgtatttttagtagagacaaggtttcaccatgttggccaggctggccttgaactcctgaccccaggagatctgcccgccttggcctacaaagtgctgggattacaagtgtgagccactgcacccagtcaagcttgtgtttttttatgtttaggtttgatgaagagtggacagtcactgagaggtatgattggacaaaggggatatgacctaatagtaatcaactggggggaatttagcaagattcgtttgttcaaattcttctctgtgtctctgtgtcttcagggataaggacatttctttccttcaggcatagggagggcacctctgaaattagggtatttatttacttattttgtgacagagtctcactctgttgcccaggctggagtacagtgctcactgcaactctgccttcctggctcaagtgatcctcccaccttgccaccatgctcagctaattgtttaacatttttatagagatgaggtctcacgatgttacccaggttggtcttgaactcctgggctcaagtgatcctcccacctcgacctcccatagtgcaagctgcctcgtctggcctgaatgagggttttatgacctatcaactactttttttttaagacgagattttgctttggtgcctaggctggagtggagtggcaccatcaaagctgcaatgtgcagccttgaccgtatgggctcaaacaatcctccaaccttagcctccggagtagctgggaccatagatgtgcaccaccatgcttggctaattttttgatttttttgcagagtcagggtctcactatgttgcccaggctggtcttgaattcacggcctcaagcagtcctcctgtcttggcctcccaaaatgctgggattacaggcgtgagccactgcacctggtccttatgacctactttaggggaatgtaagcacatccttttccggtctgtttcaggggagaaggtcaagaaaaggtcagagagaccttccagcttctgctgttttctcaaatgccaaggtgccatattttggggtagtgtgttctgaaccccatcacaataaaatgatgagttattgcgttggccacccctacgcagaaccttctgagaagatttatgaaatgcatctcaggaacatcctagggttgggggagaggaaatggggaagcatttatcctttgctcccaggcccccatgggcaaagattgccccataggcatcaatacacctgtatttgccttgtctagggcagggtgtggggaaagccaggggcatgatccttacataagcttgttggttacataatgtcacttcaacaatgcctggtatcttgctgaagaaatggcaaactatttttaacctcttgggacttgcatcctgggacttgccttcctatagccctggctataaaactctaggtggcccaatgtaaggctggtaagaatggtggttgtggaatttctatttgaaaggagccttggggcagccatctgtttgggacttggcgtaggctgtgaagaacagacattgtgtttacttagattgtatgtgtatttagcgcatgctgaaggaatatgaggggttgttagctgtgaacacagccaccaagagcaagacctgtgggcacggtggctcatgcctctaatcccagcactttgggaggctgaggtggatggactacttcagcctaggagttcgagatcagcttgggcaacacagactccatctctattttttttcacttctttttttgagatggggtctcactgtgttgcccaggctggaatgtggtcatgcgatcttggctcaccacagctccaacctcctgggctcaagcaatcctcccacctgagcctcccaagtagctgggactataggcatgtgccaccacacctatctaatttttgtattttttttttttgtagagatagcatctcactatgttgcccagtctggtctcgaactcctgggctcaagccatcctcccatcttagcctctcaaagtgccaggattataggcatgagccatcatgtctggcccatctcaatttttgagaaaataaattaaaaacaaaaagggtaaggttcttcttgagcacattctgcctgaggtagcccagaatcttcaaggctttccacgcctgattgctccttacaaaatggtgccgagtatttggctgggctctctctctttcttatccagtgtgccaatctctcctgcccacgccctcactggggtgaagggtgaaggtaagcaaagaagaaatcctgtcccagcacaggagctgtaaatgaggtctcaattgccaaggcttcagggaaatgtcttcagccccctaagtatgtgaaactcccgagttccaagtggtgtgatccaagcacaacagtaagactggcagttacacagtgtcttctggtgccaagttttcagactggggagccacagcggtcacatgcgtcatcttactcaatcagccctcttagacctgcaagaaaggtgacttgttcagtatgtggtttgtatactttatccatgtcttggcttgaaaagtagtcgtgaattaccatgtatctacaatcctcagctattgtctcttgaaccatggtttccctcctggtaaacatctttttcaatcaccccctttgactccccagttgttctgacctgaggaaaggtgggggaggcagagtgatgaagagaatcacctggtatgtcctggctttatggctttgctcatgtgcctctcccctttcgttttccctccccagctctgctcctagccagcaaactcccctcattctctaagccttacttttccagggcagctgtccactccagttcccaggggccaccttctctgaaaacatggcacttctctgctcaacgcacttggccatgaatcagttgagcctgatggaagctctggtcttgtcatttatctttccaggcacttctaccttatctttgtccctctcccacaccctctagtagattgtaagctcctcgaatttgctttaatttgtgacctccacaggtcctaattcagtgtcttagacataagaggaatcaataaatgaacagaaaaaaggtacatgacaatctggggaaggacactctgatggcccctgtctccactgggtcttaaacatgtttgagaaattggctgatctctagcatccaataatgaacactgtaccagtgcttgtcaagtttgcttgctaccatcttccttcctttcacaccatgattgaataccctatctgacatgcagtcattaagagtgtgaacttcagagagagaccaccttggttcaaatcccagctcttctgtgtgaccttgggcaagtgacttaagctctctgagcttcatttttctcatttgtaaaatggggataataataatagtggtggcctcttagggttgtcatgcagataagatgaggtaattcacagaaagcatttggcagtgtgagttctcagagaaatatggtttttggctgtctgtggggagctcaccatccaacaggaaaatacacattaatgcaactatgtgttttaagttggatgccctcagaaactgatctgatgatacagatttgagtgcaaatcgtgtatttgagaggcgaccccaggaggcacaggtaagaaagaggggaagtgagacagtacaggatacgttaatgagcaggttcccactgtgggccctcaggttcattcctgctggggacctctgggagactgcagagagaaacctcagagttgtctctcctcttgccaagggcaagaaagttggggtctttttcatcacctcctgttactcattgcttgagggttgctcccaaagggtttcctcccctgtgctttcaggacagtctccccaggcagccaaagacagttcttagaccatgagtcaaagatacttgcagaagaaagcctggggtcagggtcatggtcccactggaccctgtgctggggggaatctctggatggggcatcgactgtgacagcccttgttctgagttctgctgttatccataagagttggtggagaaaaattgtaacctttctgaggttgttcaaggggaaggtttaggtatgggagcatatgcttctgaagaaaaccctgctgcctctttaacgacttgattgtcaagtggcatctctgaaatctcagcgcccaccaagctctttcagcactgagggtcagctctggaagtgcagagactgttgcctgcactcgctcgaggggagggccccaccctcattatctcactgggattttatgaccctgctgtgtgagcagcagtgcacagctggggcaggaaagagcaacctcacagattcaaaaaggataatgctgcttcccgcaccttccccacttttcaaaactggaaatagcagaggcaaggggaaaaaatgtgcagaaagcacagcaaattgggggaaaagctgttgcagttttgcctttgtatgttcctcattaaggtttgcctttttcctgccatgattgtctccagaacttatggttgaaaggaaatgggcttgtgagtaaagctggagagaaatcaagaagttatactgaaatagtagtggcaaaaaaaaaaaaaaaagatgaagtcaagaagtattcgttattccacagggagatttagggggcccatgggggtctcatagcaagtgtgacttctagacatagccagaccaggaagtacaagacaaagtgacttaaaggtgcttgtaagaaacccccaggctcacaattcttcacacctcatactcacacctacatcttttccctcctggttcatttaaagcttattttagcttttagttttaggtaatttcatacctgcagttttgatttttatttatttttatttacgttttgtttctcagagacagagtctcattttgttgcctaggctgctcttgaactcctggcctgaagtgattctcccaccttggcctcccaaagtgttggtattacaggtgtgtaccactgcgccaggcctgatgttttacattcatctttgcctctatccgtgagtgtactgggttgagtagtgtctccccaaaattcatgtccacacagaaccccagaaagtggtcttatttggagataaggtcttgcaaatttgttaggtgggtgcaaaagtaattgcagtttttgccattgaaagtaattgcaaaaaccgcaattacttttgcaccaacctaataattagtcaagatgaaatcacgctggattagggaggccctaaatccagtatggttagtgtctgataagaagagggaagtttggacacagagacacagaaacacagggaaagaggccatgtgaaggtggaggcagagattggagtggtgtagctgcaagccaagcagtgccaaggtttgccagccacccttagaatctaggaagaagcaaggaaagattcttccctagacccttcagagggagtgtgggcttgccaacagcttgctttctgacttgtagcctctagaactgtgagaaaacacatttctgttgtttgaagtcacccagtttgacagctctgggagagtaatccagagtagaagccacctgagggcaaggatgatggtttattcaccttatgcctctctgcagtgtttagttccaaacatggctgactcaagatgttaaacggagcttcataaaaagatgttactggaaggtatggctctttctagcctgactgctgtcacagctgtagaaatgaggttgtcaatctgagagcagggctcaggggtttggagactaggtagtttcctcttgggaggacatgacagtattggggaagggaaacactcaagatggtgacccaggacctcctgaatctgtctcccaattgtggctagagctggcctggtttctgggcccccacatctaattatgtggattccatggtggctcccgcctgtaatctcagaactctgggaggctgaggcgggtgggtcgcttgagctcaggagtttgagaccagcctggacagcatggtgaaaccctgtctctacaaaaaattacaaaaattagctggatgtgctgatgcgtgcctgtagtcacagctcctcaggaggctgaggtgggaggattgcttgaacccaggaggtcgaggctgcagtgagccctgataatgccactgcattcctgcctgggtgacagagcaagagcctgtctcaaaaaaataataatgattattatgtggattcaaagagactcagatgctccttctacgagcgggggcaaatccttgggcatccgaggtcctgaccgtggattaccccagctggtctccagaggacttctgagtatcaccatgggtggggacaagagggtagtgggttggggttgaagtcgactttagcaaatagctcattgttctctttcacccttctgtgaaagaggatcagaagttcagggcatggctctaaggaagttcctggcagctctgtttagagtagcaagattttggaaatgacccaagtgtctgacaatagatgattggttagataaggtatgggttagccagacgttggaattttattcagccactaaaaatgatgtcgtagatgattgtttattgacatgataggaggatatcctgtatggaaaacacatataatattttacacttatgatatgtgcaagatatatgtatgcaggcataggaaaaaatctacaagggcataagagcaaggtcttaacaagagttttctctggttagataatggatgatttttttcctcttacggttgggggatatatttttgtaatataaaaccaaagttatttttgttttaagaaatgctcctggccagacgcggtggctcatacctgtaattccagaactttgggaggccaaggcgggcagataacctaaggtcaggagttcaagaccagcctaaccaacatggagaaaccccatctctactaaaaatacaaaattagccaggcatgatagtgcaggcctgtaatcccagctagtccgaaggctgaggcaggagaatcacttgaacccaggaggcagaggttatggtgagccgagatcacgccactgcactccagcctgagcaacaagagtaaaactctgtctcaaaaaaaaaaaaaaagaaatgctcctgcaggccaggtgcagtggctcatgcctgtaatcccagcactttgggaggccgaggcaggtgtatcacctgaggtcaggagttggagaccagcctggccatcaaggtgaaaccccctctctactaaaaatacaaaaattacccgggcatggtggcaggtgcctgtagttccagctacttaggaggctgagacaggagtattgcttgaacccggaaggcagaggttgcagtgagcagctgagatcgcaccactgcactccagcctgggcaacagagtgagaccccgtctcaaaaaaaaaaaaaaaaaaaaaaaaaagaaatgctcctgcagtattctataggttgtgccatgagcgtcctccttccttttctcttatgagaactcacttttctgcattttttgcataggattgggctctctttcttaatgtgtcagcagagagtcatggcagcaacgcagagaaaacctcgttaccggggcagatgtgaagtttaccagaagcttttccagccccttgggcaccacctctttggtgctgagaatggctgagctcacctgagatggtttccttccttctctgccctttccactgtgcagggtggctgggacttccctgacctccaccaaccctgaccttccaaccttgagtctaccttggattctctctattcagtctcatcttgcttgaaatactaaaccatatcccatgtctccaaatattgatttttaaaagctatattgttccactgcacttcaactcagccaacatttattttactgcttattttgtgccaggcactgaggcaagctcttgggtaataatgatcaccaggacaagggtctatggccaagaagggattggagctaatggagcatctattaggtgccaagccctttgctgaggaccttgtatacattctcacttttaatttaatctgtacaggaatcctttgagtgagcactaatatttttatggtacagatgaaaaatgagggttagagaagactcactacttgtttaaatagtgatgggggattttaaacccagttctgtctgactctaccactgctattcctactaccactctactctaactgccttagagcccaaagttgtttcctttacacagtgctcagttagcaataaataatagtttgcttaactattccttgcttggaacagctaggtatttttaagtatttccattattataagaagaccctgctctactcatgtatgtatacataacagccactgatctttaagaaagtcttacatatagggtgggtgcggtggcttacgcctataatcccagcactttgggaggctgaggaggcgggcggatcacctgatatcaggagtttgagaccatcctggccaacatggtgaaacttgtctctaccaaaaatacaaaaattagccaggcatcgtggtgggctcccagctactcgggaggatgaggcaggagaattgctggaacccaggaggcagaggttgcagcgagcggagatcacaccattgcactccagcctgggcggcaagagtgaaactccgtgttaaaaaaataataataaaaaaataaaaattcttacatatacatagacatcatgagtgtgtgagaaagaaaagatggaaagaaaatacgctaaacattaaacaacagttacacaagggaaatagattgggcatgggagacatgagaaaaaaaacttttagttgaaaaaatagacaaatttttaagagaagttttaggctcacagcaaactagagtaagaaggtacagagattttccatatacctcctgtccgcacatatgcccagtctcccccactatcaaaatctgcaccaaagtatacatttgttacaattggtcaaactacattgcacattattatcacccaaagtccatagtttaccctagggttcactctttgtgctgtacattctgtgcattggaacaaatgtgtaatgacatgcatccaccattacagaatcatacagagtagcctcactgccctaaaaatcctgtgtgctctgcctattcatccaggcaacccccccgccccagctcctggcaaccattgatctttactgtctccgtagttctgccttttctagaatgtcatatagttggaatcgtacagtatgtagacttttcagatgggctttgttcattcagtaatatgcatttaagattgctccatgtcttttcatggcttgatagcccatttctttttagcattgaataatactccattgtctggatgtaccacagttcatctattcaccaactgaaagtcatcttggttgcttccgagttttggcaattatgaataaagttgttataaacattcacgtgcaggtttttgtgcggacatgttttcaactcatttgggtaaataccgaggagcacgattgctggatcatatggtaagagtatgtttagttttgtaagaaactgccaaactgtctttcaaagtggcggtaccattttgcatttccacatgcaatgaatgaaagttcctcttgctgttcatccttgccagcatttggtggtgttactgttttggtttttaactattctgataggtgggtagtagcatcttattgtgttttaatttgaaatcccctgatgcacatgatgttgagcatcttttcatgtgtatgttttccatctgatatcttctttgttgaggtgtctgtttaggtcatttggttattttaaaaaattggattgttcattttcttattgttgagttctttgtatattttggataacagtcctttatcagatatatctttttaaaataatttctcccactttgtgacttcttctcattctcttgagaactttctgtttttactttacacatttcagtattgtttgatttttttccctgcaaagagcataccgtgctttttgtgattgccttccaatgcattcagaagcatacaaataaataaggtttttatcagcaatataactgcttttagaaggattcctggtgaaaagaaaagatttctcccaaacagagcccatgttctctcttggccctgccaagaggagagaacagtaagcatagtgaataactcccactggaggttaggaactttttaatagcttgtgtgtggttatgactgtgtcatgtatttcagagtttaatgactatattatacatttataagtctgataggggcttggataaacaggagagtctctgcctccctcaaaagaaatgctaatgcattggattccctttggctaaaagaaaaaactggagccagctgtctcagttggagagagcaaagagaaaggttagaaaaaagagaacatacttgaggctggaaaaagacatttggcagaggatacacttcttcagcttgtggacttctgtggcccttataggaagaggctccacatttattctggtcaaatgtcttggatcgcagaccaaccgcatcataaactgattgtgtgacttgaagaagatgcttagttgttttgagccacagtttcctcgtttggaaaatccagattctaataataatagtaactatctcacatggttgttatgaaaataaatgatcttccctttcaaagcgctttgtaaagaactaagtgcttgttctaacgtgctgtgcaaatactttctgtctatacggacaaattgcatttgcatgcctgctgtgtgtggagcgatggctacacagaaagtaatgggtgtacaaaatggatatattacacaaatgataacattattattatacaaaataatgcttggtgcttaccctcaagaaacttacagacagaccaggtgcggtggctcacgcctgtaatcccagcactttgggaggctgaggtgggcggatcacaaggtcaggagatcgagaccatcctggctaacatggtgaaaccccatctctactaaaaatacaaaaaattagctgagtgtggtggcgtgcctgtagtctcagctactcggaaggctgaggcaggagaatcgcttgaatctgggaggcggaggttgcagtgagccaagattgcaccactgcactccagcctgggtgacagagcgagactccgtctcaaaaataaaataaaataaaataaagaaacttacagacaatataaaaagaaatgctgggtgtggtgtctcatgcctgtaatcccagcactttgggagaccgaggcaggaggatcacctgagcccaggagatcaagaccagcctgggcaacacagtgagtccccatctctacaaaaattaaaaaacattagtcaggcatggtggtgcacatctgtagtcccagctacctggcaggctgaggcaggagaatcacttgagcccaggaggttgaggctgcagtgagctgtgattatgccactgtactccagcctaggtgacagagcaagaccctgccgaaaaaaaaaaaaaggaatggacaggtatgtggaaaagatagttccaatactgtttcactgtagctcaaatcagataatttaccacttaaaaatatagggtcatctgtgctgttcattattataagaatgttcatctcatcttccaaagtagattgcaggcttcttgagggtagggcccatgttttctttttcctcccacaccaacttatacggagttcagaaaaaccatatctgttaccatttatagagggctgtctgtggactaggcaccttgttaagatctttttttttttttttttttttgagatggagtctcactttgtcgcccaggctggagtgcagtggtgtgatcttggctcactacaacctccgcctcccaggttcaagcgattctcctgcctcagccacccaagtagctgggactacaggtgtgtgccaccacgcctggctaattttttgtatttctagtatagatggggtttcactgtgttagccaggatggtctcgatctctggacctcatgatctgcccgcctcggcctcccaaagtgctgggattacaggcatgagctactgtgcccggccaagatcttttagatatattatattatggaatctttgaaactatcctatgaggtaattttatttaattaatttattttattttatttgagacagagtctcgctttgttgcctaggctggagtgcaatggtgctatctcagctcaccgcaacctctgcctcccggactcaagcgattctcctgcctcagcctcctgagtagctgggattacaggtgcccaccaccatgcccagctaatttttatattttgtatttttgatagagatagggttttaccatgttggccaggctggtcttgaactcctgacctcaggtgatccacctgcctcagcctctgaaagtgctgggattacaggcatgaaccaccatgcctgggctttatgaggtaattttataatttcaattttacaaatgaggaaactgaggcacagagtggaatagctttcatgaggcctctcagctgctgagtgttgggatcaaaatttgaaccttgattttttcagcccatattcttctttaaaaataatttttattgtgtatctttgaggtttacaacatgatgttataggatacagatatagatagtaaaatggttactatagtgaagctgattaacatatctatcatctcacagttactttttttgtgacaagagcagctaaaatctacttatttaacacaaattttaaagcaatgcaattttattaacttagccctaatgttgtacattagatttctaaaggtgttcatcctgcgttatctgctattttatgtcctttgacctacatgtccccatttcctctccccctcccccttggccatggtaacctctgttttattctctgcctctgtgtatttgagcttttttttttttttttaaatccatgtataggtgagatcatgcaatatttttatttctgtgtctggcttaattcacttagcacatgtcttctaggttcatccatgttctggcgcaaatgacaggatctccttttttaaggctgaataatattcctctgtgtgtgtctgtgtgtgtgtgtgtgtctctgtgtgtgtgtgtgtgtgtgtgtacgcatcatattttatccatttgtccatagatggacatttaggttgtttccatatcttggctattgtgaataatgcttcaatgagcatgggagtacagatgtgtttatgaggtggtgatttcatctccttggggtatacacccagatgagaaattgctgaaaatcccatattcttaacgactaggctgggaattttggaaacttgttgactggttgctaaactaatctcgcagcctggagtacttagtgctgagcttaagaggaggtatgaggtaaggtattagagacctccgaggggtgacagggagcttttgggctctgaatcatgtttctggggggtatttttgtagttggggatcacatgcattttcctgtttctgctccatgagaactgagagtattttctggctctgatttagcagtcagttgaagattcctgtgggttccacatgtgaggagagttcagtctagatgggagcgtagcgtgcgtatggggtagtatatagagtagaggcccagggaccagatagatctggagtaggggccatctgggatgctgcttataaggaccaagtgacagagaggacataaaagcagagctgggaaggggagatgctgggagaaacagtgagacaaactgggaggtcaactaaagccccgccaaattgacattgtggtcttcatcgttcttgcccttttaagtgaacagaattagctccatcagtcagaatccatcaggaagcagccagtacactgaagaggtaaagtcaaagagaggttaataaagggggtatttagagaaagtaagagaaaccaataggggctggtgaagcacctcgggctagcagtaggtggaggtgctgctactcctgggcttgaaggccaaggggacaagagcagatacaggaacaccctgagagctttagctctaggacaggcccctaacaggacctgtgacctttgcaagagaaacacggccactgccagcctgcagcgtggtaggaagtgagccggtggataaacactccaagttctctttttttcaccctttgatttcctgccactcacatcggtttcatccaaccagatgccaaaaggcgagggagtcagctcatgttatcagcagcctggatgcagagcagacaaggatggatctgaggggcaaagagagcatcctctgcctttatccacaggtgtacttagaaactgctgggaacacaacccacgatgctatccatagggaaatatctaaataaactgtgatgtgtccatactaggaaatcctaggcagaagttgaaaagacagaataaatcagtagttattgctatggagagattgctgagatctattgttgagtggtgaagcaaattgcagaaaaatgcctagagtaggatggcatgtttacgatactcacccccgccccccaccaccacatacactatcataagtctattaaggtgcagcacggtggctcacgcctgtaatcccaacattttgggaggccgaggcaggcagatcacctgaggtcaggagttccggaccagcctggccaacatggtgaaaccccatctctactaaaaatacaaaaattagccgggcatgatggcgtgtgcctgtaatctcagctactctgggaggctgaggcaggaggatcgcttgaacctgggaggtggaggttgcagtgacccgagatcacgccattgcattccagctgtggcggcaagaacgaaactttgcctcaaaaaaaaaaaaaagtctattaaatgccccatgtcttttatggtattttgttatatgtatatgtccatatgcaaagtttggaataacatacatcaaactggtaagagtggtttgctctggagaggtgggaggcagttcaagatttggggggtggtcaaaggggacttcagttgtggtagatagtactggctgcttaataacagccatttcccactcacccccttctttaatgctaacaactcaaatcttattcaggtatcaaagggcagcattgtgctcagggaaggtaggtccaggtgtcaaatcacgattgagctaagccaagtatgcttataccactcccctttgcctgtgatttgtctaggggtaggcatgtgacctagtctgctgttgacttttttttttttggcttccaattccattttaattttgtttctttgtatgtctttccttaaatatatagtccatcgccttggcttagtgcatgtcaccaaaaattctccaggaatttcatagtttggaccttggtggcatggctggccctggattatccatgcagggaggcctgatcctgtgacagctggctgcagcagggggctgcccatcttctgtgctttgtggtacatatctgtgtcaccaaagtagcggcctcggtacagcaagcctttcatctgctgcttctccgtccagcagttgttccagaggttggcgatataatcatctttcacattcggtttgactgtttggaggctggagcctgtgtactcctcggagaaaatgcctgccacatagtagatgacactcaggtggtcagtgactcgcctgtgatgtggcccacaaacagtcttgggctcagactgtagggtggactggagaccatgagctggctgagagctgacatgaggatgaggatgggtatcagctgcacgaacacccgcaagctgccgtcactccgcttctccctgcagccctgcctttgctggtaggtatagcgcatgcagccattgctgtagacgtagactttactagaagggaagccattgccaaagaacatgttgaagaggtcttcaggggagatgtcagcctcaaagccgtggtggaaatccccatgacgatgctggacctgactgcctgactcctgttatcgcccaagtggtcatactgcttcctcttttctttctttctttctttctttcttttttttttttttttcctgagacagagtcttgctctgtcgcctaggctgaagtgcagtggcttggtcttagtacactgcaacctctgcttccctggttcaagcaattcccctgcctcggcctcccgagtagctgggtttacagacatgcaccgccactgccggctaatttttgtatttttagtacagacagagttttaccatgttggctaggctggtctcaaaccagctggtcttgaactcttgacctcatgatccgcccaccttggcctcctaaagtgctgggattataggcataagccaccgtgccgggccacactgcttcctcttctccgggttgctgagtactgcatatgctgtgccaatggctttgaaagctccagtggtgccaggtgcatggttcttgtctgggtggaatttgagggccagtttgtggtaggccttcttcaggtcctcatctgaggcccctctcctcacctccaggatctcataataatccttacattgcttgacccttttcacagctgcaactccttctgcagtgtagcctttggtgctctctcctcctccagcttcaccgttggcctagggagcatcggtcccacctgctttcctgtgggtggcatgggttgtgtctgtgggttggggttggtcaccagcagtttgtggttcctagttgagagactccatcaggccacacactcgcggcattgggtacagccactgtgccttctccaggatgaggagcgcctggttgggctggttgcactggatggcttgagggtgatgctgatacagagctcggcttcatccttattggattacatggcagaaccagagcatggaacctgctgttgacttttaagaagtgtttttgttgttgttgttctaataacagagtatagtagatgaagtaagtagatgaaggtgaaaagttctgcttctccctttcctttttgccttgggatggagttgttggaaatgtgatgcttggagttacggcaaccatcttgtgacccaggggaaaaggccaggagaggccgggcacggtggctcacacctggaatcccaggactttgggaggctgaggccgaggtgggcagatcacgaggtcaggagttcaagactagcctgacaaatatggtgaaactctgtctctactaaaaatgaaaaaattagctgggtgtggcagcatgcacctgtagtcccagctactcgggaggctgaggcagaagaatcccttgaacccgggaggcagaggttgtggtgagccgagatcgcgccactacactccagcctgggcgacagagcaagactccatctcaaaaaaaaaggcgagcagaaatggagaaatgtagagacattagcctagcatcttaattttttattgttgttgttgtttttttgagatggagttttgctcttgttgcccaggctggagtgcaatggcatgatctcagctcaccacaacctctgcctccccagttcaagcaattctcctgcctcagcctcccgagtagctgggattacagggatgcgccgccatgcctggctaattttgtatttttttttagtagaggtggggtttctgcatgttggcctgaagtgatatattttctcagtataatttattcatgcattacttgtgtaattacacatttttcaaaggagggcaaaacgccttaggcatttgtacttcatcttcagagttgacctgatcctccttctgctgactctgactctctctacccttcaggactcttgtttgcctctgctgctggtctctcggctgccagctgaactgctttgattgacaacttaggtgttcaagacttttggaatgcacactttagccttcctggggctgctccatcctttttactccctcaggctggggaacccactgtttggggctgccctttccacagcactttcttcagggagggacttgccgtttggtaactgacacccctcacccccaccacttctcttctgaggagatggaagagctgcagcatagaagaagctggggaacaggcccaaaaccaagggccccagagtctaggtgggattcctttggctctggccctaggcctggcatctgagtattatagagaaactcattttatgtttatccaggggttcttgcattgcctgtgatttctgaggatgcttttaaatcactagtattcactgcctctactagaacttctgtacactggattttattccccccagctataagggcttgtgaaaatatcttaaagagtagagtaagtagctcgggcaggcttgcatttgcaaaagcccaccctcactgatggaagactggtgggaggcccttgtgataggttgagggaaagaagctgaggttttagttggggcccaggattggggtggaggggaggagatgggtgtgagttttccccttcccttctctgtgggcgatgctccacatacggtggcaaggaaagttttctgcattcttcaaagcatgagcagagatcttttgcatgctgtttccacgggtgtttcagggagctctctgtaataagggttccctttgtggcagttggcagtcggttccaagctcatcattttgttgcagcaggacttggcaggggcatgggagaacaagacttctgctgttcctttgccactctgagctctgcacccgtacctatgagggctacctctttcctccatcctgttccacctgtcctcttcctgccattcttttgtccaaacctgtgggaggctgcattcaagttcacagaaaaggggtacctgtagtcaaaaagggtaggaggatgggaggagaggattaaggaaaagccaacttttgcctcagatgcccggctgctttattatgcatgctttcctctttctcactgttttttggaaaggctgaaaataaacacttttgtaatactgacttgtagttcacactttcctgacaagttactcaaactgcagccacagccgcttaaagagaagtttgacgcaagccttattcagcagacgctttctaattcagaatgttccgaggcagttgatcttgctacttctaaactagtgaaggggccgaggagggggcacattgcttaacctgggagccctgggccagtacccaccaccagcaagtccaccagcatctccaccacaaagtcaagcttttgagactgctgggtcctcagggctgttacccagctcacttattcaagaaatgtcacagagtcattaaaaatctcacctggaagaaactatgaacatctcttaattcaagatccctttttctgtaggccagagaagtgacttccctgcttaaaatgaacagaactattaggagctagggatacagccccaaactctggaagcttcccattgagccatgctttgttaatttcatggatttgatttattacgtttcagtttttattacaaaaactttcaaacatacacaaaaagttgagagaagagtataatgaacatctgtgtacccatcactcaatgtcaatactggtcgccgattcgatgttatcttatctagtccccattttccctcactgcaaccagatagacgtcgtaacactttatccacaagtacagcaatatgtgtctctaacagaaagctttaaaaaatagtgtaaccatagttaccattatcacatccacaaaattagcattatttcttagtgtcataataccttcgaacacagttttctccggttgtgtcaaaaatgtctttttgcagtttgtttaaatgaggatccaaacaaggtccacacattgcatttgttgacatattttaaggggtttatactgtcatggtccctcccctataccttccccatgccatttgtttgttgatatagttgggtcatctgtccttcagaacttcccacgttctgaatgtggctggttgtattctgctggtgtccttcaacctatttttccatcctgtttcctgtacattggtactgaagatgtagacaacagtgattctcagctgggggagactttgcttccctcacctcccaggggacgtttggcaatgtctggagacttttggttgtcacacctgggggtgggggtgcttcaggcatctggtgggtagaggccggggatgccgctaaacatcctgcagtgcacaggacagctgcccacaggaaagaaccacgtgtcccccaatgtcagtagagctgaggttgagaaaccctgactgggagacttgaaattcaagttttgcttttggcaaggatatttcataggtggagccgtgtacttcctgctgcatcatatcagaacactgtgtctgatgttaaggtgatgtttcggttggtcagtggattcaggaggggtcaacctcacacatcataaaattagccaaatgggcatgttttgagagtaaaagggagtgctattaatagatgaaaactgggaatgtttctggcaaacagagacatgtgattatccattgatttttcaagagctttattcatctctaatgaattttctttcacttttttaccagttttaatcaaagttacatgggcacataatttttttatttttaaattcatatatttttaagagacaaggtctcactctgttacccaggttggagtgcagtgcttgatcatagctcactgtatcatcaaactccttacttcaagtgatcctcccacctcagcttcccaaatagctaggactatagatgtgtgccacatgtctggataatttttttttcttttgtagaaacagcgtcttgctatgttacccaggctggtctggaattcctggcctcaagtgatcctcctaccttggcctcccaaagtgctaggattacaagcatgagccaccgtgcttggcccatgggcacataatttaaagaggcacataattctcctaaacttgttgctgcggtaatttcctcattcctccctattttcctttcctaagaggcaaccactttcaattctttcagttggttcttgtaatatttatcctcacacatcctaatatgcttaaattgctacttcatggtttttctgtttttggcattttaaaaggacttctttctaaagaatataatttatctttctgacaatgctctctagcccccagtacaagcctttcttgacctttcattttctcagaacagtgaaattctaattttagctgtctgcttatatttaagagtggggtattaaaaagccaaatagcagctctgatcttgtgagtggagcctgttgactgctatcttccccattgggttatctggctatgctaccctccaatgtcaggatgtttgatcatttcttcttgggccagtaagtcttccagtcttctgcccaaggagatagaccgggctgccagggtcctgggacccaggtggggccaaagagcagtgagtctcagcattccttctgtggactttcctttttttgttgtaattccttgccatcagtggtgcccgctgtccttcagtcagtccttagaagctccattaacttcctccagagaataaaccttaagtctagtggcaggattgtgggaggtcagttgcccagttgcacagaattggggaaggaagctaaggatcaaattgttattttttttaaaaaaacagctttattgagatataattgacataaaataaatatcacttatttaaaatgtacaatttgataagttttgacatgtgtatacacccatgaaattatcaacagtcaagataatgagcacctgggcatggtggctcacgcctgtaatcccagcattttgggagtccaaggcaggaggatgacttgaacctaggagtttgagaccagcctgggcaacaaagtgagactcccatctctacaaaaaatttgaaaattagccgggcgtggtggtgcatgcctgtagtctcagctactcagatgactgagtgggaggatcgcttgagcccgggaggtcgaggctgcggtcagtgagctatgatcacaccacagccctccagcctgagtgacagagtgagaccctgtccccctcccccccaaaaaagtaaaaataagataatgagcatattagttgccccttaagtttccgttgcccactcaggcaactgctgatctgctttctgccactagattggtttgtattttctaagattttatgtaaaagtaatcatatagtacttgctctttttaggggggaaggattctgcttttttttcactcagcatcattactctgagattcattcaggtcgttgagtatatcaatagattattcctttttattgttaagtagtatctcattggattaatacaccaaaatttgtttattcatttacttgttgatggacatatggattgtttccagtttttagttattacaaataatactgctatgaacattcatgtgcaggtctttgtgtggacatggtttttcatttttcttgggttaacacctaggaatggaatggctgagccatatggcaggtgcatgtttcacttttttttttttagttgaactttgaacaacatgtttaacctttagtgaaactgccacactgttttccaaagtggttgtaccatttcatatttccaccagcagtgaaccagaaagttctaggtggctcaacatccttgccaacaagtgatttggtcaaccatttaaattttagatattctagtgagtatgtagtggtatctcacggttttaatttgcatttcctaatgactaatgatgttgagcatctttgcgtgtgcttatttgccatctgtatatcctctttggtaaattgttcaaatctcttgcccatttataaaatttggttgttttgttttcttattgagttttgagatttctttacatattttggatacaaatctgttatcaaatgtgtaacttgcatatatttgctcctagtctgcagcttgccttttcattctcctaacaatatctttcaaagagcaaatgttctcagttttatttcttttttctccataagagattttagaatcttccataagtgttcttaattttgatgaagtccaatgtattgattttcttttattgattttgcttttggtgctgtttctaagaaatatttgcttaacccaaggtcacaaagagtttctcttgttttttttttttttttttccctagatgttaatagttttaggtttaggtctgtgatccattttgagtaaattatttttaattaatttttttttaagagacagagtcttggccaggcatggtggctgacgcctgtaatcctgccagtttgggaggccaaggtgggtggattgcctgagctcaggagtttgtgaccagcctgggcaacatggtgaaacccagtctctactaaaatataaaaaaattagccgagcgtggcagcatgtgcctgtagtcccagctactcaggaggctgaggcaggagaattgcttgaacctgggaggcggaggttgcagtgagctgagatcacaccacggcactccagcctgggcgatagagcgagactcaccccgccaaaaaacaacaacaacaacaacaacaacaacaaaacacaacgagacagaatctcactctgatgtccaggctggaattcagtggtatgatcacagctcactgcagccttgaagccagggctgaagtgatccttccatctcagcctttggagtagctgggactacaggggagtgccatgttcctgaaccattttcagttaattttttctgtatagcgtgagatgggtcaaagttctgggtttttttttcctttttgtatatggatatccaattatttcaacactatttgtcaaaaaagaccattttccccatcaaattgcctttgcacttacgcaagttactatttcttagtctcctatttttctatttgtctattttgaattcaataccacaccatcttgattattgtagcttatattaagtcttaaagttacatagggtaaattctccatatttattcttctttttcaaagttgaattggttattccaagtcttttgcatttctaaatgaattatgtttttattttttatttttgagacagagtctcgttctgtcatgccggctggagtgcaatggcacggtctcagctcactgcatcctctacctcccgggttcaagccattctcctgcctcagcctcccaagtagctgggactacaggcatgcgccaccacgcccagctaatttttgtatttttggtggagatggggtttcgccatcttggccaggctggtcttgaactcctgatctcaagtgatctgcccacctcggcctcccaaagtgctgggattataggcgtgagccatcgtgcctttccctaaatgacttatatgatcagcttgtcaattttaaaaaccacattgttaatgtaaaaatgaataatataatgtaaaatgtaaatgttaatgtatacatatatgtatgatttaatgtgtaatataaaaagcctgctgggattttgacttggatttattatagctatagatcaaattggggaaaatttacatcttaccaagttcagtgttggatataagtggtaacagcagacattctttccttgttctgatgttggggaaagcaatcagtctttcaccgttaagtatgatgctagctgtagggttttcagttatccattatcaggttgtagaagttcccatctgttcctagtttgttgaaaattttcatcaggaatggaggttagattttgttaaatgctctattttgtatgtattgagctggtcacatgttttttctttttaaatttttgttcgtttgtttttccatttgttcgagatggagtctcgctgtgtcacccaggctggagtgcagtggcgtgatcttggttcactgtaacctccacttccggggttcaagagattctcctgccccagcctcccgagtagctgggtttacaggcacctgccaccacactcggctaatttttttgtatttttagtagagatggagtttcaccatgttggccagcctggtctcgaactcctgacctcaagtgatccttccacactgctgggattacaggtgtaagccaccacacctgacctttaatttgttaatataatgaattaaattgattgattttcaaatgctttttttttctgggagacagggtctcactttgtcactctggctggagcagtgatgcagcgaacacggctcactgcagcctcaacctcctgggctcaagtgatcttcctgtttcagcaacctccctccacccctaaccccaccccaagtagctgggactatgggcatgtgccaccatacctggctaattttttttatttttttatttttatttttatttttatagagatggggcttcaccatggtgcctaggttggtcttgaactcctgagctccagcaatccttccacctcggcctcccaaagtgctgggattacaggcatgagccaccatgtgcagccgagatttttctttcttttcttttctttttctttctttctttctttctttcttttttttttttttttgagacggagcgtgtctctgtcccccaggctggagggcagtggcgcaatctcggctcactgcaaccttacctcctaggttcaagtgattctcttgcctcagcctcccgagtagctggaactacaggcatgccaccacgcccagctaatttttttgtatttttagcagagacggggtttcaccttgtaggtcaggcgggtggtgatctgcctgccttggcctcccaaagtgctgggattacaggcgtgagccactgtgccccaccctgaaagttttcaagtgttaaactaatctggcaattctgggataaagccttcttggttaaaatatattattctttttgtatataattgaaatcaatttgctaaaattttgttttaagaaatttgcatctatgttcataagttttcttttcttgcaatgtctttggtttgatttatagaatgctgatctcataggattccatccctcttctttagctttctggaagagttcatgtagaattagtatgacttctttaaaattttggtattattatttttttcttctgcttactccgagtttcactttctcttctttatgtagtttcttaagaaagaaggaagctgaggttgttgacttgagcacttttttcctcctactttagttgagtgctatggatttccctctaagttctgcattccctgcatcccacccattttgatgtgttgtgttttcttttgcatcagttcacaatgctaatttatctttgatttcttcttcgacctatggattaagaagtgagttatttagttttcaaacatttggtttttttgaaattttttttttttttttgtccaggaggcattttatttgtaaatctgtattacacatctagaaaaagaatgccaggattttccctcctgtgtgtttttgtcttgcctcttcatggtctatgatgctagctgaggttgtcagtacaataaaaccaaactggtgggatggaagaagattactctgccatttttctagatctttgagttgcacatcaaatctggggctgatcacgccacacttgtttagcctgcctgtggggcagctctttgatcatcaatgatttcagttttgccagtgtaaccatgcttcatcatcatagtgaaaaactggacgatgacttcagagcacagcctaataagaacctgagttcatggcctctcttttcagcattgtcgatgctcttgagagcatcagccaggacattcatgtgcaccattgtggcggtgcagaaagataaaggcaagaggacaggaggggagagcgcacagaattattgagatatatttttcttattgatttcattttggtcacagagcatactttgtataactcgaacccttttaaattattgaaattcgttttatggcccagaattggacgattttggtaaatgtttttttgtgtaccaaaaaaaaaatgtatattctgccaatcttgggtggacctggaaactttctcaagccagtaggccggggcactcaaagagctcattttgtttatttcctgtctctcaggaattggtatacttcattgccttatacccaatgtcttcagaacaactgtttcatatatttgtctattttataagttgcatttggtggaagaagagtaaatctggtctctgctattccatcttagccaaagtgaaagtctctttgaactgctttttaattgagttttcagtcaatattcctttgctagccctaccttaaccttccacttccagaagtagctggtactgactattcccggaccttttcggtgtttttagatgtcagttgttttgtttcttggcttttctcactgctggttgtggaatctaataaatattctagcaaagttattaaagcagagctgacactacacaggggaccctgaaattagacaatcatggctcacttgtcattttctcatgaggccacatttgtctggaacagggcctcaaactaatataccaacaagggctctctagggagagaaaatgaatgaaaacatgggtgcaagataactggaaggggtggggacaaacataactcaccttgtttagacaactctgctctcatctcctgtgaccatgcaagaaagaaggcctggtgttgccggatcttccaggaaagtttcagagaagctggaaacgcataactttatgtaaaattgcctctttttttctttctttctttttttatttgtttattttttttgagatggagtcttgctctgtcgccaggctagagtgcagtggcgccatctcggctcaccacaacttctgactccctggttcaagctattctcttgcctcagcctcctgagtagctggcatacaggtacgcgccaccacgcccagctaatttttttatttttagtagagacagggtttcaccatgttggccaggatggtcttggtcttctgacctcatgatccacccgcctcagccttccaaagtgctgggattacaggcctgagccaccacgcccagcccaaaattacctcttttaaaaatcttgagaactcatctaaatttaaaagaatgtcgaaggccaaatgaaaatccacgtaaggatgggatgacagctcaggatttgcatctctgtttctctttcgcgctttcctgctccattatgcagggatgtggatattcactggcctttggggactgagggtgggtaagtctctatgggtagcaaggaaatgacagactttctatgaaaaccaactgaatcatggaatgagagagctggaagtgaccttagaaaaatgtggtcaaaccccaggatattacataagaagcacctaaggcttagaaaagtcaggtgacttctctaagtacaaagactgtattagttaatagttgggctgagtctgcatctagttgcctagccaaattttctttcttctgtgttccatgagagcaagagatatgtcagtatccttaatgcaattcttggtgcatagtaggtattcaatgaatatttgttgaattaaaaacacatactgagttgctttctataatattagcatgtgctatctttatcagttaggatatggtgtggctacatataacagaaaattcccaaaacattagctcatatacaataaagatttatttatctgtgaaagaaatgtggacatttagggtgtcaacaatgttctcatctcttctggttctgttttaccattcttcgtgtatggcttctatccttaaatttatcttatgatactgaagctatagccatacagctcaactaaattccaagatggaagaatgcagaatgcctccatggcaaaaggttttcctggaagttccacccaacttccacttaaatctcatagtttgaaacttagataagtggccacatgtagttccaagggaggttaggaaaaggaagttggatacattgtctccttgaataaatctgggttttgttaaagaaaggatggaatgggtatttagtaggcaactagcagtatctgctggaatttaagagttaattattgattgaaatattgtttcctgcagttttgatatgcacaataatcaaagcagaaatatgtaagcctttaaagatatttatcagaagatattcaaacaaaaaaatactggtttagttcagataatattctaatgttctggttaaatcattttagaaaacattggttcagcttcagttcatgttagttcagtaggattttactggttttcatggaaatccttttggatgagtccacaatttagaaaaacataatgttgtatttcagttcagcactcggtttcagaaatgagtgtgatctctttgaatttttggttcataatttgagtcaactccagttcctgtttctaatgtatccaccctagacattttgtagttatggcttagaaagacagacatgggccaaagaactggtttccactgaggctcgagtttattaatcctgctcttcttatgtaggagccaataatcctaatggctttgaatgactctaaatttatctctgtgatttggcatgactaaaggtctcactcatgacagacatgccaaaattaacacattagcctgtttcatacttgttctatgatataaatgcacctaattgaaaatgtctctgttcttactcataagttttgcattcccgtggtttgagatttcttttaccatgttagttctagaacactattctggattttgtatggtgtctcagaaaatacacttaaaaattagaggttcaagtttttttttttttttttttttttttttttacggggactgaggaggtactgtacatttcagaaggagaatgtatgtggggagtgagaggctccttctccagggaatcccgctgatcagggactgggaaaaggtggctcagcattgccagatacctggagtacactacaacattttaactacaaattagaaatctgagttcctatgaaaaaccctgatttgtacatatcagccaataacttaaaaaattaaaatcaacaagtgggccactactgtgctggccaaacagtacatgtctataggttcagttattgggctgctggttttcagagtctgattttgacactgcctattttttctatgtcctccctgtcctcttccatgccttacttgatgattctgcccttattcttttggataaaaatgttgataaaatattcaaaagtaggaacccaattctctgggtatgactgtatgcttctctcatggtcattggccacccctatgacatttatctagtcaagtttgcacatatagccattggtcataaagtagaatgagcaagaggctgtaaacgatgcactacaatccatctcacacaattaacctggtagaagtcttcatgtttatgtgctacttatttgttttccaaaatgcattcaaggagtgccagctgcgtatggcaagtggaatgcacagtgggtacataccctccactggactttacttattttcaaaatttgaattaaacagaagaagcccgttgccctctggtcataagctgtgaggatgtgagcctagaagccaccagcagacatagttcctttatcaggagaaagatggtgtgagagaataaagccaacatgctgagatatgcattatctttctcctggatactgcaagggcttcctgacttgtcttcccgtttctacccttgctccacagtctacttccaacacaaaaactggagtgatctttagaaacaaaagtcagatgtcacctccttgcttaaaatcctgcttcgggccgggtgcggtggctcatgcctgtaatcccagcactttgggaggctgaggctggtagatcacctgaggtcaggagttcgagaccggcctggtcaacctggtgaaaccatctctactgataatacagaaattagctgggcatggtggtgggcgcctgtaatcccagctactgcggaggctgaggcaggagaagcgcttgaacctgggaggtcggtggaggttgcagtgagccgagatggcgccattgcactccagcctggatgacagagcaagactcaatctcaaaaaaaaaaaatatatatatatatagctaacaccaatacacattttctacattttctatgtgccaggcattattgtaagtgctttatgcatattcactcatttaattctcacaacagctttatgaagttggcactattattatccatttattagatgaggaagctgagtcattgagatattaagtaatctactcaaagtgccactgttaataagcatggggccacaatttaaactcaggcgtcatgatttcagagtccactgaaatcataatgaaaggttttcagatgataaaaaacccacctcaaattggcttacataaaaagtggaacttactcccttctatcatggaccagtccctggcgctatcccagtgtgccgtcagtatttggtactcttctctctcatctcagcctcgttctcaggcagcctctctgtgtgtggtgaccgcagcaacactgggtccacatcattttcagcttcgagtttagaagacagagaggagcttgtgccgataagtctcaggactgagtctcagtgatcccagtggggtgtctgactcataactgaacatttcaccctggggccaggatagaagataccaattggccagatcgtggtcatgtgacaacctgtctaactatgggttaggggatggtgttgattttgtatcaccagagccatgtaggccaagagtgggtgaggagctgttgcaccaaatataaacagggtgctattataagtaaaaggatggccgggcacggtggcacacacctgtaatcccagcactttgggagaccaaggcgggtagatcacctgaggtcaggagttcgagaccagcctgaccaatatgatgaaatcctgtctctactaaaaatacaaaaaaattagccaggcgtggtggcaggcatctgtagtcctagctactcaggaggctgaggcaggagaattgcttgaacccgaggggtggaggttgcagtgagctgagatcatgccactgcactccagcctggatgacagagtgagactccgtttaaaaaaaaaaacaacctcaaaaaacccaaaaaaccaaaaaaaaaaaaaaaaaaaaaaaaaaaaaaaaaaaaagggtggggggatggatactgggtaaggaaaaatattggatggccactacaggcagacactgtgttttgtttgtttgcttgttttttgttttttttttcacagatgaggggcctagggttcataaatgctaagtgatattcccaggactatagatctagagcatggcagggctgggatttgaatcccaaaacttttgtcttgtcataaaaagacaaacttggccaggtgcggtggctcacacctatactcccagcactttgggaggctgaggcgggacaatcacctgaggttgggagtttgagatcagcctggccaacatggtgaaaccccatctctactaaaactacaaaaattagccaggcatggtggcaggtgcctgtaatcccagctactcgggaggctgaggcatgagaatcgcatgaacccaggaggcggaggttgcagtgagctgagatctcaccactgcactgcagcctgggcaacagagagagactccatctcaaaaaaaaaaaaaaaaaaaaaaaaaaaagacaaactggaaatgacgggaatggtagttgtcagggtggtcttcagggtccagggactgcctggtgctctgtctattcgcaccatcacttcttttttcctgccttttagctcagccctgaggggctccaactccaggaccccagaactggttttctttaagaaaggatctggaaggtgacagggaggtgaaggagtggagcttccttgaaatggcagacccagagacctagaggagccttgcttctgtggtctaattggactaattttaggctgttaattagcctctggcaattatttttcactccagaaattccccagttttatttacacagagtgatttagccttttcacagacagagttatttccttatatttggttctgtttaaaaaaacctccagtccccaaagccttccaaaaagctgggccggaagcagagcccaggatcaagtatctgcaacttcagaggcaaggaaggtctgggggctaaaattcacacagtcaacaattttaagcagtttaggccaatgctcacttgttctttctttcccttctttccttcttccctccatcctttccttacctcctttctttctgcttaaaacccctctgttcttaatgtgcttggcttatactccttaatagatactaagcatctattagaagtcaaacattttgggaagagcttaagagaggctatgttctcagtaagatatctataatttaccttcacaaagttcagcatagacagaaaatattgagtttgtgctatttggtagaagctctgactccaagggcagcacctcttgccaagaacacaatcagggcatagtcagctccattccaattaggaagttaaggcagctgctgtgagcaccaatgatatccatatcttgatcagtaccttatgtttggcttagcatagtgaatgtcagaaagggtttttattaattcaagtagtagctagtagtctgcacagtgaatgtgggctcttaactgggtgaaactgaagatatttgagatgcgtggatggggctaaaatagttcagaaccactcacataaataggttagagaaatctaggaaggcctgctgcctgcaccctcagggaaggcatcagaaacttgatcccaactggtcctacatctagccacttgttaggaggatgtctggttgcccaatgccacgtatgagggtaacatatgtgttaccctcatatgttgtcataagagaatgttgtcatatgagactgttgtcatatctgtctcagataaacttttcatataagacagtggccaaagcacttcaaagggtagagagcttgggtttcacggcccttaaagatcagactttataaactgtctttcatttactagctaataagttcttttttagtgaatgttcatatatgtggcagaatttgatgtgagatttcccatcaatgtcatgggacagggagggtgtgggaagcagataaacctcacccacctggaacctcacccacctccaacatcttcttcagtgactactgtttccaccaaagagaaccaacattgcatatactgaaactggcttaagtttgtttgcaataactccttcccttcagagaatttgcatcttagctagaaagatgaatctattaggccattttcacactgaagatgggctacccaagattgggtaatttataactggaagatactacccaagattgggtaattgataaacaaaggaggtttaattgactcacaatcctgcacgcctggaaaggccttgggaaacttataatcatggctgaaaggaggcaggcaccttcttcacaaggcggcgggagagacagcgagcaagagcagggaaaactgccttataaaaccatcagatctcatgagaactcactcattatcatgaggacagcatgggcgaaactgccctcatgatccaatcacctctcaccaagttcctctctcgacatgtggaggttatgggtgttacagtttgagatgagatttgggtggggacacagagccaaaccatatcaatgaacaattaggggaaaaccacacttcaaacaaggatacccatacagcatacaatgtacaagcaagaacaggagggcttcagaaagggcagaaaacagttaggcaggtttttcttcctttacttttgtgagctttattgaggtaccgtttatataacataaaactcaccagtatcaagtgcacgatttgaagagctttgacaaatgtagacatttgtgaaccaccatcacaatcaaggtgtagaacatgtctatcactcccaaatatttcttctttcctaattttagtcaatctcgtactcccacctcttggaccctgacaaccacggatgtagttccatcaccctagttttaccttttagaaaaaatttcacagaaatgaatcatacagtttgtagccttttgagtctggcttctttcacttggcataatgcatttgagatttgtccatgtttcagtgtatatcagtagttcattcctttttattgctgagtagtattctgttgtatggatgtaccacaatttgtttatcacttcaccagctgaggtcagaagtttaagaccagcctggccaacatggtgaaaccccgtctctactaaaaatacaaaaaattaaccaggcgtggtggtgggtgcctgtaatcccagctacttgggaggttgaggcaggagtattgcttgaacctgggaggcagaggttgcagtgagccgagattgcaccattgcactccagcctgggtaacaagagtgaaactctgtctcaaaaaaaaaaaaaaaaaagagccatattgtttgtttgtttgtttgtttgtttgtttatttatttatttattgagacaggatcttcttctgttgcccaggctggatggaaccggcaccatcatagctcactacagccttgaccttttgtgctcaagcaatcctcccatctcagcctcccaagtaactgggactacaggtatgcacgaccatgcccagctaattaaaacaaatttttttttagagacagggtcttactatgttgcccaggctggtctcaaactcctgggctcacgggatccttccacctcaaactcccaaaatgctgggattacaggcatgagccaccttgcccagccatattattttttaaagcgtttgtactcccaccagcaaagtatgagaattccacttactccacatcctcatcaatgtttgacattgtcagtcttttaaattctaaccattccaatgtgtgtatacacagtggtgtttcactgtggctttaatttgcatttctctattgaataatcatgttgagcatctttgcatgtgcttatttttcatttgtatatcttttataaagtatgtattcatttttttgccctttttttcttatagagttataagagtttttttgtttttgttttgttttgctttgttttttgagaacgagttttgttcttgttgcccaggctggagtgcaatggtgcaatcttggctcactgcaacctctgcctcccgcgttcaagtgattctcctgcctcagcctctcgagtagctggggttacaggcatgcatcaccacgcccagctaattttgtatttttagtagagacagagtttctccatgttggtcaggctggtctcgaactcctgacctcaggtgatctgcccgcctcggcctcccaaagtgctggggttacaggcatgagccaccgagcccagcaagagtttttgaagtattgtgcacacagatcttttaccagatatttgttttgcaaatattttctcctggtctctggctttccttattgattccttaactgtcttttcttattagttttgtttctgaactgtatcttttcaagagtaaaattttaagttttgatgaagttcaattcatcgatttttttgtgtccctatttttaagaaatctttgcccaatgcaaggctactaagattttctcctatgttttctactgtttgttttatagttttatctcttatgtgtaggtttatgatccaatttattttaattttttgtatatactatgagttagagattgagattttcttttgcccatgcctatttaattctcccagctccatttgttgaatgtctagtttttacttcattgaagtgccttggcatctttgtaaaaatcaatttgccatatacatataagtttatttcttgactttctgttttgttctgataccatcactgccttttctactatcgctttataaaaagtcttgaaatcagatagtataatctacctttgttcttccttttctttaaagctgagatttaaagtataggaatttaatttggtcctgtatctggaatgaaatgaaactggtccagattccacctcgaatacttgctagctgggagatcttagccaagtcacatgttttacccgagtctcacaatacttcatggccttgtgaagattaaatgaatgattgaaagtttaaaaaatgggctgggcatggtggctcacacctgtaatcccagccctttgggagcccgaggtgggtggatcacttgaggtcaggagtttgagaccagtctggccaacatggcaaaatcccatctctactaaaaatacaaaaattcgccaggcgtggtggtgcatacttgttatcccagctacttgggaggctgaggcagaagaattgcttgaacccaggaggcagtggttgctgtgagctgagattgcgctaccacactccagcctgggtgacagaacaagactccatctcaattaaaaaaaaaaagaaagtttaaaaaatgtacttttaaaacggtaaagagagatgcacatatcacctgatatgttgttatggtcctaggagtggttattctataggcaacccaaataatagtgcctgctttcttgcagtgttaaaaaaatattagccgcccatacttactgtacgctccctactgggccctcctgcagaataatgagaaatccttaccccttgacactcttggccatgtgacttgcttgggccaatcagctgtgagcagaagtgacatgtcctcttctaagcagaagctataaaagccatcatgtgtcctccactttttcttttcttcctctccattagattgccccaaacccccatttttctggatgctgttccttgttcacttccctctcccttatatgcgtgggtcactcaagaacagccatgtacttccatggccctgccaccctggtctcagatgggcacctgagggtttgggggcaatgatctgtcccctgcaatttttagactagagtacagctagtcaggtcaatctttcttcagtggttgaagctataagctgtacagtttgtggccactgctttccgccttgtgagttataatggaaatctaccatgtgtggctgcccaaatcttgtaaatatttccacatttcagtagtgccatgtttcgtgaatcttgtcacctcaaggtaggttccaaaaaccgtaaaccaaccagccaacctacaattcccagcttccattgcagcaagagagtagaatcatggtctaggttctcctaaccagataatcctatgtggaattttgatttgcaaatatgtgagaaagcagtttgggtgagtggctagtggattggtatcaggtcccttattgggtcagttctttagcagggttctgggagttgttctaggaagaccagcctaaaacctgtttctccacactttcagtgattctgtgagctaatccaaggtagttttcaaaatacttcacaagtggcacagcctgggccctgctgcacctgacagggtgctgtgaccaggcagaagggaagtggctgtaaacagccagtaagactgtgcaggtgtatacaagctgattgtcagtccgaggacaaataatgtcctttcaaaaatccttttctccttaagccatatagattttgttgcctacagcccagaaccagttcttaatgaaagagaaatgtaagttcagttcttggagagtggtagggaaaaggtgcagagtccatcccaacgtggccaaggccctgatttctgtcattcccaaggtccagctgcatctctgtttgtccatagcttgactttattttcttttttaaagacaggatctgactttgtcacccaggctggagtgcaatggcactatcttggcttaatgcaacctcccaggcttaagttatcctcccagtctcagcctcctgagtagctgggattacaggcgtgtgcccccactcccagttaatttttgtatttttttgtagagatgcggttttgccatgttgcccaggctggtcttgaactcttgggctcaaaaagattcgtccgtctccacctcccaaaatgctgagattacagacatgagccaccatgcccattcccacctttctttctttaaaaagatgaacattaataaattagatgagaaaaatgaaagagtaggggctgagaaacttcggttaaacaatgatttatttaatgaagaagcagcatgcatcagagaagctctttgattctgcttagaggcagatcctgaaggaaagatttgactgcaagtaaattatttaggaaatgattctaggaaacaactgtgggagagggaggaagtgagatggaaagggaaggcagccaacgaaatgtgctttatcaagcaggttaccaaaatgtggaactggagcttaatctcatttgggaactttggagggttgtagaaaacacacccacatgtgctacccaagaggtgagggagctgggatatttatacaccagcctggtcagtcactggttgagggcagctagatggtggtgtggtgggtaattatccggcagagtgggtccaataggcagagaaagcccttaggcgaagagagacaggttggcagttggaagttgggcagctgtcctgagatggtaagagagaggggaaatgggtgtggcatggacagcttctgccagatcttgtttagacttttccctgaatgcacacctatgtgaggcaccacttccataataaaaatgtcacatggtagtgacatgcttgtgctaaggtagattcaaatttatttcgggtttaagatcaatgggaacatttaaaaaatgaattgctcatataattattgcttgaaagtccatctcttctgtttgactgtaagctttctgagggcagagcctatgtctttatttgctcactgttttatccctgggctttagcatggtgcctaacacatagcagaaattcaataatttttttattgaatgaatttggcataattagacaatgtggggtattgctagatgttaaaatttgaaaaaaaatctgaatgtgtgcaacataaaaaacaaaaccccaatgatttatctttatagctccaaaatgtcattattagcttaagaatatatttttgtgtgacaagcaagttgatttgcttattaaattattaattgatatgtttagagggctacagaccttgtaaaacattggaggaggttttgttttttttttttttaacccccttcttaactcaaaaaagtctaaggagggagaaagaaaaagctgatttttcagctgtttgttttctttttcctcccaacactctgaggtttctacgtgctgttaaaacagggccaagaatccctggcttggattctgtctttccttgggggcagaagtttccctctcaggcctccggggtctttccagtctgcagtcttcaaatatgggctgaccaacccagaaatgatattttttgttgactaactccaggcacatatgttctttcgtggagggatatttttgaaagaaaggctgcacagtttccatttgcaagagaagagtatattttcagaagcttctatgggagggagactgacctttgctctaacacagagagtcttcttcaatctgggattttatggggaacctcatctattttctttcttcttctttcctgctggagctagtttcctctgttctctggttaaacatttttattggatggattttacaatggggaggaacacatacttttttgttgaaagaccatctccagctaatggaatctaatcgggccaagggaataaaatttgggaattcaatttcctcaaactgagtcgacacttcactgctcctgtttcatgcactttgaaatatggcgtgttcatgtttgaaggcacagagagagttgagctcattcttaagtgagacattctaggcaagaaatagctagaactaatattaaaatcgtcaactgtaaacgccccttctaccccaacaaaagacaacagtatgtgaactaaacccctcccttctatacggatgctgcagagaaaccccctgttgtcctttgggaacaatggttggaataagtatgtaatgagtgggggtgaggagaagagtttgaaattaaaaaaaaaaaatgtttcatgtggtagatcagaagctgaccaataaaatattgcaacatttataccaaccaaccctatggttatggttgcaactgtacgtaattatatctcattttcatttcatttatttttaaagagcttagagatttctctttcagctaaaaacagtatagggcgtttcattgatgattgggagagggagggtggaagtgtggtaacagagtcaccttgttactgtgcacttgggatatatgctttggtccatgacagctgagcatagaacgacctcattcaggaacaaatatcgtctaaagattttgtctaagaaacccagtgctatgtaccccctagttatttacagagaaacacaataatttctataaaactgaatgtgtaaacaaaaattaaaatccagcctcaagaaaggaagagcatcttctctagtctgtctgtgtaggcccctccccagtggaacttcaaattcctttcccaatcctatttgccactctccccactcagaaaaccttttctcaaggaaacttgcccacacctccactcacatattcatggagaaatactcctagtcttgagcgttagaatgctattgtgtgaatgttgcattttgatttattaataggacatttgaatccatctttactctcaatcattcagcatatttctaatctaattttatacaccagtttataattgttctcattaaagagctgtggaacagcctgactttaaaaggaaagtaatggaaatagagaaaggagaaatcagggtaactgggcagagacaatatccgttctttcatttttatatagaaatagaattttcagctgagcatagggctgcccagctaagatgacaagaagaccaatctgccttgtagctaggaccaagttttggccaatgggatgggcagaagtgatgtgtgcagcttctaggtcatgcctttaaggggaggacacttctgctgaacttcccctatctcctactgccagtgacagaggtgtggatgtcagcatgagacatcctagaccatgcagataaggactatgcccatggatggcagatcaacaacatagcaagcacctgagtctcaatcctgggcactactgtgtcagccctagatatacccagactattacataaaagggaaattacattctctcttgtctaaactacagttgttttagatctcttttggagcagccaagcctgtgtctgacactgaagaattttattacattcttcagccctggagaatttcattaaagagacctccttgcaaagttggtaatctccacacattttgctttgcttatctaggcaggtcaagtccaaagtgcatttttccaaacgcttctgctcctctttctgcctaggagtactcttatcagtgcttggggtgggggtgctgaactgaaccatgaacttaggaagttaagctatctctgtgggagtcacgggtgctggatgagagcaggataagcaagctactagaaagagagacacaagagggctcccaagccaaaaggacttgaggccttgagccttcagggaaatggatgcatctgaagacagagtggccctcgaagcaggactggttggccgcaaaacaagagaaatggtggtggtgtcatccttgctttgcaggaagaatactctcactgagctctcttagagtacttctggcctcagtagcctgcaggaatggaaaggaaagggtttgtcaagacagctctgtgtgagcaatgtgcagcaggctcttctcaggctgaggccattaatctttcattcattgaatcacctttgctctgatgtctcattcaccaagccctcttctgctgcaatttggtttcacacctggatctcctacaatgaaagtgctgatcatagagactttgagcctttctggtctttgtgatgtggatggctcatggcaaataaataaagtcgctgcaggtcaggatttggcttcccaagttgcttgcataaagagtgaataatgcagatcttgctgcaggtgatttgggcccaggtggagttatgtttctctttgtaccataatgcatttgcattctggtgtctgcctaaggcttgggtccttttctgtagaatgagaccattttttagccctgataacccctcagggagtctctgagaccacttaatacattaaaaatccaccatgggttcctgcccttgtctaccagttttcccttggactaatggctggaagttttttatgtttgatgagtgtgacattagatggacaagttcaccccatgcctattccctgagttatattcagctctaggacacttgcccttaccctgtgcctttttcttcttccactgaaaagagcatatgagaatgtaaggaggctttccatccaggagagaaagcctgggatcctctctaggtggtaatgagaaaggttaacttttgcaaagcaacatattccttctgccatgcttaaccttgatggggtcacattccagtgtggggaggctgctgttgtaaagtgggggacccccttctaccctggtctgctctctctctgctgagagccagggatattgctagatttggcaaagcataatgttctggctctttatgagcgtatgctaaagtattcagtcttttttctaggtgagttcattttgctttgagacaaaaatcttagcatttgcccttgattttttaccctaatttgcaattttaatattatttgtgattaattttttaaaaagcttttcattttctagtctaaattaattatagtcttttattttggagaatagaaagctatgtattttcagcttgaaatatgttagaatgatgagtggggaaatagttttgtttaatggaaagagcacgtgttttagtgtcagatttttagcggtgtttgcgatatagcactttatcgttctgagccttgatttcttcatcttttagttaaaaggggatttttgcaggactgttgagataattagatactgtttgtaaagcaccagccagggcctgggatggaggacattaacagatgatgccctcctttatctttctgtacagcgggtgtgccccagagcaatgcaaggatcaaccatagatgcccaggttgtcctaaactttcaggaatccccatttgaaggtgactccataggttttctaggctgagttttgggagtttctggtagtggtggcagaaatggagttggaggaacaatgtgtgtgtgtgtgtttgtgtgtgtttgtgtgacagagacagagagactgcccagttttagggatttcaagggaaggagctgttttagcttgatcttatacaacatccctgtgatatcaaaaacttggggctgggcgtggtggctcatgcctgtaatctcagcactttgggatgctgaggcaggcagatcacctgaggtcaggagttcgagaccagcctgaccaacatggagaaaccctgtctctactaaaaatgcaaaattagctgggcgtggtggtgcatgcctgtaatcccagctactcgagaggctgaggcaggagaatctcttgaacccgggaggaggaggacacggtgagccgaaatgacaccattgcactccagcctgggcaacaagagtgaaacttggtccaaaaagaaacaaacaaacaaacaaacaaacaaacaaaaaaaaacttcggttctgtgtccattttctgtagctgaagaaacaaaaaaagaaacttgggttctgtgaagataaatcagctcagcactgggtgctgttaacaggaagggagtgggatcaattggccagtcacagatggatggggagaggcaggagaatgaccacctgtgccaacagtggagaggctctggaaggtccccatgcccctcaatgttcctaaatgtttcttctcctgcatactaatctgaaataactgaaacgccacaagttatttttttttcctctctctggaatccttgtgtctttctttctttctttttgtgctccctgtaactacacacccaggtagctccttctgaaatggtgctgtgtctgggactagtttggagaaatctggaaaacttgctcatgactgtatttaagtcactttgtctctctgggcctcttaaaattagtcacttattgaatctctgccagagccaaccagatccacaattctaaatgtaaaagattgttatccacagagttggcttctggagtgggcatcttcagccatcctagggaactgtgggtgggtaaaggttgcacgggatgctgaagacaaacttgagtcacttctcaggcaggccccagcctcactgtgggtgcctttaaggcagcagtacccaatctttttggcatcagggactggttttgtggaaaccaattttttctatggatgggaaaatgggactggtttcaggatgaaactgttccacctcagatcatcaggtattagattctaataaggagcatgcagcctagatcccttgcatgcacagttcacaatagggttctttctcctaagagaatctaatgccaccgctgatgtgacaggaggcagagctcaggcggtaatgctctcttgcccgctgctcacctcctgctgtgtggcccagtttctgacaggccatggactagtacagtgggttggggatccctgctttacgggaaaggtacaaagggagtttcccacagtttgagaaactgtcctgtcatttttagactcaagttgttgaaagcaaagccatcatccttgggattgtcctatgagtcttgccaaactgtaggacacaaggagatgacagaagtgataaagacaatttttgtctctccactaattttaggcattgtgggaattggagccaggagttctggttttgaggcccaggcttaccactgattagctcagtggacctgacatctctgggtgttgctttcttcctctgttaagtggggaaaatcgtacttgacttgtagttgaggggagatcatgtgctatggactgacttatgtcctgccacaccccaaattcctatgttaaagccctaacccctagtgtgctggtgtttggagatgggatagagttagggatatatcttttgggatataattaggtttagatgaagtcatgaagttggggctctcatgatgggattagtgccctcaccggaagagacatcatagagcatgctcttgctttctttctgtctatctctttgtctgtgtgtgtgtgtgtgtgtgtgtgtgtgtgtgtgtgtgtgtgtgttcatgtgcatgtgttttttgtgaggctggaatgggaaagctgccatctgcaagccaggaaaagacccctccccaggaatagaatctgccagccccttaatcttggactttcccctagactccagaactatgagaaatcaatgtctgttgttgaagccacccagtctatggcatttgttatggcacccttagcagatcaagacattgtggtccctccctcactcactcactcattggtctcttatcttttgagcactgtttattgtgttctgagcattgttctcagaagtgaggatacaatgaacaaaatagaccaggctctcacgtccctacagttcagtgggggaagaaagacagaaaacgaaagaaatgagataattttggattgtgataatagccttgaagatactgtaggcataatagtaggtgaaaatagttcacaatcagtgaatatttgtagcactcccacccatagctgcttctgatcactgtccgtgctatgttgccagctttggaaatgtcttcttcacctttgtcctgaatcacaggaacagtatagggcattgacacagagatggcacttcttgttttctgggacaactctatccttttgtagccccatcgctgaaatccctcccctacatcttgccccctatcaggcagcacatcgctccaacactcttggagttgggatgcagaacctgtattttgggttcttcttagaggtgatgggctgttgtcatagcaactgcttcctagacttaaccgtcagcctcagtggaggtttctcctcagcttttcaggctgtaggcaatgctttctcctcaaatgccagagctgatctaactcccctgcctctagcctgcaagctggagagactctttactttcaaggaagtctggcttttacaggttcaagcctttataagaacaccaaagcaagagcaagtccaaaaggggcctccctgcctggatgacagaggtgctggctggggcttaggtaagaagctctcctttacctcttgcccctcactgatctttccagacccctggggaggcttatgcagggggctctggcggcaatttccctatccattttgggttgtgttagttttcaggtttctctgctgtttggatcctgatgttagattcaaaggccagatttataaggtcaggagaatcaaagacggccagtgactcacacactttcatgtttctcagccctggcctgttggcaagtttctggacccacttgtaaccactttcctggagccagtgcaggtaaaggaaaggagtttagcaaacagggaaggggtgggcagcctgcctgaacctgaacctgagcctgggcctgtgatgtggtcaggctagtgtgccccaccagccctgggcagacgccgggccagggcacacaccacttggtgcccactggcgcctgggagagctcctgggtcccctgcagggtgggactggctgggtcatctgccctcagtgctgctatggggggtgctctgtgaggtgggagcagccagggagagaaacggcagggcgtgttggtgaggctcctataaacgtgcacttggctgtgtgccttcaatgctggcaggcatgggcttctgttctggcttctcagagatctttaggagaagagagttatgttcacttctgtaatcctccttctcgaatcttcagactatgggtcatgacccatagtggggcaaaaaccaatgtagtggattacacacaacatggaaaaacaaggagaaagaaaagatattaatgttaattttttaggcacagtaatggcaatgcagctgtgtaagagaatgtcattattcttgggagatacacgatgaactattttggtgttgaatatcatgaagtttgtcatctactttcaaacagttcaaccaaaaaatgtctctttgtgtgtgcatgtgtgtgtgtgtgcatgtgtgtgtgtgtgtgtgcctgtattgagaggaaggtagagtaatatggtacactgtttactattggtaggcctaggtcaatggttctcaatggactgtgggtgattttacccctcagaaaacaatggcatttttggttgtaatatctgggtgtgcgtatgaggtactaatggcatctagtgggtaaaggccaggcatagccctaaatatcctgcaatgcacagatggcccccccacagcagagttatccagcccagaatgtcaatagtgctgatgttgagaaactctgctctagggtaaaaagtgtttttgtatcattctttcaacatttctgtaaggttgaaaaatttcaaaagtaaataaataaatgaaacacatagactagtaaagaagtcccaggccaggcgccgtggctcacacctgtaatcccagcactttgggaggccgaggcgggtggatcacttgaagtcaggagttcgagaccagcctggccaacatagtgaaaccctgtctctactaaaaatacaaaaattagccaggtgttatggtgggtgcctgtaatcccaggtactcgggaggctgaggcaggagaatcgcttgaaccctggaggcagaggttgcagcgagccaagatcacgccactgcaccccagcctgggcgacagagcgagactccgtctcgaaaaaaaaagaagtctcggggtacgtcacgtgttgccacagtaaagataattatttggtagcacttattttgtttcagtcatttatctatgggtgtgtgaactgggctgcaatatgtaagtatttcttatgggtattgtgctcaatatgtttgaaaagcactgcataatccatatccttccggctgtgcttgctgttggagagatagagaagcttgtcaaactctactcactttcaagtcatccatagtgataatataattttgtgtttacgatgttccatgcactgtgctaagcagtttacatgcattatttgcattatcttatttaaccttcacaggaacacttgtgaagtgggtattactcctatcctcattttatagacacactgaggcttaggttaaatggatggcccaagggcacacagctaataatggaagaacagaggcttagatctcttagactacaaaatccaagcttttaaatattatgccatctgcctctaaccctctcaaagcttccaaactgaatattgcttgctttggaagtgagaggagcttcagtctcctgaaggttgaaatgtgtggttgatcaagtagccatgccctctccctcttccattccttcctctggagtcagtgtatgtgagcgtgagtgctgttttgatcttcgaaggacaacggtgttcatcctgaagtggtgaaaatttgaccacaaaataatctttagggttgaatggcaaaaaagcaacaagtgatcatgaaaatatttgactcaaatttcaacttgaccgagtcgtacctacatacagatttccccaaagctcagagtgctgcgtttcagggtcagaaatgaggggctcatacccctccttccacctgggcaatttttagagtgtaaacaaagcttcaacaagttgaccaggatccttgacagtggccccaattccatgtggtcattatacagatgccaggaggccccccaaagtaagtgtgggatctcaagagatgaccaagtccagtctcagaagggagagcactgacttctggttaggatgctcttttggctaaaggccacacctggttctaacccgcattagaaactttcacttacccttaactgttaagctctcacttcccacatggaattggtcactcatcctggcaattctaatgggctgtgctttctttctgcattgactttggaaaggtcttcacgttgacttccatctccatcacatgtcacctagagtccaggtcctagaccgttctctattaattgtccacacagaagccctgagtcaggcatcaacaaacatgagaaatgaaaatcatgaacggccacctagtaacatgtgaaatgcaaaactcaatacaaacatttcattgccacagatgaactagggagaccttaaacttgatcatccactttgctgatagggactttctggagcggtttccccggtaggattttctttggagagatgctggaagttcagctcatggttgctgcttgtgaggctaactgttcatggcttgtaagcggaggctacctgctcagtttgtggacctggtcagacaggaggagctggcaacattccttcctattgtttagcacgttttataaatgaagttaaataaagccccccggagaagatttattgcccacagatcacttcaaatagagagctctgatcttagttaacttatttgttaaaaaagtttttatcttcagatgtttgggcaggcaagtgatttggtctctgtggtgagtgtagggccttcccaccttagctcttagtttggtaggtagctcacagtaaggggttgtacaggctggacagagggaactgtgctattttaatgctggagtgagatgtcacatctccacttggctgtaagaacagtccattggttggctgtgtgaaccctcaggagagggaatgatgactcttcatcttctggaaggaaaacctgggaacagcctggtgataacctgttctttgtcactcttctttttgctgcccagtcctccaggcttttaggctctggtgtgcaacccctgctgtggtcatttgagaggagataaaaggaatcttctgagagccagaagttctgtcttcagcaccagctgggagaccctctgtcaagatgagggttctattgatccatgcaactgccgccaaccagaattttagggttttgccccaataggtatgtagttgtgattcactccagcctctgctgtagctatcttgggaggttagtaatgatttgcttctattttattagttttacaacttcccactttcactcttaaatcacctgtagctgcaatacacaagggatcttcatacatagacggtttccacagaactattgaaacaaaggttgagtcatcacacgattttgttagtggatgggagaaagccttgtagtggtactctttccccacttcttttattgtggtaaaatataggtaacataaaatataccattttaactttttttttttttttttttttgagacggagtctcattctgtcacccaggctggagtgtagtggcgcgacctcagctcactgcaagctccgcctcccgggttcacgccattctccagcctcagcctgctaagtagctgggactacagatgcccgccaccacgcctggctaattttttgtatttttagtagagatggggtttcaccgtgttagccaggatggtcttgatctcctgacctggtgatccacccaccttggcctcccaaagtgctgggattacaggcgtgagccaccacgcctggcccattttaaccatttttaaagcatatacttcaggccaggtgcagtggctcacgtgtgtaatcccaggattttgagaggccgaagcctgctgatggcttgagcccaggagtttgagaccagcctgggcaacatggtgaaaccccatctctaccaaaaacaaaacaaaacaaaacaaaacaaacaaaaattagtctggcacggtgtgtgcatctgtagtcccagctatttgggagctgaggtcagaggattgattgagcccgggaggtcaaggctgcagtgagccatgattgtgtcactgcactccagcctgggtgacagagtaagaccctgtctcaataaataaataaataaataaataaataaataaaatctatagttcaatgatattaaatacattcacactgttgtgcaaccattaccaccattcatatctacaacttttctaatcttgtcaaacgtttttcccacttaaaaaaaattgagttattatttcacatatcataaaacacaccttttttccagtgtacaatttgatggtttttaggtttattcacaagattgtgcagccatcaccactatctacttgcagaacattttcatcttttatcacttttgaactctgattttccacacagtatcatcctctttgccatcagatgcactggtgatgcaacctttcttagaagagtgctccactattgtctctggaattttctcccaagctcctgacagccatctgcaaggttggatactgacgctttcctgactgtggctaatggtgttaggcgatggcaaccagggcgtatttacccccctacccgggctgacagtgattctatgatacatatactaatttagtgatgttaaaatgtgaaaactgtgtgccttagaaccggtgaactcagtacttatctttccagctccagccctgaagttgctacatctctcgtgactcactcccttactcagttctctggggggcatcaattttaccattctgagctccaaggtactttggccagaaccctgttcattaacccacccattgtatcagcctcatctatacttgtttacatattgtctctctccctagaccaggaacccctgctcaggagacatgcaaggacatgttattcctacttgtctccactgtgcctagtatcatgtaaggaataaagtaagtacttgatagccaggcgtggtggctcacgcctgtaatcccagcactttgggaggctgaggagggcagatcatgaagtcaggagatcaagaccatcctggctaacatgctgaaaccccttctctactaaaaatacaaaaaattagccgggcgtggttgcgggcgcctgtagtcccagctactcgggaggctgaggcaggagaatggcgtgaaactgggaggcagagcttgcagtgagcggagattgtgccactgcactccagcctgggcaatagagcgagactccgtctcaaaaaaaaaaaaaaaaaagtaagtacttgataaatgtttattgactaagccatgatgataagagcctacaaattatagcagaatggggttgacatgagaatacctacctgggtgttcatctccttttggtgcagcttactggcaaaattaaagacaacttctagctaggtaatgagtcattcaacttaaaatgtaaccgaagaaaaataatctgagaagttgggaaagcacaatgtggtatgaaaacatggaaaataaagaattgggttgtttttgttttgttttgtttgagatggagtcttgttctgtcattcaggctggagtgcggtggtgcaatctcagctcactgcaccctccacttcccaggttcaagcgattcttctgcctcagcctcctgagtagctgagattacagatgtgcaccaccgcatctggctaatttttatatttttagtaaagacggggtttcaccatgttggccaggctggtcccaaattcctgacctcaagtgatccacctgcctcggcctcccaaagtgctgggattacaggcatgagccaccgcgcccggccagaattgggttgttaatggcagtgaaaatagaggatgtagttgtgcttaggcctaggaaagagacagaagattaggatttcctagatcaccagccaaagcctaggggctcattgcctggctgaggtgcgagttctgggggcttggcagatctaggggtgaacttgactaggaccatccagatccctaggacttggtgcatgtagtaagtaacctatggattatatttcaggttcctccaccaggaggagggtatgtggaagacttgcctgttgtaactggccatgcagttcttatgataaactggctttcttattttatgtagtaatcttgatatagggctaacaaggattcagcttggtattacctgatggcttctgtatgagtccctgccagtcattgctccacccagctgtcagcaataattacctgctgcaggctggacgggggccaggctggaatccaggatcccctgggagggcagtgtgttagctcttttcccactaatgtgtggatctggaaattgtctccgtgcctgtgctgagtgtcctaagggtgtgggagcctgtccctgtcagggacagcctcccatgtgcagccagtccgctggccagccttgtgcctgggtctctgctttccttttcttttggaacctgtacctggcatctctctcaactccaagggcctccctgagctctgagtcatgcatccttctgatcaaagaagcctttttgatttggacactgcgtcccttttcttctccagactagaaccctagggtatggatgctatgctgcattttacagagttttctctgccctttgcgatgtggtcatttgaaatggggactctttcttgagtggcgacaagtcttatccgtcctggttaatttccccagctcttgcccctgttttagtctatttcttctttcccagtgctttgtgatcaggacattctagttaggccagaagactgataaaagtgagtttctagatctgtaaaactgagaacctaaacctggaccaagaaggactgtactagtggagttctctgagaggcccatcttgaaataggcttcttctcttagccagcataacaaagcttcacagggaacagtggccatgttatctaggcttttgtgggggcaagtgtcttctccaagtcctcactgctcagctgttacctctgcctcatactgctacaagttgctacttaaaccagtagcactggcatccctgggagtttgtcaaagatgcagagtcctgggcccaacttcagacctcctgaattaagatctgcattttaatatgaagtccaaatgattcacatccacctagaactctgaggaatacttacctaaaatactggtgactgcagcactagcatttgctgctgtggagtttattatgtaccggcgttaaagagtctcatgttgattgagtacacaccatgtgccggtgcctttttcactaccaagccacagtgtctgagaataagatccttagtttgcatatagctcgttcatccactcatttaactctaatttcatgatcaatgtgtgctggcactagaaatgcaaaagcgaaaaagacatgggccttgatcacaatgagctcataatttctgtgaggctgtgatggcagcacagtgccttgcacagcaggtactgagtgagtgtttccaaggtggggcagatcccagcaggttggtgtgggacccttatccagctagcctggatgtggagcagtgggtgggggtggcacttgctatgtggaacccaagttgaaggtggggaactcaatgtataaaagggcatcattattactgatgttaaacatgaagaagtaccacgtggccactcagaagcatggacattttgtttgtttggggtttttttggagatggagtcttgctctgttgtccaggctggagtgcagtggcacgatcttggctcactgcaacctctgcctcccgggttcaagtgattctcctgcctcagcctccctagtagctgggactacaggtgcacaccgccacacccagcctttttttttgtgtgtattttagtagagatggtgtttcaccgtgttgcccaggctggtcttgaactcctgagctcaggcagtctgcctgccttggcctcccaaagtgttaggattacaggcatgagccaccatgcccggccagcatggacattttgaactgaaactgatgttaacatgaaacagaaaacaaacaagctgcattcttcagccagcatgctcagtaagttggcatttttattttttcttaagttggcatttttttgttttatttgttcacttaagtccaggggtctgaaaactggcccatgagccaagtccagaccattgctttattttattttatttatttaattaattaatttagagatagggtctattgcccaggctggcgtgcagtggcgccatcacagctcactgtagccttgaacgcccgagctcaagctaccctcttgcctcaccctccagaatagttaggatcacaggcatgcacctggctaatttttaaaatttttgtagagaaagggtttcactatattgcccaggctggtcttgaactgctgggctcaagcaatcctcccaccctggcctcccaaactgctgggattataggtgtgagccactgcgcccagctgtattgcttgtttttgtaaataaagttttattggaagatagccatgctcatttgttacatatcatctatggctgctttcgtgatgcaatggcagagtggcgtagttgcaaaagagctggaaatattaattatctggacctttatagaaaaagtttgtggccaggctcggtggctcacacctgtaatcctagcactttgggaggccgagacgggtggatcacttgaggtcaggagttcaaaaccagcttggccatcatggtgaaaccttttctctactaaaaatacaaaaaattagctgggcatggtggtgtgcgcctgtaattccagctacacaggaggctgaggcaggagaatcgcttgaacccaggaggtggaggttgcagtgagccgagattgtgccaatgtactccaccctgggctacagagtgagactccatctcaaaaaaaaaaaaaagaaaaaaagaaagaaagaaaaaaaaaagaaaaagcttgctgattcctgatcttagtcttctactatctaaaattaaaaaaaatcttttaaattacttttaatgtatacatatatttagatagaaaaaaatccacaataatgtaacaaaggcctctgtgattttttttatggggaatctgatttggaggaattaggggaatggaacacttttaattttttcttaatatgctttaatactttttggattttaaatgatcagattctattacttttatatttaaaaagactatcttattatattaagctatttaattatatgaaactatttttattatattaaaaataacagactatttttaattaccaaagctatagagtgtttcttataaatattttggaaaatacggagaagcaaaaagtaaattaaaaccacccattattgtgccatccagaaatttagatactgttactattttggtgcatattcttcctctttcatttgaatgtgttactattttggtgtccattcttctagtcttttgtctgagtgtgtatgagtgcatgtgtgtatatatatatacatatttaatgtactcattatcttttgtgaactattttttaaaatttaataatataatgtgaccgttttttctgggttgctaaatagttgcctgtttaacattttattttattttattttgagacagggtctcactttgtcacccaggctggagtgcagtgatgcattcactgctcattaacatcctgggcacaagtgatcctcctacctcagcctcctgagtagctgggactataagtgtgcactaccacgcctgactaattttttttttttgagacccagtctcactctgtcgcccaggctggagtgcagtggcgtgatcttggctcactgtaacctccacctcctaggttcaagtgattctcctgcttcagtctcccaagtagctgagattacaatgcctgactaatttttaaaaattcttttgcagagatgaggtttcactatgttgtccaggctggtctcaagcccttgagctcaagtgatcctcccgccttggcctcccaaaatggtgggattataggcatgagccaccatgctcagcctacttaacattttaaatggttgccgagtattgtatcctatggagatgtataacaatgtgtttaactaatttcctgttgttggaaatttacattgtttccagttttaaactcttataaacaaagttatgataaatatgcttgtagataaatctttgcagatatccttgtgacttttatagaataagtttgtgtacgttgaatcgctgggctacagtgtctgcaatcttttaggtttttcttccccttttttttgagttacttgttgataagttgtgctactgtaaatcctcaccggtggtgtctgaaaatgcttgcttcctggaaccttcaacttggtattaccaaaattatcaacagcagtatatttgccacttgcactgttggttttatgttttctcttctttttatttttattttttggtttgggtgaagtctcactctgttactcaggctggagtgcagtgggacaatcatagctcactacagcctcgatctcctgggctcaaatgatcctcctgcctcagcctcctgagtagctgggactacaggtgcatgccagcatgcccagctaatttaaaaaattattttttttttttgcagaaactggggtctcactatgttgcccaggctggtcttgaacttctgggctcaaacagtctcctgccttgatctcccaaagtgctgggattacaggcatgagccactgcacctggcctggttttgtgttttcttagtaaataggtctcctcttccgatgggccactgaagtctcagcctctcactggaatgttgagcagtagtctttaccctacattttctaggacaatttaagtcctgaactatgaatacttggcggtactagcaatgaggatcattagccagttctggacgttagccacagtataggcatgtccctcttcacctgcctcactcaaacacaggcgtgacgtgatgaggctggtgaggttacatggtctggcatgtaataggtcacacactccctccatgacaaaggaaggctttgtcacgagggtggatgatctcttttcttccatccttggttaaaattcttcaaagagtagtatcaactttcggcttccattcccaaatcccgtaaggttctgctgaaattgaaaacgcagtaaggaacttctaacagcctgattgagggccttccttttgggtcttattctcccttacctctctgtggcttttggtatttgacttcttggaaggtgtcttgaccacagcccaggttcaactgttcatactcagtatcttttgctagctcttctctccttcaattcctttttaaaattaatattcctaagcttctatccttagttcttgtctctttttcttcatgctttatgcttataatcttctaaagctgtcatctgcagacgatttacctactctcctttggccacctcaaaatcaacctgtccaaaacacagctcatcatcttgttgtctccttacctcgggactggctcttcttcctgggcttcctttctctgaccggcatcatcgttgactgacggctccacttagaaacctcggaggcatttctttttctgctttgtgccttccctgtcaccatctgaccctgctggtttgctgtgggaatgtttgtttttgaatatctggaatccagccttcctcgtccttggcttaaagtaattgcagagactttctcttccatttttttgcttacggtttctcccaggtaaattctacctttcatgcgtctgccacagctatctttctaccatataaatgtcactgagtcctttctccattaaaaaaaaaaaaacctcttggtgactcctcatagttgaccaaggccttttttttttttttttgagatgggatttcaccatgttgcccaggctggagtgcagtggctattcacaggcatgatcccactactgatcagcatgggagttttgacctgcttagtttctgacctggcctggtacactctgcctaggcaacctggtggtcccctgctccagggaggtcaccatattgatgacaaacctactgtagatacctgatcggcgtggtgcaccgtagcctagaactcccgggcttgagcaatcctcttgcctcggcctcctaaagtgttggaattacaggtgtgagccactgcccagccaccaaggccttcagcatgtggctaccgccttcctattctggctcccatcctgtatctcctcctgccacacatggagcctgcacctcagccagctctcgtctctaatgagtttccctctggttcccattgacgctgtgtcctccatccacagtgcccttctggacttggagagatcttcttcttccttccctgacctcctgagaccttccctgagcctctgaggcctttcctctcctttccccagcattactcacttcctgctctctggcctttggcacctcagtcaaatcactggtaaagcagttaacacattgttattccagttaatcacatgtcttccccacctcccctgctaatgatgagtttgctgtggagaggaccttgccttaccacctctgcattgccagggcatagaacagtgccaggcatagggctaagtcactctctaaatgtctgtctaatgatcttacttaccaagcttgttcagtcactgttattttaaaatgcagttgttagactcctagttttttttaaatgtgactaaagctgagttgatgtcattattgatgatcaacttccacactgagctaagtttttgttttcattcatcacacacacatcttatctataagaggagatggaggcttccttgaaattagtgttctttttgtagttctattacaaattcagaaagagtaggcctccggaaaattctgtgcttgttttcatctctaaacaggaagtccaaaggcaaataaaaatgaagacaatcccagtttgcaaacagtcaaaatttttagcaactctctcaccaagtactctgggattttagcccagtcctactaatttagaggaaggcatttgctcgggctgaccatgcctggtgcaattgatgggcccttagtgcgttggcaggcatacttgcagcttgcaggacttcttgagaagggcacttcacctctctgagccttaatgccctcatctgtaaaatggaaacattgatcctgcaattatagggtaattttaagggttaaaggacaaaaatgcatgggagccctgctttgggcctggcatgtagtaaccgctcaacaaatcatagctgcaggccgggtgcggtggctcacgcctgtaatcccagcactttgggaggccaaggctggcggatcacgaggtcaggaaatcgagaccatcctggctaacacgggaaaccccgtctctactaaaaatacaaaaaattagccgggcgtagtggcgggcgcctgtagtcccagctactcgctcctgaggcagaagaatggcgtgaacccgggaggcggagcttgcagtgagctgagatggcaccactgcactccagcctgggcgacagagggagactccgtctcaaaaaaaaaaaaaaaaaaatcatagctgctgagagatgttgcccattgccagcacatagaagtgagccaggaagtttctgctacttgcaggcttaactcttgaccagtccaggaaatactggtgctttaccctaacacaagagacgttttaactgagattacctgaagttgggcaggtgcaaagtggttaggaagtgccctcttgctttacaatccagtgaccagggaagaggcttttagtcatttatggatggttttcagggcttcttttaagccctaaaactgtgccatcaattttatgtgaaagtacatttgaccaggcaaagagtctttggtttttatcaatttctcagtggagtctgtgaccctaaaaatgctaagaaccactagcctggagttttacagactgagacatttgaatgtagattttgtatctcataatgaatgatggaaacagtgtcttacgttcagagtagaagtccattctagcctggatccactgccagcctgcagtgtggctttggacatccagatggaaaaatgagagctccttagtcaagactagagtgtgaaacaatttggctttgttatagctcatgtccttgggacaggccctgttctgctgggaactcttagacctcaccttgaacaggagctgggctgcctgtaggaggctgtggcaggctctggctctgggaatgatgcttttaggttgtgtgtgtgtgtgtgtgtgtgtgtgtgtgtgtatgcatgtgtgtgagactggatctgcatggatcctgggtggcagatgtttgcaccagctaccaggggtgggaggtgcagtgtgtaatccaggaactttataaaagggggatatccagtgatcctcatgtaaatggaagacaaaccttggccatattaagctggggctctaaccacctcctgttagagcggtccagcaggtccaggaggctcacagctcccacaacaggcctggagaggacaaagatgacccatcctgaaggaccatcttcctggcatgatgtcaggcttggtggctcgggtgcctttccttccatctgggatgagatgctgcagggggccttctccagctggccttgtagggttggccaaaatacagaaacatctagctcttgacttcctctctgaggctgaaggaagcattgaccagaaatcgggtgtgttcagactacctgactctgcctcatttcaacaccccggctttagtgtgatagggtgtcgtctaggggcattccttgtctgcacagtgtttccaatggaaatttctgtgttcagaaccaggtagatgcttcctttgacaggatctcactgcttcttgtacttagagaccattctgcttctactctgaattattcagcctgccctgcaagcgaatggaagtcctttatgttcctcgttgaaggagaaaaagattatgtcatgagatttcagctcgagtttgtcttcatgcatattacattcaggtttttacaatgagtgtttgatttgcagtggaggaatatttatttccaaatcctccaaatgcttctgaaggcagcctccacgcagattttaattgctaaacctacttattctgactcagtgtctgtttggtaaaatgtctggagatacaagaaagtggggagacaagtgagctgggcccagatgctcctctatgactaacagaatgtccacccagagtggggagatgagcagcccactgccatgtcataggtgggtgggtttctcatagctcttatttaaagctgtgccctattgtactaaaattacaatttgtgaataagcattgaattgggattgttgggctgagctgactcacctctggtaactgggactgggtctgaggaatgtcttcgtgtcacagtcaactcaggcaagaggagaaagcagaatatgccccagtgggggaaccggctcacggctttcctgattgtcatttctgcaggtgacccgagtccctgggctttctctccactcgcttgctctgtcccttaagaagggccagcaggtggatctcaatgagaaatgcttactggggttttgggcgtttaggtcatgtaccctgcatcccatcttgaggcagcccttgcagcaggaggtggggacacacagacacttggaaagtggtttcagatccagatttggatgtaacctaaaactgtcaccattctaagcaatggcttttagatcttggacagagtaggcaatctttcaaaggtgactaggccactctgccatgctctgtgatcctggtaggtgggagtaagctgccttttgtaagccgaagctcctgtgctcagtggctggttggggcggctcttgtgaagtgttggtgtgggggcctcccttgtgccatctgggtgtttatgttgtaggatgttaatatgtcatggggctgcttccaagtggccctattcagatgttccagtgacaaatggattctggagatgaatgtgggtgagggaactactagtatctttttccgttaaccagtttcatttgaattcactattgcatgacttgatcaacattttgaaaaacagagaataaagttctgaggtcacagattttaggaagcataattttcttagaaatggaatagaaaaacctcagaacacaggaccctggcaggaggattggacagtgggatgacacaaaagctataacctagtgattctcagtgggggtgacgttatctctgggaatatctggcaatggctgcagacactttcaattatcatggctgagcgctcctggtatccagtgcagagaggccagggatactgctaaagatcctacaagagccaggacggcccccacaataaagaattacctgtccccagatgttgacagtgccactcttgagaaaccctgttataaatgggccccaatgcaccgcaattacatgtacacattctcttcctcctatgaactgtcttttgtattttgcatgtaatgcttaccaaacattatgggagcatcatctgcatgccaggtgcagtactgtgggtaagcgggaggttaaaaaatgactgagaccagtgaggaagacgcgcatctacacagctctctcatctagtgcatttagattcatgtctcccctttcctaggcggaaagcctcctggtagaaagtgtatcctttagactctcacagcatcagccgcgatgcctaatggtagcctttgttctcagcaaatgcctgtcatacattcaggagtggggtcggaaacaaggcaaacttccctgtaggacctgtactatggttcagtacgggagagttcacgtggtccttgtgctgtttctattcctcttctcatccgggtagcctcccactccataggacagacatttcagtagctgagatggactcaaaggtgactaagagaggccggagctcatcctcttgcacagtagtgattattcatggctgaccaggagatttctgaagaaaagcctccacatctggcctcaggaagccctgctcaggagggcaattcttgcttgagggtgtcctggcaagggagctttggagcaggaaaatcatctggtcatcagagttcaatcattcttaccacccttgatggcactttgaaccacaccagctcagtggactgtgaaggtttgtttcatagaagaatttggggccaggcgcagtggctcacgcctgtaatcccagcactttgggaggccgaggcgggccgatcatgaggtcaggagattgagaccatcctggctaacacggtgaaaccccctaaaaaatacaaaaaaaaaaaaaaattagcctggcgtggcggtgggcgcctgtactcccagctactcgggaggctgaggcaggagaatggcatgaacccgggaggcagagcttgcagtgagccgagatcgtgctccagcctgggcaacagagcaagactctgtctcaaaaaaaaaaaaaaaaaaaaaaaggaaatttgggctggagggtgatggaaaagccagaaggtacgaactctactcaaggcataaaatttgaaggctgcctgggcctgccctaactccaccccagcccatttatggatatgtccccatttctgcttcattggaacaagaatgccaggacagtttctttgctgatgggcttctagcataatatatctctttactatcacagatttatattcctcatagtctacaccaaagagcccagggtggagtggaagatgctgcagagttattgcaagggggtctgtgacccgtgcaacaagccctgcctgtagagcaaatatatcttgccttacgcatgtacgttctactatttttcaaatgcatatttcacacttctatgttctactgtttttcaaatatatataaatactactgtgattacaataaagggattgattacaaagtgtggaattcagagtgaattgtcattcctctgctactcttgcctcaaaccacaaccaatgtcaaatcagtcgcctagcttgcttccgatttcttcctacttccacctcttcagtcaagaaccaggccttgtcagttactccttcacagtctcacatatgtgtcctttcttcagcctttgtcacccaacgctagcccttatcactcctccactcacggggaccagggctgcccacgtggtcccgaggcctgaatccagagcgtccctcccactgccaccaagtacatcttcctactggcccacacaagtccttggtgtcaaaatatttagggcttccagtctccttaacctgatatcccacctgctttacagtgtggcatgaagaactatctcttgaacacaaaacaagtcaccttatcatttacattgtctaatatttaaaaaacaacttttaaaaaccagttttgtggccaggcatggtggctcacgcctgtaatcccagcactttgggaggccgaggcgcgtcatgaggtcaggagtttgagaccagcctggccaacacatcgaaaccgcgtttcttctaaaaatacaaaaattagctgggcatggtggcggatgcctgtaatcccagctgctagggaggctgaggcaggagaattgcttgaacccaggaggcagatgttgcagttagccaagattgcaccactgaactccagctccggcagcagagtgagactctgtctcaaaaaaaaaaaaaatcagttttgtgttccattaaaatacattaagtcgggtgtggtagcatgtgtctgtaatcccagcactttaggaggctgaggcaggaggatcccttgaggccaggagttggagaccagcctggacaacatagcgagaccctgtctcaaaaaaaaaaaaaaaataggacagcaactgagacttaataaaaatgtcttccatgtattttttctaaaaccagttaatttatatttgtggaataattttgtgctcactaaacatgtacatacaacgctattatggacttcaatgaacagaaagctttttccattgtttccagatcactctttctctctcttttttttttttttttttttgagacggagtctggctctgtaacccaggctggagtgcagtggcgccatctcggctcactgcaagctccgcctcccgggttcacgccattctcctgcctcagcctccagagtagctgggactacaggctcctgccaccacgcctggctaattatttttgtatttttagtagagacggggtttcactgtgttagccaggatggtcttaatctcctgacctcatgatctgcccacctcggcctcccaaagtgctgggattacaggtatgagccaccgcgcccagcctctctcttttttttaaagaacaggtgttcgccaggcacggtggctcacgcctgtaatcccaggactttgggaggccaaggcgggcggatcacgaggtcaggagttcgaaaccagcctggccaacatggtgaaaccccgtctctactaaaaaaatgaaaattagccgggcgtggtggcatgtgtctgtaatcccagctactcaggaggctgaggcaggagaatcacttgaacccgggaggcagaggttgcagtgagccaagatcgcgccactgcactccagcctgggcgacagagcgagactctgtctcaaaacaacaacaaaaaacaaacaaacaacaacaacaacaacaacaaaaacaggtgttcacctcttattcccttgaaataagttgttgaaaaatcctgttgttctacacagccctgctcaccaaacagtgtgagagctgtgggcttggtttaccgcccgcaggttctgatcccacgtcttctttgccctggttggagaagggatgtgaggagcggagaagccgtggcccaaacaggacctgctggctccctcttgtggagaatagggagaaaacatgcgggaagaaaaggggctctgtatatcggcgaatactattttactgaaacaaccccgggaaatgtgatctgaaaaatatggtctgagacagagttgtattttgctgtgtattgcaaaagggattggaagtcactgggtgggggagtataaattgaataactagaatacgcagaagattaaaaaaattttagcccatcattttgttgttggcccagagtaaacctctctcccagggcaattcataaggaacaaactggcttggggatctcttttcccccctctttcccttctcgtggtgggaggaggaacagaattacccaaaggggtgccgcggctgaggtgtatgttcctggcagggataaggcacgggcgccttggctcacccaacagtccgggcaggcctccagggtcctgcgtgtggacaccaaataccaaaaaccaactgaattgtatgctttaaagtgatggattttatggtatgcaaattacatctcaattttagaaaggaaatattttattgagccagttgttaacttgatttaaaaattgtattcagacacatggtacaacacgtgggcctcatttgtactcttgcccctggggtcctgcaaatgtcaccaaggagtctgcacatcgaggtgtgaaatggcagtgggtgctttgtcaactcagattttcaaggaacctggagcttagcagttgaggtggagagtggtaggaaataaggctggatcatagacaaggccaggtcctggagggcttatgaactgtgagatgaactcagcctttattggaggtgagtgggatggacaggtcttagttgtaggttggcagtgaggaatcttttttttttttgagatgcagtctcactctgtcacccaggctggagtgcagtggtgtgattttggctcactgcaacttctgcctcccgggttcaagtgattcttctgcctcaccctcctgagtagctgggactacaggtgcatgccaccacagctggctaatttttgtaattttagtagagtcggggtttcaccatattaagccaggctggtcttgaactcctgacctcgtgatctgcccgcctcggcctcccaaagtgctgggattacagatgtaagccaccacgcctggctgattttgcattttcaaataaacagccatacctttttactttccactctagcagctggtggggaggacagatctgagagggaccgttctggagtcatcgagggcagtcggctgttgcattcatctaggagagaggtgtgccaggcctgaaccctaaggcagtgacagtagaaataaggcagaggagagggcaggtcatggaaatgcttagccataaactcagaggcatggggatagtggtggagtgtgtggaagagaaggtgggggaagagtcaaaggtgactcatcattgtgggtagtggtggcaaaagtgggcaggcttggggcatgtggagggagaggacctgctgactgagaaaatgaccagtgggtgttagataagaagaggtcaagcccggaggctggggtgtggagtcttcatcatatcctactcaaccacaagttgggtgaagatgaactctcgtggtgcttgaggggaaggatgaggttggtcccttgggaaacaccagtgtcatctagagcaagaagtgggagacccagcctgccgcagagtgttctaagaagggcgtggtcagtggaccagatgccataagaccatcaaggagaatcaggaggtacaagccctggatttagtgacagtgatgatgatgagtgccttttgccagctggtacatttcagcgggatgttgcatgaaacagccgggtctcagtgggcaaggaacaagtgtgaggccaggaagtggaggcagagagtgcagtcgactgcaaagggcatgactccgagcagcagaaggatgggttgagggagggcttttttttttttttttttttttaaagatcagaaagcacctgcaggattcaaaccccagcacagggagttagagagacagaaagtctggcatgaggaagtaaccacttgagccaaagctgacccaagggagggcttcatctaagggagaagaggaggtggttacatcattgcgttttatttatttatttgctttttttttttttgagacggagtcttgctctgttgcccaggctggagtgtagtggcgtgatctcagctcactgcaacctctgcctccctcctcagcctcccaagtagctgggattaaaagcatgcaccaccacgcccagctaatttttgtagttttagtacagacagggtttcaccatgttggccaggctggtcttgaactcttgaccttaagtgacccacctgcctcggccccccaaagtgctgggattacaggcgtgagccaccgtgccaggtcttatttgctatttttaataaaaatattaatgtacgtggtaaaaaaatcaaacactacagcaaatgtataaaatgaaaagtaaaattctgtacttttcagactccctcgtctctccttgtccaaaggtaacagttatgatcaatttcttatatattcatccagaaaaaattttatacatatggaattctctttaaagatgagagagatttggctgactttaaatactgatggaaaagagctatatagagaaaacggtgaagacagacggaaggctgatgggagagaactggtagccagctcactcccgggggtggggaaggaacccaggggaggggagagaagaggcctggcttggtggtggaaatgcaggtttttgctgggactggagggaagggcagggagcagggatggtggaagtgaggtcaaagtgtgcaaaaccatgatttatgatgtcagcggtggggtgattcaggaagatggtgtaggtgtggcagaggccatgaacatgggtggatggagtggaggtgaaagtcatggtggttggggatcgttgagcccgggatgttggatgagttcttcacacggatattaaaatctcttaagatgatggtgggtgccaaagttctcaatggaggtaaagcatagtctggaaagaggaatgtcagaagagaaaaagccaaggatggaagctaacgtcctggaagcaactgggagcaggaagcaactgggagcaggaagcatatcttctctgtcttcttgccttgggtcctgggcatgtgggacaataagcagcctctccttgcggaagcaggaggtggatggtgcatttagcagaaaggctgagaagcagagggggttgtcttcacgggaacaaggtctccagggtgttccaggtggggaaagggccttggggaagtggggtggctatcagtggcccaaggaaccggctgggggaggcagccagcaggaaggagaaaacgtgggatggggtggataggatgtgtgggaggactatggatgaagtaatgggcctcagtgctcccatctttgatgcctatagttttggcagctgctgagctctctcggccaggtggcatgacagtcaccccagagcccatgggtggaagcagttgtatctggtttgaataagggttgggtgttgccttcgtttgctagggctgccaataacaaggtaccacagaccgaggggcttcagcaggagaaatttgttgtctcacagttctggagctcggagtcaaatcaaggtgcttgtcaggtcggttccttttgaggaccatgagggacagatctgttccaggcctctcttcttggctcatagatggccatcttcttctctctatgtctcctctatcctcccctcccctccttttccctctgcttctttcctctcctcctcttctcttttatcttcttttctagacagagtctcactctgccccccaggctggagtgcagtggtgcaatcatggttcactgcaccctcaacctccctgggctcagttgatcctccctcctcagcctccctagtaggtgggactacaggcacttgtcaccatgccaggctaatttttgtaatttttatagagatgcagttttgccatgttgcccaggctagtctccagctcccgggctcaagccttggcttcccacagtgctgggattacagacatcagccactgtgcctgggccctactatgtcttttcatatcatttcccctttatattaatacatgtctgtctcccaatttcccgcttttataaggacaccagtcagattagattcgggctcaccctagtgacctcattttaacttaattacctctgtaaagaccctatctctctgaataacagtacattctgagctgctggaggtaggatttcaacatatgaattttgggggaggggtgcacaattcagcccatggcaggtgtccttgggcaagatacataatcattcttagctccagctgccctggctattaactggtgatcatagcagccttaatccactgcattgttgtaaggatgaagtaagaacagtgcctggcacattttaagtgtttgataccaattctcatcatcatcatcatcatcatcatcattatcatcatcatcatcatcaccatctggaccttctccctgggtttggagactagtgaacagcaaaggcagtgagcttctctatcattctcctgagctcatcatctcaggtagggagctcacagagagacccaggtcaggtctatagggaatagctgcaggcaaagctaattttctccatcattctcatgcagatgaaattagctttaaaatgagcatcaggttcagcttgaaatcacaaaaggacaatatactgcctgagtgggtagcaaaaaggagaggggcaatcctaacactttcttttactttttatggggggaggagaaaagagggagtgttggctttgttatctgcatgtaaatcacagagctttaggtactgctggtggggaaggttgtttcttttgtcttgtcactctgaaccattgtcttactacctgtgcctccaggaggtattatgtaacccaccccaaaccagaggtctggcgtgatttcagaatttgtgagaaaggcagattctcttggcggtatctggagccgacttctgtagtgctgtgaaccctctggaaaagggttttggaaacctaggaagcccagaatcttcctgcagattgataggaattccttatactgattgttctcaaatggagtcccttgaatcaggttgatatgcattccttatactaattgttctcaaaaatgtagtccttgaatcagcaacgtcagcatcaccggtggagttgttggaaataaaaattcttcggctctaccttagacctcgtgttatggtttgaatggatcttctccaaaaatcaggtgttgaaacttaacggacaatgtgatggtgttaagaggtggagcctttaagaggtgattaggccatgagggccctccctcatacaggacttcatgctggttcgcccttccgccttccaccgtgtgaggacgtaacattcctcccctctggaggatgcagcaacaaggcaccatcttggaaacagacagcgtctgtcatctggcaattgaacctgttggtgccttaatcttggacttctcagcttccggaactgggatgaaagtaagagaaagtaagtttcagttctttgcaaatcacttagtttcaggtattttagttaaagcagcacaaaatggactaagacacttgctgaaccagaaaactgggtatagggcttggctatgtgtttgaaaaagctcatgctaaggtttgagaagcgccacattatatatatgatactctccccaccccctttgagtacaagcatttaagcatttataaatttcgttcataaatctcatcttgttcactggaacatcatgaacctaacgttgtgagtgcttcctgggcctctgagtaagaacggttccttttgatcctatatagggatggtcagtcctctgtagtgcctttgtagctgtgtggctgtgccaggatgtatgctggctcttggcttggggtggggggttcaggcatctcagagatagtgtggaatggtgcaaagcactgggtggcatttgctgggcccattctagtcctgcctctttagctaactagctgcatgacaacttgaaagccagcaatacagtcaacgtatttattggcatcttgactatagaaagcatcgtcatcaagttatgaatgacacaatcagggaggaagggacagaaatatgctggatgacagaaatcagaataaacaaaagtttaatttataggctcaacatagcaagatggaattttactgggataagtgtcaggtcctatacatagttctgctaatacctagctatatcaggaagggttgaaagagatgtgtcaagagaaatatttgtgcaacatgtttttgggtttttactgtgattagataaacataccataaaatttacgatttcgtatttatatttttaaaattatttatttatttatttatttatctatttatttatttatttatttatttacttattttgagatggagtctcactctgttgcccaggctggagtgcagtggcatgatctcggctcactgcaagctccacctcccgggttcacgctattctcctgcctcagcctcccaagtagctgggactacaggtgccctccaccatgcccagctaagtttttgtatttttagtagagacggggtttcaccgtgttagccaggatggtctcgatctgctgacctcgtgatccgcccacctcggcctcccaaagtgctgagattacaggtgtgagccaccaagcccagctgtttatttttattttttgagacagagtcccactctgtcgcccaggctggagtgcaatggcacgatcttggctcactgcagcctccacttcccgtgttcaagcgattctcctgcctcagcctctcaagtagctgggattacaggcacctaccactacacctgagtaatttttgtatttttagtagaggtggggttttgccatgttggccaggctggtcttgaactcctgacctcaaatgatccacccaccttggcctcccaaagtgctggaattacacctggccccatttcccatttttaaatctacaattcaatggcattaattacatgacattgttgtgcaacatcaacactatctattctgaaatgcacgtattttaaaagtgagtctaggccaggcgtggtggctcatgcctgtaatcccagcaccttgggaggctgaggcaggcggatcacgaggtcaagagatcgggaccatcctggctgaggcaggatgctgaggcaggagaatcgcttgaacctggccaggtggaggttacaatgagccgagattgcgccactgcactctagcctggcgacagattgagactccgtctcaaaaaaagaaaaaaagtgagtctacagaaagctcagtgtgtaccaaacactcattctacctattcatttagtgaagaatcatttattggctaggagtggtgggaggcagaggtgggtggatcacaaggtcaggagttcaagaccagcctggccaagatggtgaaaccccgtctttactaaaaatacaaaaattagccaggcgtggtggcaggcacctgtaattccagctacttggcagcctgaggcaggagaattgcttgaaccccgggggtggggaggttgcagcgagcagagatcatgcactccagcctgggtgacagagtgagactccgtctcagaatcatttattgagcgtcttccatacactagagagtagggttggtaaaatggattaaaagaaaaaagaatgccatgaggctacccaaactgttagtagaatcttaggttttatatacagaactatagcatctggcaaatgggagttgatagaactgcagtattcacggattgagcagtgtgttgagtccttaagcaccgcatttgaaaagatggctgcgactgtactggatggtgatgaggcgtatgagcaatggaaccagggacatttgggttagaaaacagaaactcagggaaggcgtcagtgcagtttttagttatctcaaggtttcatcccgtggaagaaagaaaacttggtgctttgttatgttcagttcctggggatatatgttatggaacaggggaatggatttcagatcaatgcaagggaagacctatcagtctcccctgctcaaggcccaggagacatttaagctttaaatgtatatgtatatatatatagtaacaattcatactatgtagtgtgtgtgtgtgtatatattgtgtgtatatatacatggtgtgtgtatatatagtgtatatagaatgaattgtatatattgcatatatattgtatatatactttctatatatatgacaataaattgtatggtttcgccacctgtgggcctgacagggcaggggtgagggtggagagctgtggaatgttgtattaaccacacttagccctaagaagcaaactggtacatctgtttgttttggaagtggggaaatagaattaaagccatggaggataatcttcatacttgattactttcttttttattgctctctcctccctctctgcctccctgttgtggatttgggaccttgaagactctttaaaacggccgctgctttcaggcagctgctgtcttggctcctcctgcctacttaggtcttcccttctcagggagcaggagcctgaggtcccaccagcaccagggctgggccacagccagcttagccatggtggaaaatacggccttttcaggacatatatgcctgagcaatttaagagaatacacatacacatacacacacacacgttgtattagtccattctcacactgctataaagaactacctgagactgggtaatttataaataaaagaggtttaattggctcatggttttgcaggctgtacaggaagcatggctggggaggcctcaggaaacttacaatcatggtggaaggtgaagggaaagcaggtacgtcttacatggctggagcagaaggaagagagagaggagtaaggtaccacacacttttaaacaaccagatctcatgagaactcactcactatcatgagaacagcaagggggaagtctgcctccgtgatccaatcacctcccaccagacctcacctccaacactggagatcataatttgacatgagatttgggtgggggcacaaatccaaaccatatcacatataatgtgaagagcaaacacttttgaaattagaggaaaatgtgtaagaatttgtcaatcactagtccctgcacagtaatcccaagaaactgaaaacaaaaggacttcccttgaaatgacagtttccacttaaaagatcaaagaacattaaaagcatcaatcaacaaacatttattgaacattctagataatccttaaaatccttgcagagtgactacccaggagcttttacccaagttcactaaaaaattcaaagggctccctccaccctagaatgcctccggcctggaggctgctttctatttttgcagcatgagtggattatctgggttactgtggtgaccttctgtggtccccacacagctctcttcccgctggtgtaactgggccaaggtggcagccaatgcctgggcaaggtgtgggcaataggccagactgggatgctctgcagagctcctgcgcatttgcctggtggctggggagtaagttcaaaaaggagcaggcagtcatgagtatgacttccacctctgacacctatctttgggagccacccagctcactctgcagcagtgacccaggcatggatattgtgactgcccttcccagattgagtaactagatgggaacaggtagttcaagctggcaccttgctcacacctaaggtggtgttatagctgggtcatttcccgaaagctactggaaagggtattctgtaagaattatgtcgtctgggcttggcatggtggctcacacctgtaatcccagcactttgggaggccgaggcaggcggatcacgaggtcaggagatcaagaccattctggctaacatggtgaaaccccgtctctactaaaaatacaaaaaattagccagcatggtggcgggtgcctgtagtcccagctgctagggaggctgaggcagaagaatcacttgaacccgggaggcagaggttgcagtgagccgagatcacgccactgtacaccagcctgggcgacagagtgaggaaaaaaaaaaaaaaaaaagaaacaaaaatagaaatctgggctcaatcaagtaagaatttagttgcctacaacattgctccatttcctttccaggtgatggcagcagtgtggggcagtgggaagggctgagtcggaagtcagggctcctgggttctacttctggttctgctggtcactagctctggccccttatatgcgttttttgacctcttgggcttcatttctctgttgatggaagagacgcccatcagatgattgctgaaggcccatcctgctctaagacctgatgacacctaaaggaatgatgcctaatgtcctgacactcacaagttacaaatagcactccaaaccggaggacacagtaagagctacattcatgggtttaactggtctctaagagcagtttaaatacctgggtaaccagtccccattacccgctccccagttacaccctctgatggttccattcacttcttttcagagaccctgactgagaaagtggggggcttcaggatgagaacaccccgtcccataagggagacccctctgctgtccctgggatcccaataccactgagcctggccatcagtgtcatcaacatcaggccctgcttctctggggtgctgcttctcctgcaacctcggcgcactgagcgtgtgtctggaggttctctgggcagcacctgcagcagagctggccatggcagcctcccttgggtttgcatgtgctcttcctgaccagattggtgaggatacaggcctgccagcctccaccaaggccagtattggtgttgacagaccaacctgcagcctcctctttctgggcggcagaacatagggtcctcaggcaaaatgctctcctatacactcccctgaactccccagtagcctgtgccctccagctggggggcactgggactgccatggcctctttatgcccccagggtacagcctctgctcagatgcattagggtaaggccccagcccattgcttatgggaccagaggcatcacacacaagggaagccggctgggagtgcgtattaaggctatagccacagctgcgatgaatagcctgtaaaaggggctccagcgttgggagacagtggagagtggaggacagtggagggagagtgggggactgtggagggcacatgcccagctgcaaagggacagccatgactcggctctggccagaaagtaaacacaatggagccagagagctgatttctcaagagaagcaatgatctggatttttttttttttaaggtggaattcttctcttgatctttaaatgctggcaatgatttcaaactttagaaactctgcatgggccaatactgtatcagacaaactgaacacatctgtgagtcccatttgctggagggcctctgtatctagcctccttggcaagggctgctcaagccaagagctgtcgtcttgtcgacagacagacagacagactcacggattgacagatgcttttgggccttgtttcccctggttgcccagcagaaagctgttgttccccatgtgacctgagccagggctctggctaaacccttgggaactagtgtgtggaccagatacggggtccctgaacttggactagattggaagttggccaaaatgacacctctgctccaccaccctcttccttttcttttgaggcaggatctcactctggttccccaggctggagtgcagtgccacgatcatggctcactgcagcctcgacttcctgggttcaggtgatcttcccacctcagcctccccagtagctgggactacaggtgaacagtaccatgcccagcttattatttttttttctttctttttttcagtagagacaggatttcaccctgttgcccaggctggtcttgaggccgctcttgggcttaagtgatccactgccttggcctcccaaagtgctggagttacaggtgtgagccaccggtgcctggcccgtcctctccattttcttggcctttgctttgagttcctgctggtcctcatgtagcctgtttcctacttcctcatggcaactggatgttggtaactgataaacccgaagattttccctttcttggctgtttgctttataatgaagggttctgaagcccagaaatcactaaagaagtttatggctagggtgcagctttctgggctgggcctgcgccaggctggagctgctgtccacaggcactgcacttggtccactgtgtgcttcactggcatagaagggcctgaaccttgccaggctttctccctccccctggacggtagccgagggcagacctcatctctggggacccagactcacaatctgccgccttgctagggaggcgaccaaggcctgctctcagatctggttgaactgctggaaccgctccttccttccacgcaccctgaggggaggcccctgggatgctggtcagcgtgattaaactcagtctctttcctcactggtccaggtggccacaggcttgtgcggctagtgaagtctgcgctgtaaagatgcccacgctgctgtctctggcagagctcacttggctggagtgggagggcagtagacagggcatgaaggaggaaaagagtgggaaagaagggcaaaaaagggcaaaaacttgcttctgtatttctcggcttctgtgaaactcacttggctggtatgaaaattcagaagaaaattttcagaggaacttttcacagggtatatttcatttgccatgaaaacactcagttgagtgtgtgcatgtgtgtgcttgagttgctgagaggagatattgtgtggcttatattttagatttcgtgaaaggtatttagccacacactcattatagcatgtggcagcttgaagttcaagttagcttgctgtgttgttggtgtttttgaaccagtgggggaattactgttactctgggatttttttgggtggcaatttagatacagtcctgccaggagaagctctgggaaatttctctttttctcagggtgtcctggggctgttttggtttgtttttggggtgcggtgccctctcttctcagcaaatccttaccaaagggctcagcatgacttttctgataaagctggaatccctgcgggctgcttgctcagatggatttgggcaccccggggaaggtgttcttttgttccgctggcagatgggcgtgttcagtgctggtctggacatgtgattccggctgtggtttggggctgagactgtcttagctctgacttcggaagaagatcctgagcttgtcggggtcttggcacagggtcctgaaagccgtatatggatcaagacatggaagagaagtgggtttgggattggtgggtgggagctcttcctcacaggggctcctttctcgctcggcttgcttggttgtactcacaccactctggactcctggtgaggtcctaagtggttcatcttcaacaaaaatgccagttgagacgcggcagaaagattttaaaggagagtcctgggggctgagttgactctagctaggcactgtggtaccttccagtttctttccatctgtgcctctggacagctggggtcaaccccatgtacatagggtcggtggttgcccaggaatagtgaggggggtgcaggaaagggggtgctagacttcatggtttagctgaattttaaatgttaactaatttagatttgaatagccatatgtgtctagtggctattagagagcgcagttctagaggctccttgtaggtggggttccacgagcacgaatgtgtgatagcctgttgactgtgagtcatgcttcccaggcaacatcataacttaaccctacagagagagggagcctcggccgggcgcggtggctcacgcctgtaatcccagcactttggaaggccgaggtgggcggatcacgaggtcaggagatcgagaccatcctggctaacacagtgaaaccccatctctagtaaaaatacaaaaaaaaaaaattagccgggagtggtggcgggtgcctgtagtcccagctactcgggaagctgaggcaggagaatggtgtgaacccgggaggtggagcttgcagtgagccaaggtcgccccactgcactccagcctgggcgacagaggagactccatctcaaagagagagggagactccagaaggctcttaaagagtggctttgggggtgggatttgcagacaccctgatgggcatttttttctttcttttggttgtaggtggggactttcggcaacccccaggtcacgattcttcagcccacagctctcacatggtgacatgttcctaggatatggggataactcctatggagtcatccaatattctacagaactctgggatagtcctagtgcaatatgttttgtcttagaatgaagagtttgggggttgggagtgggaatggagataagaaaggttttccttttcatttatagcctccactatggcttaaaattttgattgcgtacctgtgtaacttttatcttaaaaaatacataagtacataaaattattataggccttttctctctctctttttttccagcttttattttagactcaagggttacatgcatgggtttgttacatgggtaagttacgtggtcacagataattttgtcacccaggtaatcagtatagtacttgataggtagttcttcaatcctcaccatccttccaccctccaccctcaaataggcccctgtgtctattgctcccttttttttttttttgagacagagtttcactcgtttcccaggctgaagagtgcaatggtgcgatcttggctcaccacaacctctgcctcccgggttcaagtgattctcctgcctcagcctcccgagtagctgggattacaggcatgtgccaccacgcctggccaattttgtatttttagtggagatggggtttctccatgttggtcaggctggtctcgaacttccgacctcaggtgatctgcctgcctcggcctcccaaagtgctgggattacaggcatgagccactgtgcctggccttattgctcctttctttgagtccatgtgtacttgatgtttagctcccacttgtatgtgagaacatgtggcatttggttttctgttcctgtgttaatttgcttaggataatggcctgcagctccacccatgtgctgcaaaggccatgatctcatttttaaaaaaatacctgtatagcattccatggtgtgtatgtaccacattcttttaatccagcctaccattgatgggcatttatgttgatttcatgtctttgctgttgtgaatagtgctgtaatgaacatacatgtacttgtgtctttatggtagaaccatttatattcctttgggtatatacccagtaatgagattgctggatcaaatgatagttctattttaagttctttgagaaatctccagactgcttttcacagtggctgaactaatttacattcccaccagcagtgtataagcattcctttttctctacaaccttgccagcatctgttattttttgactttttactaatagccattcaactggtgtgagatagtatctcgttgtggttttgatttgcgtttctctcatgattagtgatattgagcattttttcttatatgcttgttggctgcgtgagtgtctttttatgagaagtatctgttcatgtccattttttaatggggttgattttcgcctgtttatttgagttccttatagattcttgatattagacctttgtcaaatgtatagtttgcaaatatttctcccattctgtaggttgtctgtttactctgttgacagtttatttgtttatttttttgagacagagttttgctctttcacccaggctggagtgaaatggtgcgatatctgctcactgcaacctccacctcccgggttcaagcgattctcctgcctcagcctcctgagtagctgggattacaggcacctgtcaccatgcctggctaatttttgtatttttagtagagacagggttacaccatgttggccaggctagtctcaaactcctgacctcaggtgatccaccctcctcggcctcccaaagtgctgggattacaggcatgagccattgtgcccagtgattcattctattcttttcttttcctctttctttcttccttcctttctttctctttcttctttcttttcttttcttttctttctttcttccttccttcctttccttccttccttccttccctcttttcttttctttcttttttcctttcttttctctctctctctctttcactctctcctgttgagacggagtctcgctctgttgcccaggctggagtgcagtggtgcggtctctgctcactgcaaccttcgcctcccgggttcgagcaattctcttgcctcagcttcctgagtagctgggattacaggcaggcaccccatgcctggccaatttttgtatttttagtagagatggggtttcacaatgttggtcaggctggtcttgaactcctgaccctgtgatccgcccgcctcggcttcccaaagtggtgggattataggcgtgagccactgcgcccggctgatagtttcttttgcttttcagagactgtttagtttaattaggtcccacttgtcaatttttttttttttttgttactgtttttggaggcttcataatgaagtctttgcctgggtcaatgtccagaatgttatttcctagattttcttcctgggtttttatagttttaagttttacatttaagtctttaatccatcttgagttgatttttgtacatggtgtaaggaaagggtccagtttcaatcttctgcatatggctagccagttatcccagcactatttatcgaatagagagaccttttcctgttccttgtttttgtcagttttgtcaaagatcagatagttgtagatgtgtggctttatttctgtgttctctaactgttccattggtctatgtgtgtttttgtatcagtaccatgtggttttggttactgtatccttatagcatagtttaaagttgggtagtgtgatgcctccagctatgttcattttgcttgggattgttttggctattcaggcccttttttggttccaaatgaattttagaatgtttctttttctaattctgtgaaaaatgtcattggtagtttgataggaatatcattgaatctgtagatagctttggacagtatgtctattttaacaatattgattcttcctattcatgaacatggaatgtttttccatttgtttgtgttatctctgagttttttcagcagtgttttataattctccctgtagagatctctcacctctctggttagctatattcctaggtaccttatttttgtgtgtggctattgtgaatgggattgcagtcttgatttggctctcagcttggatgctattggtgtatagaagtgctactgatttttgtacattaattttgtatcctgaaactttgctgaaattgtttatcagatcaatgaacctttgggcagagactatggggttttcaaggtatagaatcgaattgtctgggccaggtgcagtggctcatgcctgtaatcccagcactttggaaggctgaggcaggtggatcacctaaggttagcagttcaagaccagcctggccaacatggtgaaactccatctctactaaaaatagaaaaatattagccgggcgtggcggtgctcacctataatcccagctacttgggaggccgaggcaggagaattgcttgaacccgggaggcggaggttgcggtgagccgagatcacaccattgcacagcctgggcaacaaaagtaaaactctgtctcttaaaaaaagcaaagaaaagaaaagaaaagaaaaaaatcatattgtctgcaaagagagagagtttttcttcctcttttcctatttggattaggccttttttttttttttttttttttttggagacagagtctcactctcttacccaggctggtgtgcaaagtggtgcgatcttggctcactgcaacctctgcctcctgggttcaagcgattgtcctgtctcagcctcctgagtagctaggattacaggcacccgccaccacgcccggctaatttttgtatttttaatagagacgaggtttcttcatgttggtcaggctggtctcgaactcctgacctcaggtgatccgcctgccttggcctcccaaagtgctaggattacaggtgtgaggcaccgtgcctggccaagaagtacgatttttgcaaaaaaaaaaaattcatataagaacatgtcctggctaaaaaaaactaaagaaataaagaataaaaataatttttaaaagtcttttttgttttttaaagcaaccaatttgctccatagttattatgtgagagatctttagaattgtggatggctgggaaactactcatttgccactcatcaagtagattggttttgcttttgatttcttggtgatttcttgaaaaatgtatctgccctccccccagccccgccccgcaaattcatatgttgaagcccttaatggcccagaacttcagaatgtgactgtagattgtatttggagatagggcctttaaagaagtcattaagttaaaacagtctttagggtgggccctaattcagtattactggtatctttataagaagtggggattaggacccagccaacacgggctgaaggacagccatgtgaggacacagtggaaaggtggctatctgcaagactgggcatggtggcttacacctgaaatcccagcactttgagaggccgaggtgagaggattgcttgagcccaggagttcaagaccagcctgtgcaatgtggtgaaaccctgtctctacaaaacaatacaaaaaattagccaggcatggtggcgtgcacctgtaatctcagctactcgggaggctgaggtaggagaattgcttgaatccaggaggtggaggttgcagtgagctgagatccagccactgcactccagtctgggcaacagagaagacactgtctcaaaaaaaaaaaaaaaaaaaaaaaagagaaaagaaaaagatggccatttgcaaaccaagaagagaggcctcaagagaaaataactctccaacaaaacactttgggcttctgttaagcccccaagtttgttatggcagccccagcaaactaatacatttggtttttttttttttttctttttgagatggagtcttgctctgtcgcccaggctggagtgcagtggcgcgatcttggctcactgcaagctccgcctcccgggttcatgccattctcctgcctcagcctcccgagtagctgggactacacgcgtccgccaccacgcccggctaattttttgtatttttagtagagacggggtttcaccgtgttagccaggatggtctggatcttctgacctcgtgatccgcccgcctcggcctcccaaagtgctgggattacaggcgtgagccaccacgcccggccacatttgggttttgtatgacttgcttcattcaggccaaagataaattgaggaacatatatatatatttgtattggacatttgcttggatccaaaatatggcaaaatcaagtctgtttatctagcgggaacttagccattgactacttgaggactgtttctcttcaaacctttggggacagtgacatctagtggtagtttcttttatatacccttttcagttctcttctggccgtacattagaatcacttgaggggatgggaaaaacaaaacaaaacaaaaaacaaaaggccttgcgcggtggctcaagcctgtaatcctagcactttgggaggccgaggcggatggattgcctgagctcaggagatcgagactagcctgggcaacacagtgaaaccccatctctactaaaaaaaaacaaacaaaaaacaaaaagaaaattagccgggcgtgcgcctgtaatcccagctgctcgggaggctgaggcaggagaatcacttgaaccagggaggcggaggttgcagtgagccaggatcgcgccactgcactccagcctgggtgacagagggagacgctgtctcaaaaaaaaaaaaaaaaaaaaaaaaaaaaaaaaaaaaaaaaaggccaatgcctaggctttacctagccaattatgccagaatctctgggaatgggaaccagtcatcagtatttaaaagggctttctacattagtccaaagtgtacccaaggttgagaagcacagattcttaatgaaagcaactctggattgtaaaaatatgagctcatattatgttgccatttctcacaatatgaaaaagtttgttaacttctgcacttatttattgtccctctgcctccaaagaaggtaaaatacatgagggagggagcacggtctggttagcttttggatgccaagagcctggaacagtgctgcacagtctgggctcataatagcttttgtgaaatgaatgaatgaaaaatagagcatgggaccaggcgcccggtggctcacgcctgtaatcccagcactttgggaggccggggcgggaggatcacctgaggtcaggagttcgagaccagcctggccaatgtggttaaaccccgtctctactaaaaatacaaaaattagttgggcgtggtggtgggtgcccataatcccagctactcaggaggctgaggcaggacaatcgcttgaacccgggaggcagaggttgtagtgagccgagatcgtgccattgcactccagcctgggcaacaagagctaaaaactctgtctcagaaaagaaaaagaaaaagaaaaagaaaaatagagcatgctgtcaggttgcattaatctggaatatggctgtcatgtgaaacagcagtctcactgtgaagtttaggacatgttatatttggttcaattgaaagtaacttatggaatcttataggattccaaatgtctgaaacagacgtttcttggtctgtcatacaactttggttgacttcttggcatctttatgcctctgatcctaggagaggattttctgagtttcaatatagcagcaggttctcaatgtctactaagtgttctagttaaaaagaaatgttaaactattagcttttcttctgtgcttttctccccattgtcttgaggcttagaaagttctatattattacaaaaccagtgaaatacacacttacaacatttctagttttaaaactacttcttttttatattttatggcctaaaataactgggattaaattttctgcgtatggtgcatagtgagtattgaactttctattcttttcttaaccctgagagtccatcttccccacatgacttgcggatactccatgactttgctcatttgtgatgcacactttttcccgcagtaagtctttttatatactaatgtgagaggtgttagaatgggacttttcctggcaaagtgtgtggaaaacaattcctcacttgcagactctcaagggaaatctctggggaactgctccctgacttttggacatccttaaaaacagagatgagagaaagaaaaagaacaagccttggtgaagaggtttctttggagagagttgttgctgtgctcttgggcccccaacttcccttttcagggaggagtgggaagtgctcattctaactccaggcttgagaccgctgggggaatttcaaaaagtggtttccacaggaaagacatggagcagccagcttgggcgacagagtgagacttcgtctcaaaaaaaacaaaaacaaaacaaaacaaaaaaagtgtgtgccaaatattatattgacaggacatccttattttgaagtcaagactgtgtttgggatttacagtgacgtaagaattgtctctgacctagaagtgggcaaaaaaaaacaaaaaaacaaaaaaactgatgacattttcctctgaggaacaggctgatatctttgtaagtaaaaatgaaagggttgagagatagagcaaatgagctgttttggtcactataatcaggtgtcttgcttattcaatgtactgattgcattaggactgctttcagggctcctctcatcatcacggttccctctccaaatgctctagatgtggtttgtcttaatagttgaatggttgaatagttgaatggttgaaaataacagagccctccttaaagcaggttaaacagaaaagagaatttactgtaaggttacataggtggctataagagtaggcattcaattttttgtcttttttttttttttttttttttagatggagtctcactctgatgtccaggctggagtgcagtggtgcaatctcggctcactgcaacatccgcctcctgggttcaagcgattctcctaccttagcctctcgagtagctgggattacaggcacctgccacaatgcccagctaatttttgtaattttagtagagacggggttttaccatgttggccaagctggtctcgagctcctgacctcaggtgatccacccacctcagcctcccaaagtgttgggattataggcgtgagccaccacgcctggactaatatgagttagaagtaaatgaactaattcagggatagacacttaatgtgaactcaagccaggaagtaaggagctttcccctgacaacagtgattgagataggaaaggggacaggtttaggttagcacaattagtacgaagtcaggcctttgctcagtgactgtgggagaagaaactctttgtctggtcagtatacatagctgtgaggtctggagctgtagcaaccacttggtatcttgaacaaagctagatttgagatgatgctgacacaggagagaaggcaattgatgaaagaaatgcagagccagagccctgatccagccactcctgaacccatcactacattaaacttcccaagtatagcagtggttcccactgggggcaatttagctcctgaagggatatttggcaatatctggagacatttttggttgctacaactggatgggtgctcctggcacccaatggatagagaccaaggatgctgctaaatcccctatagtatataagagagcactctttcctttgcaacatagaattatctggcccaaaatgtctgtattgctgaggttgagagactctgacctagagatttgattagatctaagttcttttttgggcaaggatgctttgtaggcactgtgtacttgcttttacgtcacaacaggcttgttctcttggcttttctggatttctgtacctgccattgctcccctctctcagtgcctggtgagcccctccctagcctctctcacaagcccagtgggctgccttctccttgtaaactctccacaccctggctcttctcactatggcatttgctgggcattttggggctcgttggtgtgtgtttggcccccactgggctggagatcctgggaaggcagggactcagtctatcttctctcgtgcattcaggacactgggactggtagatcctgatatgtaaataaatcaatgacaaacgaatgactcataactcggatatttgagttggtcagaggcaatgtctctttctctgtgggcaggaactgaatcaacacagtggaattttctttttctttctttcttttttttttttttagacagagtttcgctcttggagtgcgatggtgcgatctcagctcacggcaacctctgccttccgggttcaagagattctcctgcctcagcctcccaagtagctggcattacaggcatccaccaccatgcccagctaatttttgtatttttagaagagatggggtttcaccatgttggccaggctggtctcaaattcctgacctcaggtgatccacccacctcggcctcccagagtgctgggattgcaggtgtgaaccaccgtgcccggccaacacagtggtattttcacaagtccattcacctttcagcagtaaaatgatgtagcaagatcatccatcatatatacaatggaatattattcagccttaaggaaatcctgtcataggctacaaggatgtaggttcaagcgattctcctacctcagcctcctgagtagctgggattacaggcgcctgccacaatgcccagctaatttttgtaattttagtagagatggatgaatgtggaggacactatgctaagtggaaccagctagttgcagcaagacaaatgctgcataagtcctcttatatgaggtatccaaaacagtcagactcttagaaacagaaagtagaggtagagtggtggttgcctgaggctgaagggaggaggaaaagaagagatgttgttcagtgggtataaaatttcagttttgcgagataaaaaagttctagagatctgccgcgcagcaatgtacataattaacattaatgtactgcatacttaaaagtggttaaatgggctaggtgtggtggctcatgcctgtaatcccagcactttcagaggtcgagacaggcagattgcttgaggtcaggagttcgagaccagcctggccaacatggagaaaccccgtctctactacaaaatacaaaaattagctgggcgtggtgcgcgcctgtaatcctagctactcaggaggctggggtaggagaaccacttgaacccgggaggcagaggttgctgtgagctgaaattgcaccactgcactctagcctgggcgacagagtgagactccatctcaaaaaaaaaaaaaaaaaatttaagatggtaaatcttttttttttttttttttgatacggagtttcactctgtcacccaggctggagtgcagtggtgcaatctcggctcactgcaacctctgcctcccgggttcgagcaattctctgcctcagcttcctgagtagctgggattacaggcgcccaccatcatgcctggctaatgttttgtatttttagtagagacggggtttcactatcttggccaggctgatcttcaactcctgaactcgtgatccaccctcctcagcctcccaaagtgctgggattacaggtgtgtgtatgtgtttttgagacaaggtctcactctgtcagccaggctggagtgcagtggtatcatcatggctccctgcaacctccgcctcctgggctcaagcaatcctctcagctcagcctcctgggtaactgggactacgggcacatcaccacacctacctaatttttgcattttttgtagagatggggtttcatcatgttggccatgctggtggtctcaaacacctgagctcaagtgatccacacgcctcagtctcccaaagtgtgtgagccaccatgcccacctggcctaagatggtaaatcttatgtcctgtgttttttaaaaccataattaataaaaggtatttggtgagaattaaaaaaaaattaccccctgggaaaggtggctcacacctgaaatcccagctcttagggaggcagaggcaggaggatagcctgagcccagtagttcactacctgcctgggcaatatagcaagaccctgttcttgaaatcaatacatcaataaaaaataaattggctgggtacggtggctcacacctgtaatcccagcactttgggaggctgaggcaggtggatcacatgaggtcaggagtttgagaccagcctgactaacatggtgaaacctcgtctctactaaaaatacaaaaattagctgggtgtgttggcaggctcctgtaatcccagctactcgggaggctgaggcacgagaattgcttgaacccaggaggcaggggttgcagtgagccgagatcaagccactgcactccagcctggatgacagagtgagactttgtctcaaataaacaaacaaacaaacaaaataaaataaatcacccatggaggctataccttgggagacttgattggatttaggaggcagggctcaggtggcttctctcattgttttgtgctgatttataaggtttcacctacttgtttcagaggtgaccttgatatccaattccaggacaccccactgagtctctcatgctgtttgaacctccgccccagccctgaccatggtgtgagcttctctctgtcactcagccacactgacccaggaggaggggtggatgcccagaccctgggtcacactagatccagagctgtggtcctagggcagcaggagactcctaaacagaaggggctcaaattctccctagtggtggaaacagtcgaggtggccttttccacactctgcagcggagcctcctgctttttaattatgagataccccaaggcgtgctcctgccccttcgcgcagagtatctcggtgcattcttccaattgctggtctgagccaccggcaaatggctcgctccagctctgcaggggttttcacacctggtttgtggctcctccagccttctccgctcccctctgagtctgcctttttcctgggcctgccaaccagttagcacctctgctgaacaaaaggcctggagcagaaggggccctcctccccactgtctcagggaaccaggctggagaacaaaggaagacaggatgcccatcctccttctccccctccatccctgcctccctgcctccttttctttctccacaggattctttcctcttctgagaagcagcctcagagctggctgtagaacatccagaaacaatcaggaagaataactgtctccctctctccgacttcctgctccccactacccatacctgtgttgggtatgtgttttgctagcaatgtttaatgtcacatgcctgcactttcccctaatcctaatatcatgttacttttttttttttttttttttttgagacggagtctcgctgtcgcccaggctggagtgcagtggcgcaatctcggctcactgcaggctccgccccctggggttcacgccattctcctgcctcagcctcccgagtagctgggactacaggcgcctgccacctcgcccggctaattttttgtatttttagtagagacagggtttcaccgtgttagccaggatggtctcgatctcctgacctcgtgatccgcccgcctcggcctcccaaagtgctgggattacaggcgtgagccaccgcgcccggcccatgttacttttataacataggtaaactagccttggagatgtgattataggcttgagggggaaaaaaaaggttttaaaattgtgagattaagatgtgtttattgtaagaataattagaaaatagagaaaagggaaaggaagagcaataagaaccgaccattaaaatgtgccacctcagataatctgagctcagccgcctgggtttaccagaaagcagagcccgagaggaagctggggtgagggacaggggactgaggtagggcaggggagtttcagaagaaggatgcatatttgatttggcatttgaccaatgctgtaggcaactcgttgacctctcaagagccctgtgccacttgaaatacatattgggaactttcatgaggagaagagatgggaaagcacttatccactttcttttttttgagatggagtcttactctgtcacccaggctggagtgcaatggtgcaatctgggttcactgcaacctccggcttccaggttcaagcgattctcctgtctcagcctccagagtagctgggactacaggtgcgtgccaccacacccagctaatttttgtatttttattagagacagggtttcaccatattggtcaggctggtcttgaactcctgacctcaggtgatccacctacctcggcctcccaaagtgctgggattacaggtgtgagccatggcacccggccagcacttactcactttcattcctccgttcaaagatttgcctatgggaggtcacctcatctgcatttttgggtcatgcatgcatgaacattgagtgagtgtgtcacagagaaaacagactggggagaccactgtgggcctgagtttggtgctgtaggaactggtctcagtggactaagagacaggtgagattcagaggtggtgcacagtgggcatggtagatcatacttgtaatcccagttgtgtgggaggctgaggcaggaggatcgcttgagcctgggaggtcgaggctgcagtgagccgtgatcccaccagtacattccagccaaggtgacagaacgagaccttgtctcaaaaacaaacagctgggtacagtggttcatgcctgtaatcccagcattttgggaggctgaagtggaaggatcgcttgagcctaggagatcaaacctaacctgggcaacatagggagactctgtctctacagaaaattaaacaaatttagccaagcattgtggggcatgcctgtagtcccagctgcttaggaggctaaggctggaggattgcttgagctaggaatttgaggctgcagtgagccattttgtgccactgcactccagcctgggcagcagagcgagatcctgccttaacaaagaaaaaagtgatgtgcaagaggttacattttggtatacaaaaatagcaacatgtccagcagttactataagctagacccagtaccaagtgcttcacatggattttctcatttcagactccagtaaccctaggaggaatactgttattatccccattttcgacgttagaaaagtgtggttcagaaaggctaagtttacccagatgacccagttaaaaagggtagatccaggatgcacacccaagctttctgaatcgggtccactctttcgccttttaatgattggtgcacatttatcatctgggtttgcccagcctccattctggcttcttgttggtttgactgagtgactctctttctgtctctctgtttagccttctgtggtgtcagttgcattttaaattggcgaacaacccccacagagtcacatgcttacctgcccaggtccagggagacggatatagagagacgtttcccccagaatttcaagtcatcatctgattggcccggcccagatggcctgctcattcatgagccaatggctgtcatgaggggaacagaataggccaatgggcttaggtcagttatcactctggtgggatccactttccataaataataagtggaggggcaatggatacatattaatctgggtttcgtaggaagaagggagtgggggagggatggtgggtaggttatcctttggccatttggacagcttgttttcaaactttattttaagcaatccatgcaagaatggcaggaacagttagaaggcgcgttgaagaggaggccactgacccaggctctctgctggttctcccttgttgaacatcctgctttatgaccttccctaagcctggttctctcgtctgtctaatctaaaaacagccttctcacccttgctacttcttttaataatttcttctttgcctcagtttgccaagtaaggttgtattgcttttcacccagaaccctgactgatgcatgttggatttctgaggagacacagtaagttagatcctacttccccatctgtgtccaaagcagggaaatctggccaagcgtacaaatggagaccaggacaccttctttattaccgaagaaggaaaagctggaggtcttacttagtgtgggagcaacacagggctgcagaccgaaccccagaatgagacagatgtagccagttaggcacagatggcaccgtactgggtgtgatcctcacccggaggaacagcagagaacagcagggacagcagccagatcgctcccaggagtaaggagtggggagtgagcccgggatgccttgtttattcttcccacatttaccaccaggtaagccgtttctcctccccgatgtggagtgagttaaaagcgatggagagaaaccaggagagtttttggaacatcctcaccactcgtttccatgagaaaggatgtttttagtagagacggggtttcaccatgttggccaggctggtctccaactgctgacctcaagagatcttcccatcttggcttcccaaagtgctgggattacaggcgtaagccaccgtggctggctcataatttgttaaataatctctagttttgaatatgtaggaacttcccagtttttcaccattataaatgctgttcttctctttgcccacattcccaatgatttccttagaatatacatagcagtgagatgactagtgctagaagtgatttttattttttattatttttaaaattttagaaacagggtttccctccgttggccagactgcattgcagtggcataatcatagttcactgtggccttgaactcctggcctcaagtgatcctcctgcctcagcttcctgagtagctagaactacaggtgtaagctattgcacccagctctagaagtgattagtgagtcaaaggaattttttttttattttccttttgaaatcttcagcaaaaaggaattttaaggtttcaagatgtattttccatttttttttgtggcagaagcattgtgttaaattatgtgtgtgtgtgtgtgtgtgtgtgtgtgtgtgtgtgtgtgtgtgtgtgttttgagacagagtcttgctctgtcacccaggctggagtgctggagtgcagtggcatgatctcagctcactgcaaccttcgcctcctgggttcaagcgattctcccatctcgtccgcccgagtagctgggattataggtgtgtgccaccacgcccggctaatttttgtatttttagtagaaacagggtttcaccatgttgcccaggctggtctcaaactcttgacctcaggtgatctacccgtctcagcttcccaaagtgctggaattacaggcgtgagccactgcacccggcctaaattacatttttactggtggtgtgtgagaaggtttctgcccattttatttttattttatttatcttgatctgatttaactttatttgtttatttttttctgaaaaaccacccctttctatttagagaaggcctgacctacatagttaggtagaaaatggatgatgaaaacatcccaggataaaaaccaaacaagtaggctgggcgcggtggctcaagcctgtaatccgagcactttgggaggctgaggtgggcggatcacgaggtcaggagatcgagaccatcctggctaacacagtgaaaccccgtctctactaaaaatacaaaaaattagctgggcgtggtagtgggcgcctgtagtcccagctactcgggtggctgaggcaggagaatggcgtgaatccgggaggtggagcttgcagtgagctgagatcgcgccactgcactccaacctgggcaacagagcaagactacatctcaaaaaaaaaaaaaccaaacaagtatggaagggctccttaaacaatacaaagaacaggttttgtagttcctccctttttttttttttttttttttttttttacagaaagcagagattgcaactaaagggaatttctgctcattttattttatttcatttttttgagacatagtctggctctgtcgcccacgcatgagcgtggcatgatcttggctcactgcaatctctgcctctgggtttaaacatttcccatgtctcagcctccccagtagctgggattacaggtgtgcgccaccatgcctggctaatttttgtatttttagtagagacggggttttgctatgttggccaggctggtctcgaactcctgacctcaaatgatccgcccacctcggcctcccaaagtgttgggattacagacgtgagccaccgtgcctggccaaatttctactcatttaaaaagtcttacttggtgggaaaaacttattgttttaatgtgtaccttttggttaaataaggttggatattactttatattcatatatttatcatatattttccttcttttgtcttatttgcttacatttttagtggtgtgcctttttcctattgagtaaagaggtctttgttgggacatcaacctatttttgtcaaatatgttgcagttatttatctcatttgtggtttatattttaatattattcaatatctttgacctacaaaattaaaaaaattttaatgatcattcctattaattttattgttcatggttcttatctttgatattttgtctgcagggtctttcattttttttttgagacagagtctcgctctgttgctcagactggagtacagtggtacgatctcggctcatggcaagctctgcctcctgggttcatgccattctcctgcctcagcctccctagtagctgggactacaggcacccgccaccacgcctggctaattttttgtatttttagtagagatggggtttcaccgtgttagccaggatggtctcaatctgccgaccttgtgatccgctctccttggcctcctaaagtgctgggattacagtcgtgagccactgcgcctggccagggtctttcatttttttaaagagactatcagatctctgcgaaagtctaagtgtggggcaatatgctttttctaaatactctgtacctttgctcactgaatgatttttgtgtgtgtgtgtgtgagacacagtctcactctgtcacccaggagtgcagtggcatgatctcagctcactgcaacctctgcctcccaggttcaagcgattctcctgtctcagcctcctgagtagctgggattacaggtgcatgctaccacgcccagctaattttttttttttttttttgtatttttagtagagatgagttttcaccatgttggccaggctggtctcgaactcctgacctcaggtgatctgcccgccttggcctcccaaagtgttgggattacaggcgtgagccaggttgcctggcccaaataatttctgtttcagaatcatttttattttcctttggctgtgtaaaagaatccttgaaatttttaagctagcactgaacatacaaacactacttgcgtaattctccatatctctgatttaaattgataatccacttaggatgtgataagaagtttaaatgttaattctccaatgaggtattaactaaagatcctgtgctcagacagtctataagttcatttgttcaactgcgtaaaacagtagattccatgattgctgctcaggggtgaattccgtggtcagatcccaggctgggagttgcaagggctatcatcaatctattttctccttttcctaacaattatcagcactaaccacacagagattaatgggcaccaggcagtggaaagagggcagtcgacacttcgttgagattgtgttttcacagatctgtcactgttaactccagtgaccctccaaattagttactgcattgtcactggggccttcaagccaggctttttgaaatgtccttgggattttgtgggctatcctttagtttctgttatgtctacaggtttcagggatatttactaaatccagaatatcctgtatcagtgcctctgtcctcctcattaagtccaagagaagccatcagacatagtcctggtgtacttgaaccctgaagcttcccaaaggcaggggatggattccaagaggccaggaatcctttttatctttatttatttatttatttatttatttatttatttatttatttattttgagacggagtcttgctctgttgcctaggctggagtgcagtggcaccatctcagctcactaaaagctctgcctcccgggttcacgccattctcctgcctcagcctattaagtagctgggactacagacgcccgccaccatgcctggctaattttttgtatttttagtagagatggggtttcaccgtgttagccaggatggtctcgatctcctgaccttgtgatccacccgcctcggcctcccaaagtgctgggattacaggcgtgagccaccgcacccggaaggaatcctttttttcttttgggggttctccaaataactggctcagaaagttactgtgggtggtctacttttatattaagcttcctgcaagcttccttggaggaagtccccgtttatttgtatatttatttttaagggagttgtgctttttccaggtcttgatataatgtattttacatctcacataaaagacccctctcttgcatagtcactcccaggcttggcttagggaaatctggactttttctgttaattgcttaataaaaagaatagctccactggtaagtgaatgagagccacaaaaactgaagactgggagagagtctttaaggggatctgaggcagctctgagaggagcgggtggggtggacacttgcaagaactgtgaggcttgatgtccatgtagaggctaaagtaagacttagggtttggggagctgagatggacagtctccagcgatctgcatatgtgtgtgtgtgtgtgtgtgtgcgtgtgagtgcatgtgtcttttgggtgagtgagaggtatgtgtctagagtattcagtgtattaggttcctgctgctgctgtaacaaatgaccataaacatagtggcttaaagcaacacaaatttattaaagttttaatttatttttttttagagacaaggtcttgttctgtcacacaggctgaagtacagtggtgcagtcatagcttactacagcctcaaactcctgggctcaagggatcctcccatcgcagcctcctaagtagacagtactacaggtgtgaacaactatgtcaagctaattacaaaaattttttttgtaggatggagtctggccatgttgcccaggctagtgtcaaactcctggcctcaagggatcctcctcccttggccatctaaagtgctgggacttcagacatgagccactgccccagccacaggtttattctcttacaattctggaggttaaaaatcctaaaattaaggtgtcagtggggctgcattttttccagaggctctatggaagaatctgcttcctagacttttccagctttttttttttttgtaagggacggagtctcactctgtcacccaggctggagtgtagtggcacgatctcagctcactgcaagctccgcctcctgggttcacgccattcttctgcctcagcctcccgagtagctgggactacaggtgcctgccaccatgcctggctaatttttgtatttttagtagagacggggtttcaccttgttagccaggatggtctccatctcctgacctcgtgatccacccgccttggcctcccaaagtgctgggattacaggcatgagccaccacgcccagcaacttttccagcttttagaggctgcctgtgttccttggcttgtagccccttctatcttcaaagcagcagagtggcatcttcagggctccctctcaccctctagccttgtatctcttttgactctggtgctcctgctttcctctcataaggacacttgtgactacactgggaccctggaataatccagggtcatctctctatctcagaatcctaaacttaatcacatctgcaaagtccattttgctatgtaaggttatataatcacagggtttggggttagggtttgggcatctttggggagccattattctgacttcaacattcagtatgacagatctactactaccttcactttactgcaaagatcctcagagagaaatgaggatgatgatggcagtggttcatagtaccttatgttagataatgatataccatttacaaaactcttaggattcgtttcaagcccactcaagtgtagttggatgacactgggactttgagtcaagagccctgatttcatcatttactagctgtataatcttcaggcgatttacttaacctcttgaggctcagtattcctatctataaattgggaaaatgtgatcagtgggaagaactggctagatgatggctaaactgagaatctttgaatgttttacgtgacagttttctttggggaagtgctgtctaactctttgcagcctgggatgaatttataaatgtggccagacttttttttttgtttttcactctccatttgtgttagttcagatcatctgagatgcagacaccaaaatggaattagacacacacaagatttattggggaaaatgtggcagaaatggggagagaatgaaggaggctgagagagccatcagaccacatacaggtctgacatctgtggaggagagaaccagggtggagctgggactttctggaagaggttttgggtgaggtgggctggcatcattttatggtgggccttggataaggtgcagcagagggttcttggcagaggagtaattcaatcccagttggcttttaggagggttatcctaggatagagtagggtgcattagaatgggaaagcacatagccagcagtcatcctgggctgctgcaacattccttaggtgggtagtgctaaggttctggatcaggttagtgacaatgagaatggaaaggaaagaacagccaagtgcaattatccatcccgaagagataaatgtctcccattcctccctgccaaatagaaccatcggaatgtgttaaatcagttgttattgctaaggggtcagtagatgtttaccatgctgttagatgattactttgaagaatggtgttcattttgcatctattgaccccatcccaacgtgggctgatctgatagcttcattgtgcagtccattcttcttctctttactttctttcctcttaggcctaagaactcaatggaatttatgttagcaataggaatgatcagggcaaggcatctctcactctttgatagaagataacccatcaaacatgagttttgctgatttgcagctatttcaatttatcataacagctgaagttactgatgcttcattaaaacaaagagagggagaggtggagggaatgtaagtttttttttccctccctgagatggagtcttgctctgttgcccaggctggagtgcagtggtgcgatctcggtccactgcaacctctgccttccaggttcaagcgattctccggtctcagcctcttgagtagttgggactacaggtgtgtgccaccaagcctggctattttttttttttaaacatttttagtagagatgggattttgccatgtgggccaggctggtctcaaactcctgatctcaggtgatctgccccctcagtctcccaaagtgctgggattacaggtgtgatccacctcacccggcccaaaaatgtaggtttaaaagatcatccctcttgccacgaatttgacctgaggatgtttgaccttgaatgtacttgtttgtaagtgtcattaggcagccatagattccaaagcaggttagagtgggaacaggagaatggcttgagtgacctgatagagggaagttcaattgagcatgcagaacaggcacgaaaacttatggtgacatacagtagaagggaggggagtcttgatgggtggatagaatggcgcagcagagcgtagctggatgtccaggcaggttgactgcttcatgacttccggctgctgggctgggtttagaaatggaattctagtctttgggctggaaaaacaaggcaaggttttaatcctagagagaatttacattaccaatagaggttcagaaagagtgaacaagacatgggccaggagctgaggttcaaggtcatagctataacaggaatgctggtgagtgtccactacgttggcctcttcagtttctcatgtccaagattaagcttagactagggtactgagacagggctggcctattagatggcagaccaaggaccccagtgggaaggaagaggccagtagccagggtcacccaagtggtggattttcataacattgaaggcaacataggtgtagatctcaaacttaagtaagagtcagaaccacccagaaggcttgttaaaacacagatcccaggggcccatccccagagttttagatacaacagggctgggctggggtctaagaatctgcatctctaacatgttttcatgtgatgcccatgctgtggtgccaagcccacactttggctgtgtttctccatatttattgtgtattttaatagcctgtgtttttttttaaactactgatgcctgagtcctaccctcagagattcttttttaaaatttctatttatttattagagactgggttacgaaactggctaatttttgtagttttggtagagatggggttttgccatgttgcccaggctggtttcaaactcctgggctccacctgattcggcctcccaaagtgctgggattacaggtgtgagccactgtgcctggccccctcagagattcttatttaatttgtctgaggttcccaggtgatttcagactttaaaaccactgctttagatcctgatagactctgaccacactgcttttttttaaaaaaaaaaaaaacaaaatttattctaaaatttccatatagtaagagttaattcctttggtattcaattcagtgagtttttgacaaatgcatagagtcatataaccctgatcataatcatgacatgggccaggagctgaggttcagggtcatagctaacaatgggaatgctggtgatggttctatcacccccgaaacctcatgctgtccctttgaagtcaattcctctcccattctttacccaacgcaacctctgatctgttctttgacactatgatttttgccttttccaggatgttgaaatctaaatggcatcatacagtatattgccttttgggtctggcttttttttttttttttgagaaggagtcttgctctgtcacctaggctggagtgcagtggcgcgatctcaactccctgcaacctctgcctcccagatacaagctattctcctgtctcagcctcctgagtagctgggactataggcccctgccaccacgcctggctaatttttatatttttagcagagatggagtttcaccttgttggtcaggctggtctcgaactcctgacctcaggtgatccacccgcctcagcctcccaaagtgctgggatcataggcgtgagccactgcacctggctcagtctggcttctttagcttaggtgaatggatttcagattcatcaatagtctgttcttttttattgttgagtagtattccatcatgtgcatgtatcacaatttgttgaatataccagctaaaggatatttgggttgtttatagttttcagttattataagcttctatgaacattcatgtaaagatttttgtgtcaccacaagccttcatttttctaggatacacacctatgaatgggactgttgagtcatatagtaagtatatatttgattttataaggaaatgccaaactctcttccaaagtggctgtgccattttgcattcctgccagcaatgtatgagagttccagttgctccatatccttcccagtacttggcactctcatattttggttggaggagcattctaataggtgtgtaattcctcactgtggttttgatatttgcattttcctattgactgatgttgagcacgttttcatgtgcttatttggtatccagttatcttctttggtatatatttgcttttctatcaggttttgtttcatgtattttcagactgttattaggtatatacacatttagaattgttatgtcttctcagtgaattggccctattatcattataccatgtctctttatctctgtgaatttcctgttttgaagttgaatttttctgatactagtgtagccactccagctgtttatttatttatatatttgtttgtttgttcatacagggtcttactctgtcactcaggctggagtgcagtatcataatcatagctcactgtaaccttgaactcctgagctcaagcaatccttccacctcagtaacctcctgagtatctggaactactggcatatgccactatgcctggctaattttttttttttttttatgtaaagatagggtctcactatgtttcccagcctgttctcaaccttttggcctcaagcaatccccatgttttggcctcccaaagctggaattataggaaagaggcactacatccggcctcaactttttaaaattaatagttgcattgcatggcatatatttttcataattttatccttaacccatctatatagttatatttaaatattattttgtagatagcatatgctgctttttttaaaaaaatctaatctgaaaatctttatctccgaattggcatatttaaaccatttatattttatgtgattgactaagtgtttagccttttctttttctgtttatcttagctatttgttccttttaccctcaccaccttaacattacagttgccataggtattgtatctgtgcatattgaaaaccctactaaacactgttctaatttttgtaaatagttataaatatttcaatgaatttaagaggaaaaagtagtccattatgtttacccagacatttattattttattgcttttatttgtgtagtcaataataacataaatttttattaaaaagaaccaactggaaatttttgatctgaaaaatacaatatatggagttaaaatattcactacatgaactcaatagagaatggagatgacatagaaaggagtcagtatacttttagataaatccgtggaaatgatccagtctgaagaatggagagaaaacaagattgacaaaaaagaacaaagtctcaggtacttgcaaagcaatatcatctggtatcacttttcttcagctttttgtgtttctctagcatttctttcagagcaagtctgctggcaatgaattatattagttttccttaatccaaaaatgtctttattttcttccattcttgaaggatattattgctgactatagaattatctgttgacagttcttttctttcagtactttaaagaagttccacttcttttggggagaaatctgcagatgtttgttccctagatataatctgttatttttctctggctgctttcaagacattttctttatttttatttttattttttccagcactttgatcaggatgtgttgggtgtttttatttgagttaatcctgtttgggattcatccgagcataaatttgtaatttatgtcttttaccaaatttggaaaaatttcagccattatttattcagtttttttctgtattaatctttttctcctcttctgggacccaaatgtagtgaatattaagcttctttatattgtcttgtaggttcctgagactttgttcttttttttcaatcttgttttctttttttttttctttttgagatggagtttttctcttgttgcccaggctggagtacaatggcgcgatcttggctcactgcaacctccgcctcccaggttcaagcaattctattgcctcagcctcctaagtagctgggatcacaggcatgcaccaccatgcccaactaattttgtatttttagtagagacggggtttctccatgttggtcaggctggtctcaaactcccgacctcaggtgctccgcctgcctcagccctcccaaaacgttgggattacgggcgtgagctaccgtgcctggccctctctattctttagactggataatttccattgatttatctaaaagtttactgactcttttctgtttttttttttttttttttgtttttgtttttttgacacagagtcatgctctcttgcccaggctgaagtgcagcggcaccatcttggctcactgcaacctctgcctcccaggttcaagcaattctcatgcctcagccagcccagtagctgggactacaggggcacaccaccatgtccagctaatttttataattttagtagagacgggcttttgccatgttggccaggctggtcttgaactcctgtcctcaagagatcctcctgctttagcttcccaaagtgttgggattacaggccaactgacctggccaactgactcttttctatgtcatttccattctctattgagctcattcagtgaattatttatttatttatttattgaatttattttttatttttgttttttgaaggggaaggttcagtgaatttttaaactttctgtattgtatttttcagatcaaaaatttccacttggttctttttaaaaaagtttatatttctctgctaagaatgtctttttattcattccaatagtatttacttttatggtatgattatgtagcatggttatagtagctgttttaaagtcattatgttgtagttccaacacctgagtcatcttgggaatggcatctgttgattgtctttttccttgagatttgatcagattttcctgtttttatcatgttgagcaattttggattgtatcctggatattttgagtattatgtttcatgactgtgagtcctgttgaaatcctctggagaatattgattacttttctttgcttttgggcagataaccaaccccattaggttcagactgggagttctggcccacattctgtgggcagtgaatccaatatcagttcagttttccacagatttgttatgctgttgggtcttctctgaacatgtgccacttagggattagtctggtgcttggctggctctcaaagtctttgacatacttctttgagtctgtttcacatatgtgcacctcagactggtattggtgcagacatagaattaggggatcccttcctccaactctctgttctctatgattgtccccagactcttcagctttccagagccttctcttccctatttttctggccagaaagatggatttctctcagtgttaacccattccccccattctctcacataattctgcacaactggggctgccctcaagttcaaagtagtgagagaaaagagagagaacaaataacagggattccctccacactttttggagcacagggacccccttttcctgtggccagagagacaggcttttctcttggggttttagatgtctgtgtagtggtggcagtgcagctcaaaaactgggactggccttaggtcagggctggagagaaaaataaataaataaataaacaaacaaataaataaatggttatttcccccatactctcaggcccagagagtatcccagtcatctggtcagaaaatggggatttctcttggagttttgctgtttatgcctgcttcacagttccataatttggtcccctttgggttaatgcaggaagataaagaaggaaactcattgttgtaccaaaaactctacaagttttgactttcctctttgagctgtctgccattgtttacctttcagagtcctcaggtagttgctttttgtgctccatgagaattttgaattgtaattagtgggaaggataggctatgatgcagtttactccatcttggctggcactagaagtcaccatgcttctttgatctaatgatccattccctctgctttcttctctttaatccaagtagaaaggggctcctcttttgaagttatggctattttaatttaccttagacggttgggctcttccagtgtcatcccctcttctcctctcttcatagcttccctttttgagaaagctctttgtttgactcctcttgggcctgggcagtaaattttgtgctatacaaaattctctgctgtgtttcttccacagactctgtgactcaaagctgtgcataggtcctcagattcttttcctgttgggctgtctaaggcagccactatacatgtgtatatatgcacgcgcacccgtgcatgcagtgccttgatctcaatggctacgtctcttaacagtaaactcccaaatcatctaggtctaaagggactcagagggtactagagatcttttctgaaacccttctagttcttgaggtgggtaggcaagagtggccagagtatgaccttctgatatctagttttgtggaatgcatcacatagtgttttatgtcatattttggcactgtcattgcttgtagaataccattttggtctgccttgcctacctctctttgtgtgtggatcctaatctttccagagagtgtggagttttaattgcaaaaaggatgtggatgctttagaatccaggtggatggaggtactctgaatatattctactgtggagtgattgtttgcatccataagcaactggatctccattagcagtctccttcagtccaggagtcctcatgaattgtgacagagaactaagtgtggcaccgtcacaaactccgagaggaaacatttcaactccctctttggcctttactggtagctctgccattgggtactctccctaaggaaggaggcatttctgttcaggaaggaggaagcaggtatggaagaatttcactttttattattcctgagcctttagctcactggtcacaggcctaggcaaatgacaactttctgaggcacctgttttctagccgtttgtatgctccccactgccatggaggccagcatggatgtaaatagatgtagaaaattctacaaactctatttagtaagtaaccaagtagaatagttgtttaaacaaaaatcagtgcccagggataatgatacatgccatattttgcccagtgtgagtgtattaatcttctagttgaaggagtgaattggtattatcctgatatgatgtcatactcagagtttcctgcctctattttccatctggagtgaaatcaagaagattaggatgtgagcatgatccttcttttgttctgcatcttatgaaagacaaaacccttgtgttttggggtgatgtcattttctttatgagaaaagagtatgagattagtgcttgtcccccacctttaagtctggtttttgatttaattatcatgtagaagtaattctttagtaggatgttctatcatagctttaatgccatttctgattttgcctatgtggacagggcctgagtttcctccaagtgttcaattaggatgacttacgagaacagagtgggggaaatgacatcagatatcataccaaagccatttatgctatcaaataatgatgtctcttttctagaaacacataattatacttggaattcatgataatattctacagtatttcaaaatccacaaacagataaaatatcagaggaaagaaaatgcttttgatgtgtcagaattcatttattttccaactcgttgtgctttgccttacggtacgtgaatgggcacttatcaaagcataagaaggttattattatattccattcttattcaattcaaatattccattcttaacatttgtccaaattcagtttaatatgccctattaacatgaagactgttgagaaagtataccaaataggcttcaggaggagatcagaaaactaaattaggctttgtccctaaatattaaaaaaaattacttaagttatagaagtaatccatgaagagctacttgatataaaaaagcaaattaccttcttaaaaagctaatagcatggggtcaaaaattcctttcctgtaaatttgggaatctatcttttcatggccaatattcttaatgtagcatttttgataaataacataattttgtaactgcccattaaaatatgtaatttattatttagaattctccttaaaatattttgcattttggtttgctctctttagtaagagggagatttattatgcaatcttctaaagtgtaacacttattttctgcccgttaacttgtctgtgtttatgctttgctttgttgaatcaatcactgtggtgttttatggttatttccacatgtgtcttagctccccagctaaattgtaagctccttgaatagtctaagtctttatcctgtatttcttgccttctatatcacttgaaggatattacacactatagatactcagtaaatacttttccttataagcacaaattggcattagattagttcaaatctgctacccaggaatgaagcccaaatgttgcttttggtgggtgataggggtcatataaatctttgctatctcctggttcagttgtggtttgactagttcttaggaaagaataaaaagttctggataatcaaaagtggtaatttgttgaatttcattttataaagattttatttggagaagaaacaaaatcagagtatttagatttgagagaggggtgaaagacaaagttgctatctttaaaaatgcttttctcacctctcctattctgataatcttatgcacataaaatcatctatgcaggatggtttttaccattttctcctcttctgatgatgggcactgtttacgaaggtgaaatagaaagcagactggttggagacaacattagggtagtttttccatagcgtggacacgtctcagttattcccaggccttcatctattcattctttcagcaaggatgtattgatcactgattccacggcaggcattgcgcagccctagaaatacagtgagggcaagacaaacatgaccttgccctcagggacttgtattattgcactctggtaaatcctaaatatacttctttttttttttttttttttttttaaattgatcattcttgggtgtttctcgcagagggggatttggcagggtcacaggacaatagtggagggaaggtcagcagataaacaagtgaacaaaggtctctggttttcctaggcagagtgtttgtgtccctgggtacttgagattagggagtggtgatgactcttaacgagcatgctgccttcaagcatctgtttaacaaaggacatcttgcaccacccttaatccattcaaccctgagtggacacagcacatgtttcagagagcacagggttgggggtaaggtcacagatcaacaggatcccaaggcagaagaatttttcttagtacagaacaaaatgaaaagtctcccatgtctacctctttctacacagacacggcaaccatccgatttctcaatcttttccccacctttcccccctttctattccacaaaaccgccattgtcatcatggcccgttctcaatgagctgttgagtacacctcccagacggggcggctggccgggcagaggggctcctcacttcccagtaggggcggccgggcagaggcacccctcacctcccggatggggtggctggccgggcggggggctgaccccccacctccctcccggacggggcggctggccgggcggggcgctgacccccccacctccctcccggacggggcggctggccaggtggagggctgacccccccacctccctcccggacggggcggctggccgggcggggggctgacccccccacctccttcccggacggggcggctggccgggcagaggggctcctcacttcccagtaggggcggccgggcagaggcacccctcacctcccggatggggtggctggccgggcggggggctgcccccccacctccctcccggacggggcggctggccgggcggggggctgacccccccacctccctcccggacggggcggctggccaggtggggggctgacccccccacctccctcccggacggggcggctgtccgggcggggggctgaccccccacctccctcccggacggggcggctggccaggcggggggctgacccccccaccttcctcccggacgggcggctggccgggcggggggctgacccccccacctccctcccggacagggtggctgctgggcggagacgctcctcacttctcagacggggcggttgccaggcagagggtctcctcacttctcagacgggtcagccgggcagagacgctcctcacatcccagacggggcggcagggcagaggcgctccccacatctcagacgatgggcggcctggcagagacgctcctcacttcctagatgggatggcggccgggcagagacgctcctcactttccagactgggcagccagtcagagaggctcctcacatcccagacgatgggcggccaggcagagacgctcctcacttcccagacggggtggtggccaggcagaggctgcaatctcggcactttggggggccaaggcaggcagctgggaggtggaggttgtagcgagccgagatcatgccactgcactccagcctgggcaccattgagcactgagtgaacgcgactccgtctgccatcctggcacctcgggaggccaaggctggcggatcactcgcggttaggagctggagaccagcctggccaacacagcgaaaccccgtctccaccaaaaaaatacgaaaaccagtcaggcgtggcggcgcgcacctgcaatcgcaggcactgggcaggctgaggcaggagaatcaggcagggaggctgcagtgagccgagatggcagcagtacagtccagcttcggctcggcatcagagggagaccgtggggagagggagagggagagggagagggagaacctaaatatacttctttgtagagaggatcgtgaactgctttaagtctggtggcatcagaggaaaaattagacatcttcaggttgattccacagagcagttgtttcctttttcacttgacttacatagaattaagtcaggttatataaataaatgtaaaatcaagttggtttttccattgtaaggagaaaaatgctttcatattacttaaaatgcatttcaataaatatagaaaattacatacaaatggccgggtgcggtggctcatgcctgtaatcccagaactttgggaggctgaggcatgcggatcacctgaggttgggagttcgagaccagcctgaccaatatggagaaaccctatctgtactaaaaatacaaaattagccgggcgtggtggcacatgcctgtaatcccagctactcaggaggctgaggcagcagaatcgcttgaacccgggaggcggaggttgcggtgagccgagattgtgccgttgcactccagcctggaaaacaagagtgaaactccgtctcaaaagaaaaaaaaaatttacatacaaattatataccccacatgagagtttcttgtgaggaattatagtcccctacaactaccaagtcccctacaaaaaacaatttaccttacccccgcttttttttagtagaaattgacactgggttgagggtgtcctatggaatgaatgagtaaaactgaaacattcgacttgttagaaggaaacatgaccatgatttcaaggatgatccaatgtagcttggcggcagcccctgatagctctcctgctatgtgttttttttttggtagcagtgatggagaaaacaatgaagatgaaatttccaggaaataacccaatcaggtgttgcttaatggagtctactgtcattaaaatccaatttgattcatttggagagtgaaatatcacaattgcaactgcaccataatggctttttggaagatggaatttgtataaactgggttaatcccttgatcaccaattcaaataaaaatagataaaacatgaggaggttggcaggggtgaaggactgggaatagcaacggtgttgccagaaggtgtctttcctgccaaggggaattggcatagggaaccgtctctgagcccaagttctggaagccacaacctgatggagacagaagacagattgcctaggtccagctggggagtggagccctgctggcccagccagatcacaagtgaattgcccctctgacctacacatgtgctctgtgtgtcgaaatttgcatttctttccatttagaattttgctttctattagcccacaagaagtttaatggctgtcatgaacaagttttgttgtgttttcctttggaaatgtagctgttaggaaatcattcaatgagttctgggtttatacctagaaatggtcccctggaagtctggaagagttagatgctaccacaaggttctaccagacgtgcagggcataacttgtacacgcaggctgggtcagccgtattgagtggattgcaggaggaaaccttaactatgaggctgctaccttggacttgaaatactttgacaatcaacaattagtgagaattgggataagatttgtttctccttggcaaattcttctaacattctacaagcaaaatgggatttcaaaggcaagaattgctcagtgatgacaaacttttaattacctcacatacaaaagattggcatggtatttatgatttttaatatagtcattaaaaaagactccacaagaatctctactaagctgtgcttgatttgcctgtacattgggtaggatgcctttgaatgcaagttacagaaagcacaggtcagaatggtttaggccattctggataatttgttatcttgcatagggtaagttgcaggttggttccaaaatcaacatcccaagatatacaagtgtctcccattctttccattttgcccttctcaatgagctttgtgctttctccttgtgccaagatagcagccagatttctgacatcaaaatagatatgaccttgtccagcagaagaaaattctccctgtgtgttgctttttattattatggaaagatttctcagaaaccccttcattgaccttctgtcacatctcattggccagcactggatcacaatcgcttcctaaatcagtcagtagggaggtgaatgggctcacactgactacttagagctatagatgaatcaactcctgggtcaagtgggcaagaggtggatccctgaccaaaatctcacacacatgtacatacgtgcatgcctatccaataatagccaactgctgaagtgtgtgtactccacaggcagatgctgatgccaagtttggggtgcaaaatgttattagggttcaattcctttgaagggaagggagagaaagcggggttgggtagtggaaggagttgaactgcaaggtaggcctgaaaaagtctgggccatttcttggctttggagggttccggggcaagtattgcctgcttgtatcctgcattgggtcgaaatgaccaggactttatacctaggagatgactcatcagatgtgggctgctgggagaggcagctctctgcagctgaggcagatttggaaggctacattccccatagctgggcagaaggtcctgccctgctgggggatcagggtggtatacccccatgtatgtcatgccaaccgtgtctgtcacagcccagtgtgcataactacatgagtgtgaaaaatatataactgcatttatttaaaaggattttatagtctcttctggccactagtccaaactctctctttctctattcccagcctcaatttttccagagcagcagggttttactatattatgtttatgtatggattgtaggtggttagagctcaatcagctcttgaaactcacctgttcaatacgagcattagttaaggaagccagggtccatatgagttctggacctcaacttgaaatctttcatgtagtaggcattcaatgaatacttgttaaattgaattaatcaaggacacagactcaggattagaaccttgctctcccagcttctagtccagtgttctgtgaaccttgctgtctctctctctctctctctctctctgtgtgtgtgtgtgtgtgtgtgtgtgagagagagagagagagagagagagagagagagagggacagacagacaaagacagagagtaaactttggaatatcaaataattctagtagttttggtccagtggtctgggattttacattatcatgcatactagtaggaaaactcagacaaatcagaattatttcactggataaactagaggcagatgtatctggcattcacaatggttttattttatgggctacattgagggaaccacctcaaacttgggtggggcagtagctactcagcccagccaaatattgccatggggcaatgcaggcccaagatagcctgtatcctctgcttcctcaagagaagctggaaatctgaatttttaggtgatatctacaaaatttttaatgttgtctcaaaaatttaaaattgtcacgttggccaactcaaacatgctagtttgaaaactctaatccagtggctctcaaccaggggcagttttgttcccccggagacatttggtaatgtctggagatatttttggctgtcaccaggggagccggaatgctactggcatctagaggccagggatgctggtaaactccctacaatgcacggggcattcctcaaccaaaatgtcaattgtgatgaggctgagaaaccttactttagtcatatgttaaagtcaaaaacagaaactgcctctttttcactgggacctcctctgtgaaaagtggcagttggggcctgccccaaaacaggaaaactcaatttcagagcttcaaaaatcaacacttttaaaaatggttgctgagttacaaatggccaaaaagcatatgaaaagatgctcaacatcactaactaccagagaaatgcaaatcaagaccacaactgaggcattacccaaccattacagtggctactataaacaacaacaataacagacagtaagtgttgaaagggatgtggagaagttggaaccctgggaattgttggaggatgtagaatggtgccactgctatgggaaacagtatcattgttcctcaaaaaaattgaaactaggactaccttatgatccagaatctcacttctgggcctatatccaaaagaattaaaagcagggtcttgaaaaggtatttgcacactcatgttcatagcagggttatttgcaagagccaagaggtagaagcaacctacatattcatcagtggatgaatggataaacaaaatgtggcatttacatacaatggaatattattcagccttaaaagggagaggaattctgacacttggtgcagcgtggatgaaccttgaagacattatgctctgtgaaacaagccagacacaaaaggaaaaacattgtataattctactcacatgagatatctaaattagtcaaatcgtagataataggaagtagaagggtggttgccaagagctgggggaaggggcaaaagagagttatttatagttatagagtttcagttctgcaagatgagaaagttctggagatgtatctcacagcaatgtgaatatatttagtactactgaactgtacacttaaaaatggttaagatggtacactttatgttatgtggttttatttttaccacaattaaaaaaataggttactgagctgaaaaatagttcaccaacaaattctaatctcattgtatgagttatgccaaggtattttgaaaaacaaacacaaaaacagaaagtgtcatttgtagagaaccaaatcacagttttccgtgcatttgaggagagaaatagctaaaccaccagaactgtgactgagtgataggtgactaaaatgataagcattgcatcagggcttcaatcctcctacacccctagggctcagtgtccttatgtgatcagatcactaaggactcaccaaggttcacagctggtgggataagagctggtgaggtggggccaggcatggtggctcacacctgtgatcccagcacttttgggaggctgaggtgggtggatcacctgaggttgggagtttgagaccagcctgaccaacatggagaaactctgtctctactcaaaatacaaaattagtcgggtgtggtggtgcatgcctgtaatcccagctactcgggaggctgaggcaggagaatcacttgaatctgggagacagaggttgtggtgagcagagatggcgccactgcactccagcctgggccacaagagcgaaattctgtcaaaaaaaaaaaaaaaaaaaaagagctggtggggtgggttccctcctatggtaagggaaaccatcactgctgaaaatttttccctgttctaccaattatgacactatgctctgaggcttccagaagttgccttttgatataaaaactgagattttagaattccaaaatttatctctcaaaaaagtctctgctatgtgtctacagtacacattctgaaatcaattgcatttttcatcctggactatgtaggcaggcctgcttagaaggcaatggtctgttgcccaaagtgaggggagagggaaggggatgaggagggtggaggggagaggaggatctgatgccatcctgatgctcacactgcttcttgcactccattgcaggcttctcgcaggcaggctctatgtcttcatcttacacaccagggctaggctggcacaatagcagctactaaaaaagtgtttgaatcaaggaatgagtaaacacgggggtgacttgacctctttgtgtcttcctacctttaaaatagggttagcaattcctgggggtgacctcaggcaactctgcgagccaagccaggtttcctccattccccgtgtcttccctggtggtggaccatttcccttccctactaaacactgccgtctgaaaagccttcctgccggctttgccccacattacacactggttgatgggttctctttccagagggtatttgtttcttgagcctcatctgtcgtgtgaagtggaagggtagttttttgttaagaggattttcaggtgcagtttgttgggagaggttctctggggcagtcggtcccttcctgggcccctgggtctgctgggtacataatctgctctgcttacattgaaggctggccctggaatccctgccccacctgcatcaccaggctgtcacggggataaagcgggatgatggatggaggaggactttgaaaagttaaaagctcctcgcaagcgcgagttgttattgttgttaatccacagccgtcggggaggtgcccctcttgaaaagagtcccatctctaaggagactgagggcaatttggaaagaggtggcatttatgggtttcttgctttaaaacaaaacaaaacaaaacaaaacaaaacaaaacaaacaaaacaaaacacatccccctccagggtataccgtgagtgaacaggatgaagagttattcttaaaatcagaatggataaaggttccctctgaccccccacctcccatcctactgtaaagcctctaaaagctgcaaactttgttttggcaggttcactgccaaatgacagaaagccaatagccttaatttttctctctgttcccacatctcctctctaccctcccatcccccttccattattttagaacaagtctcggcttggagctgatctttaacttctggaaactgaattggttctgtgcgtatttggcttggctgagtgaggggagaagggcttgcttttgcaggaagaggagaggggtgcacgctgggggaagtctgggagctgggaggagatgggaggctgaaatccaagtttgcaccctctcttcctaggcctgcttccgcgtggggctcacagcattgtcagccagtcctgggggtggtgagagtgggtaggaaggcaggagggagagtttgaggtggtcaggtcctgggtctgattattattctcactgccgttcaaattttgctaaatgcgggccaattgctggaaaataaatcacgaaggggcgagaggtggctggtgggtgtttatgggggtgatttgttgtcctatagggaggtgacggtttctactgctcttctgaagtggaagggggacgtccctggctgcctttccctccttgctggctattttcatttttttcttgggggaggcttgaatgcgctcaagtattaactagaggccacggattggcccgggttcccgcgactggattgggcggcacaggaagacccgtgagctggggagttgaaattccatcctctgccctcaccaacggctggcaaatcgagcccttctgttccctgagagcagccctgagtgtgaagggcctctctgaaagcagcccacgggatgtggccaggaaacagggctttgtttctgtgtggggtataggagaaacgattttctgtactctggaatcttcaagagcttcaccaaacattcccagaatatggcttctctcctgttgttccttcctctctcgctctcctgtctaaatccaactcaaactccagggactgttcaaatcccacctccttctttgtttctagaacagtcatctcttcactgcatgagcgcccagaaccccgtttatgctcatcacaggagcaggcacctgattacctgaaattacatatatgttggcacttgggaatttatttatcttgccagtttatgatgtatgtcttaagacttgctctctgtctgtatgtcttatgttcttcttgaggttattaacttctttacgacaaacagtacagcctagtcctttgatatacttttaaattctaaactttgtaaacattttctttctttctttttctctttttttctagacagagtctggctctgttgcccaggctgaagtgcaatggtgcaatcagaatttactgcaacctcgacctcctgggctcaagtgatcctcctgactcactcagcttcctaagtagctgggactactggtgcgtaccaccatgcccggccctttgtaagcattttaaaacccattactttttttcttttctttctttctttctttttcttttttttttttgagatggagttttgctctgttgcccaggctggagtgcagtggcacgatcttggatcactgcaacctccgcctcctgggttcaagtgattctcctgcctcagcctcctgagtagctgggattataggtgcatgccaccatgcctggctaattcttgtatttgtagtagagacggggtttcaccatgttggccaggctggtcttgaactcctgccctcaagtgatcggcctgactttggcctcccaaagtgctgggattacagacgtgagccactgtacatgtcccccatttgtttttttttgtgtgtgagtataatttatatgaaatgaggagggcagactttggaagggaggatgcaccctcaggagtagatgaggttctagcctcgtctataccacagggatgtgcctttacttccttctcctgcattaggcatcaaaactagatcatcacactctcctcagtctgacgactctttccatcagagccactatagatcaatcaatcagagcaggctcttgttctgaggcattcatggggggcatgtgggctcttgtgcaattcctaccctccatttgtctgtcttccctgagctggccaaagtaggcaagatgtagtccacacaggagtcagaaggcaggagggtatcttgggcatgggaggcagtcccttaaaattctgccatgctgtgggagctggatagtcatgcttgcatgctggtcatgaggggaggtgatcaagtggcactttgaagttccataggtgcttcaggacagaacactggaatacacaggtgtctaggtctcacattcttatttcctggtccaggtgtgacagtcgataagcagactttacatttcggtgttttcctgcatagtaggtacaatcggtgatgggattatttttctctcccccattcatgcctgcttctttaagattttaatattaagaattgttttatgaaattaatgttaaaatactacagtgttctcttccctgggggtgcaatagacaggtcggtgttcctgggattccttctgagtgcccatcatccagcctcacttccctttgcctccacactggccccagtggccttctttggaggatgcccatgggcccctggagctgcttggggaaaggtacagagagccagaagtgcctgggggtttacattcgctctgaggcggccagtagcggagaaccgaatatgggagtgacaaaggtcagtggccttgcttcaatgtgggcccatttatgctttggaatctggcagaggctgggccggaatctcacctgtgcttggctttttccccatttctgttctgttcccctcatcccctttccgttttctcctgggagcactttattgatatataactgacaagtgaattgtagtctccagatctgattctgggggacccattttaagatgggggtggcagaaggtggggggatggcatgagagtgtagatcgtagataatcctaatcacagctgaagtaaagctgccctgtgtgcacaggatccctgcatagaggcccatgggatgactggagtgcccatttacccagtagggcctggtgagtaatagcatgggcctgggctgcctgtgttctccagaggaggactaagatgggggctgagaatctgagtgggccacagtcatttatgcagctcaggctaaaccacttctggatgctcgagagttggttgcagttgatcttttcagtttctaagattggaagttggcatcacccatgagatagtcacgatggcctccaaggacagggagattttgagtgtggcctgacccctgctctgctgttctccccagtgccaaggtaaagggattcatttggcttttctttcccttatggaaaagcccaattcactgcttttcactgtggttgcagtgtggaagtactccttctgcatgaattaaaaggaaacagaagcaagcattttccagaaattctaagttgaaatgaaaaacctattggctttggctaagtagtttattttctctttctttctcccccttccttccaccaccctttttggatttttttttttaacactatcatatgagtcagaataggtgtatcacttttaattattgttgattaccattcatgttggaacagctaccttgtaacgccatctcctatcaggaaataaatgccgacttagtgacctgcgtgagatagctagcgacccatcccactggggagatggcgggcagccgcctggcgcttgttgaattaagaagtgtgactacagtaattagcagcaagtatccaccacaggatagagcaaattcagggcagagctcagtcgtcatacaggttgaccttggtgtgggagaaatgagggatttgggattggggcctggagggttggggcaggggtcgcgagaaagaaggtcagtagcagaaaccaatttgacatctctgagcttttgtaataggatttaccccaggcttgtagacctgggaattgtcgcctatgtaaaagcttgtggccaattcggcagccctggagtgtgtatttgggaatggaagggttaagtcttgactgctttgcctctagtatgtgcttaatggaacacaaacaaaaaggaagagacatagtgttaaaatagaactggggcgcagattgagatgatacgtgattactagcagttgtacaatttatggaaaaaatgtgcatgcaggtcttttaggaagtgtaaataaaacagatggatttatggaagggggaagtaggctttacacacccagctcctagatcaacaaatgttgcccttaaggtaaatttttgaaaaatgttctaagcttatattagtcacacccatttatttttggcataatttgtgcactctttggaagttggcaagagcaggaatgttggggccaacatttggtcttgcttcaggagtttctatgaatatgaatgcctgaagtttacataggcttatgccgtctctatagcaacgtgtgtttgttgtgaaaatctagccttttaaagtcaaaaatccatatgttaacctcaaattcaacacgctatctaattctggtgtttaaaaaacccttttaggactgttgcacttttaatattggattggattggagggtgagttcatgggtgtccctggacacacacacacacacacacacacacacacacacacaaacgcgtgtgcacacaaggtctgtgcaaggcagacctcttgcttatggaagttaaccttcatgtgcctccaaatggagctggatgagaggagcttcagatgatcatggagctgcccaggggaatctgagagtcacgtttgaagcaccaaaggagaaaatgacttggtagattgtgcattttccactgggtgtttggaacttgggggagaccttgggaggaccatcaggctggctctggtcttccccaacctagagaacagacagcaggctgtagggaaactggcaagaatgaggccgcagagcccaaggcacggaaacttatctgtgcatcttagtacctgtcagattttcatatggttggaattgttcttgaacttaatggggttcttggttgaactccagtgagataacagttgtaggtgggaacctgaatatatttactgctctcttcaggggaaagaactagctttttgcaaaattatgatgtcctgtgcccatagtctctgggttctggtgtcctgcatttttcagggatgctctttcccgagacccagtgcttcctaagatcctcatgctctcccctccccaaactggctctcagaatagcataggctcaactcttttagactgatgtttaagaggaagagaaggaagagaagtggacttggaacaaagattgtgtttcccattagaatctggggcctacctcttaagagcggccattgaacaatttgcagatactcttaaatcctcaattttggcataaagaaaacaacaccagctcaaatgagataatggatgtgacagagctttgtaaattctcagctcctattcaaatgtgagtttattattacaatcactttaataagggatggcaaatagtgttctactcagatcctagctttgctcagtgggttgtagctgcttgcagtgttgtgctgagaaagattctgagattctttcacaaggaagtgcggagattgactagtgatgtctgtcatgggcaccagaagcctggaggggtcctatccagtgtcaagtgttggcacttcgagatccatttgctttttaagagtgatagagagtatgaaaaaaggagataaatctttaaagtaaaattttagatatcagtgtgtggcaaaggcattgttttgaggaagtgagcctcttaatgcccagaatcaagcttgtgtatagttctgactctgtcattggaagacagttctaatgttatttcccaaggctgtttccctggttgtctggttacggaggtgctaataattgggacatgtgtttctttttccctttctgttgtcccattaatcacactgtctctttcatacattttgacctttgataagattcagcttatcacttggctcattgttgttctctgttgatcgcaacatgtacggattctatatgtacaaatgttttagccataggtacagattcatctgtgaaactgtaaattgcttgaggaaagcagttatgtcccacattttctctgcccttgattcctagtctagtgtaggacatataataatttgctaagcaaattctgaattgctcagtaaattatttttctgattatatattaattttggaaaacttgaaaaaatataaatgagtaaataaaaaaagatgttaaaacattagtactagaattaattaccatgaacattttggtaagtttcctgccagcattttattacatgtacatatttacatataaattttaaaataatttagagcatactttataattacatgatctggattttccttttatgctacattataagtacttctctggatctttaaaagagtcttggcaaatattaaaatacttgaattttaattttaaaacttcaactattttttattagtttgtgatttcaacagtaacgcatgccattgtaaaaaaaaaaaaagttgaagatatgaaaagtaaatatcctctctcctcttctctcctttttttcactcagttgatgtaactcctttttagcaatttcttatatttctattcagacattagttttgcatgtacaggcacagaaaacgtgggttcatattattcatacagttttgcgacatttttgcacgtattatatcttggacatcttttatgttactacatacaaatccaccttattcttttaaactactgctaggtattccattctaggaaaatctcatctttaaccaaacttctattgatagctatttaagtgatttcccttttttatatatattttttgagacaggttctcactttattgcccaggctggagagcaatggtgtactcacagctcactgcagtctcaacttcctgggctcaagtgatccttccgcctcagcctcctgagcagctgggactataggctcatgcctggctaattaaaaaaaaaatctatatatctatatatatttgtagagacagggcttcactattctgcccaggctggtttcaagctcctggccttaagcaatacttccttggccccacaatgtgttgagattataggcataaaccacatgcccaggccttttttttttcctcttataaacaatgctgcatcaggcatctctgtgcatatatttctgtgcgcatctttgcacatatgttttagtgtacaagtgtttatgtaggatgaatgcccgaaatggaaattctgggctaaagggagggttcacatgtaaagtattaaaagatatggacaagttgctctccaaaaatgtttatgcatttacattctcatcagctatgcatagtctttctggtttcccatactcttatcaataatggggacaaaaaatgaaaaaccacacacataaaaccaaacaaacaataatctcactgtttttaaatttacatgtcattcattataagtgagtctgtgcatttattcacacatttagccactcgtattttttattctataaactgcagttcacatactttgtatatttttgtatcatgttatttataagtttctaattgatacattttatgtctttagatattaagaaaattatttgttgtatgtgatagaagtagttccacaatttttttttgtctttctctgactgttatggtgtttttacagcagttaaaaatgtttatgtattcaagcttgttagtttttttctcaattattttatttcatgttaagaagagtctaatttattccaagataatttagaccattcccctgtctttcctttaccggtttaaaaaatgttattattttcatgttataagagcatgttattttcatgtttaaattaaacaaaaatgtaatatagggtactggcataaacttttccccaaacatttagctagttatcttacaccatttgttgaataatctatattttctcttgtgatctgaagtgctacctttatcatatactaaattcttatatatgacttggcttcctttgaaccttctactctttctagtcctacatttgttccttattgtttaaattattatagttttaacatattttataacagtgaggtctagactatacttgttaatcttctttttaaaacacatttcttggctattttcacatggcctattttcccagatgaccgtggaatcattttgttaaatttgtactttcccaacaaaacaaacaaaactgtttttgagattttgattgggattatgttgaatttatagactaagatggagagaattaccatctttacactactgagacttcctacccaagaatacagtttttatttcattttattcatatcttattttgtgtttctcagtaagcataacttttaaaggctttacaatactttgcctatggatttaccataatttacatgattcttcccttattgctgaatcagttcccatctctttctacattaaacaatgtgacagggagcattagtatgctttgctctttgaacatgttttgccaatttccttagaatacatttccagtggatcaaaggatctaggcattttaaaggcttttggtagctattgagagatggctttttagagaggctcaaataattgaccctcctactggtagtgtcagagtacttgtctggctgaagtctcaccagcattttgagtattagtattaatagtatctttgctaagttggtgtgaatgagttaagtggtgggtgggacacagcattggatggctgcctctgcctatctgtgaatagatttttagaaatgttctcctttgctacatgcttttctctacagtatagtcagggggcagttttcactcttcactaagattagctttgagccaactttgaagacatttactttagtaacttcttatgttttttggaaatttcatttgtccactgatatctaggaatgaagggtaaattttgagaggcggatttccattttgttgtgatagacttatctaagagtagtcaagacagatgagaccccccacccccatctgccccaacacacatacacacaagtggctgagactctgcaaatttcagctgagcaacttggggttgacttgggccaaggttgagagaaggtgttcaaatttcatgctccaaataggtctctggaacagaagagttcttcttgctttccaactgcaaatgtcatttggatttcccaagcttaggacccagaagtgttcttttgtgagaagcaaatgccaaatttactaggacggccttagatggacaaccagacaatcatactggtaatgcctctttgctttggggttactatcgctcctgtttactttggcaggctttgagcatgggaatcagacatttaaaatgctctcctttccatccaaaaaccctctttgctgccaccaccttgctgtagaaccccctccatcaagattttttggtggggtgggtcatgcttttacagggctgtttctttcggggtaagcctattaggcttctaggatgttttaattggggcagtgtaattgtagggtgccacaaaggccctggcaaggggtactttataaatcagattattatgcttagttgtgttaatggacatttatatgccctaaatccttcatatagcaatgagataatagcccttaaggccatagttactattttgggtagcgcttacttgtaaaactggatcattttattgtgaagctgttttcagttagagagtatgtaaaaccctttgaaagacagaatttcaattttgtggttgctgtcttctatagcttaaatggtaaaatcattatacacacacacatatatatatatatgaaagctttgaaccagttaacattgtgctcctgaagcaggacttcttaataatggggaactgcaaaaccttagaggaatttgaccaaatgtccaacctttctcctgaccagtaataatgttaacttttgggagacagattctggttttgttttgtttgtttctcagtggttgcaggggcccagggaaggttaggaagctgtgttctagtgatagtcagtgatacagaggacagaggacacaggttatgtggctacaatggagagtctgaatgcactggttgcattgacaaggattttcaagtgcattttcattcctaggcttgagactgatggacagagcacccaactggcttgacaggaagtcccctgtcctctgggagcctggctactttgtttggaggttcatagtaagcaaattggacagattgtgggtagctcgctgtgctactttgtgaggtgtagatatggctggaattagataagactgaacattgtatgacacaggggcatggatcgtttccacgacagagaggatccaatgcagtggggacatcccaaattgactgcaaatgccttccctgcccctgccattggctcacttttcccagatccttttccctttatttacagctaaagggcttcctaagtttcaagagcacacacctgcttggttcctaggatggcgactgggactatttggaagaagctactctgagggtggaaactttgtcccagacaccccagaggaccaaataatcagattatgggaaaaattctcacattcctactaggtacttttgaaactcccctggtgtctacgatttcctttcctctgttctcctttgctccctgttcttctttctggtgtcaaatctgttagtctgaaggatgagccatcaatggcaacttccacggcaccattcgggctgcttctgatctcccctccttccctgtgtaagccctgccagaatccatctcacctttgctctgacctttctcttgtgtgtgaccctgggcccctcatctgtcttcttccttcgtacaggtccacatcagtcttatttcgtctttgaaacctttctcgccactccagatgttggtagacattaattgtacctgtcgtttggggtttatattaccctgctgccccacctagggtattcataaagcaaagaggcagtattcatggtggttaagagtttggcccctggagtctttacctggcttgagtcctgcttctaacccttgctgatgtgtggccctgacatgacagttcatcccctgagccttagtttctcatggaagactagagcatacctcattacatagtcaagaggcttaaacacagttcaaagccattgaaagctcttctcgtggcggtgggtagtaagcactcaagaagtgttagctgctgtcattgctgttattattataattattttgatagatcatcatgtcccatcgtaaggtctttgacatcctcccagtatctaccagacctgtgcctacaggtaataagctgtcccagggaaggatgaggatggcataagcctcatctcctccccatgctgaccctttggctcccaggacaggatgtttggcagcacagaggtcctgccaaggttgttggcaaataaacactaccatgttctttaggaagccaataaggtgacctgcagttttctgtgcagagggttggggcgggggtgggaggaggtgagtgtggcaggagagatgaggctttgcagaagtgggaagaataactgggagccacttctcctttgtctgtcctataaacttgctgtttctggaggaaaggagtttagaggaatgaggactgtgttggagtcagatttgggccagggtttcaggtcctagttccgtcacttgccagctatgtaagactgggtacctcacaatctttggggctgcagtccccacatctgtaaagctgggatgatgtacttctcagggatgctgggggaatccagagagctagtccctgtgtaagtgctgtgtgaaaaactacacaaatattagttgtcataatcagacacactctgtattaatagcttttatttcactattgcagcttacttgttcccccttctttgtccttctgtcctgttcttcccctcctatttatttgccctgtatttctgtttccctctttggttgcaatggcagatctttatttagtctacaagaaaacagcagaggggagtagagttccaggtttctggctaggacctctgctttcacaaattttttttttttttctttagagacagggtctcattttgtcacctgggctggagtggcacaatcatagctcactgcagccttcaactcctgggctcaagcgatctcctgcctcagtctcccaagtagctgggactataagcatgtgccagcatgcccagctaacttttaattttttttttttttttttttttttttgtggataacaggtctcagtatattgcccacgctgatcttgcactcctgggctcaagagatcctcccacctcggcttcccaatgcactactcttgcattgaaccactttccttttcagctttcagacgggcttagtgctgaggccgaggctgggatgttccaaatccctgctcagagttccttctctgttcacatgcactcttgtctccacagctggagactaaacttgtttagggtaaatattatggtttgtattactttgtacaaaggcaggtacacagtaggcaatctgtaattgttactcagtggtgctactttttgggaagcgataagaaaaatgggacaaatactcttgcagcctgtggatcagtacctctcagagggcacactcgagcagtggcccaaagggacacaggctcaggctcctggtctgaaagagtatagggttgagagctggtctccaggatggggtggtgggtgaggtcctggtcatccacatgctctgggctgagggttattcttgtttcctagccagcagaggagagtttgggcaggctcatggttctgtgggttagcttgtttgaaatatgcctccagctggtgcatggtgccatgcacctgtagtcccagctacttgggagctgaggtgggaggatagctttagccccaggagttcaaatccagcatgggcaacatagtgagatcccatctcttaaaaaaaaataagtaaagaaatggcaaccccatgataacagaacaacatggtgttatggtcctggggaacttcctttcctgtgtgtggaaaaccgaccaactggacctctatcctgtggcttaaaagcgtggaaacttagacagttgctgaacagggccttagatatattcagacagcagaggagagctgtttagccagaacagaagcccatgtggttgactcattcgtttatccataagtcacttctcagttagttgagtatgccctccttggtggactcagggtgacatagggtagagcatcccagaaactgtcacaattccttgggaacttatagtccatcaggaagaaagatacattatgaatagttacccaaatgtatataattatggtaagtaacataaaggcaaagtgtggaggggtcatgacttgcagggagacctgacctagtttggagggtcaggaaaggattctccctccacatgacacttaagagatccaaaagatgagcaggggaagggtgttcagacagccctgatgccagctagtgcaaagactctttggtaattagaagagcgcacctctttaagctagttcattgctgaatcattgtagcaactctgcatctgtgatgccagtgaggcaaacggtgtcgcctggagtcatgcagtgcatggcttgtgcagtgcaagggaggctctggcttcaggaagaggaatggccccaggttgagcaggagctcgggctattagaggaaaactctgtgcaaccagctgaatgcaggcaagccaggggaaaagagaatgaggagggggaagaggtgggccggggttgagacatgtagcacatggaaatccctgttaaggatttgaaggattttaagtcattgaagggttttaagcaaagaaacaacttggtcgtttttatatgttaaaaagtttactctggttgctggttgaagaatggttcagaaggccaaagtggatgtggaaagaccagataggaggattttatagtcctgtgcttgtgggtaggagtgcaaagattagataaatatttgggaggtggaatggatagaatttagggatggatgatgtgtatgtgggaggcatgaaggggaaggaggagtcaacctttaaaggctgtcctgagaatcaggagctggctaagataattgcaaggagcattcagagagagagagagagaggacagtgtcctggatgccaaggaaggggttgtctctagaaggagggatcagtgggtcactgtgtcaaaagccatagacagatcagtgagaggcaactcggacttggcaaagtcaggcttggtggatacataagtgtgagagtcaggctggaacaggctgaggagtggacgggagatgaggaagaggagagagtcaatgcaggcaactcatgagatgtttgtgaaggaaagaagtaagagtgggtggtagctaatgggaaatgtgggtctggggggtcaggtagggaggataatgtgggagagagtaggatggaaggatttagtggagacaaagaaatagagagatacaggacacagagagggtaactgataatgacaggttctggagaaggcaggaaagggtgggagccacttatctaaggcaagattggctgtggatagagagtggggtatctccatggaaacagcggtgaaggaggagaggatgaagtagatgcaggtgggtctgtcagtttggtggtgggaagctggtagagtttcttttatgtgggttctgttaactctctggagtaagaggcaagattgtctgctgagaggctgaagatgaaatttatgtgatggaccagcaccagatgaagcctgagaagtttgccgaaagaacaaaggagtgagtggaatcgctaacatccatataatattgtataatttacaaatcacccacacatacttcatttcatttcaaccttacttcaaacacatgtgttggttgatattatcctctatctttaagatgaaaataaggtccaagttgggttcaaattattatgggacccatgccccactaaaaggatgctgaggagcccattctgcactccaccctaaccagcttagtgggttttgtgtttttaggtccgtgctgcatgggaatccccttcctacatttgagaaacttcctgccatgtgattcttagggtgagcagagctagcctttcagtagagaagcctagaaggccaatcaatacctgccctcctgagcccccccaggtgtctaggatgcaggttagcactagtgctctgacaattgcacgaccctacctgaggctctgaattgagagctggtgaggccaagaaatggggatggtcctgctagggtggtggcagcggcagcaatggcagtgacatcgggtttccaggggctgtgccaccaatgaaggcacttgcagtggtgacacaggctcaggtgaactcttcaaaatgtgcctgtagggaatctggggctgtggttccaggacccggctttcttttgtgcctgcccattccctgaacctctttctccaagcattctggagtctgtgagctgcctttagtaaagtctttttttgctcagttcaggcagagccatttctattgtttgtggccaacaaccctgactggtacacctgcttaaaccaagagcattgttacatctgcaagaagagtctgcagctcaccatagtgtatttaagttctcaacatccaagttatgtagaagactccaagttgaggagtgggcattcacacttgttcttgttgctcaggaaaattaacctcattcagactgaggagaacagaaatactttgagaaatctcacaaaataggtgggtaccttattcacatgctaggggttttcatgttactggaggagtttgggtgtagagtgatccttgtgtccagatctttggagccagtcagcaatcgatattgagccattgggttgactttgctacctagaattcagagacagtcctcagtttcttagatatggcttcagtctcaaaagtcagggttggccaggcgtggtggctcatgcctgtaatcccggcactttgggaagctgaggcgggcagatcatgaggtcaggggttcaagacgagcctgaccaatatggtgaatccctgtctctattaaaaaatacaaaaattagatgggtgtggtggggtgtgcctgtaatcccagctactcaggagactgaggcaggagaactgcttgaacccgggaggcggaggttgcagtgagccgagattatgccattgccctccagcctgggtgacacagtgagactccatctcaaaaaaaaaaaaaaaaaaaaaaaaaaaaagtcagggtggcatttatttgctgttgatacaaaggttgccaaaaaagctcattctggcttctgggaggctacctaaagagtgagtgattgattggtaagatctgccactggtacaaagatggggcttgtgcccatcctcatttagattcagatcttggaggcagaagctcctgaagggcacatcaaggttagccctaccttcacatagacttacaggtttcccttgggcagatgaagtagccaagacttacgttgcctctttggagccctcagtccaagccaagactgagtataggccttgaattttcattcatttcttagcatgaaatccctgtgatttgaggggatctgacaaactgttctctgttatctctgttgttactctacaaaatattctttttaaaagacatttataaatcaacaattatagttattttaagacaccagggttagaaactgataactcaaacaaaagtaagcagaggcatagataatttgactaatataataacaagctcatgctattagaattatgtagaacactatgcacagcaatagagaatacattttcttttggagcatgcaaaaaacatttgtaaaaagtggccacataccaggctgcaaaggaagcctcaataaattccaaggaatgataattatgcagattatgttctttgaacataacactagaagactaaaagttacctataaaaatcccatctgaataaaattaaaaaatgaaaaatctcatatgtctggaaatcaaataatattactaagaaactcttcaattaaaagggaggcttacttgttaaattcctaatgagtataagataaattagtaaaaataaataataattaacgctaaatgacagtaagaatccttcctatccaaataagcaggacatagctaaaacagttgtcagagaagaatctattgctttaaatctacttttctgggaataaaaaagttaatatcaagtgagttaagaattctacccaaaaggtttgaaaagaataacagaacaaatcaaagtacacaagaaggaaagaaataataaatataaggacaagaatcagtgaagaatgaacaaataaatacaagcaatagacaaattagacaaacacaactttttggaaatataaacagcaggaactatcttactaataattcatagttaatgaatatgtgaatcaataaagactaatcagcaaaaagattaataaacaagatactgatggaaaagggagaaacagctatacaatacagctggtaagataactaaattatgaataacttcatcctgctaaatttggaaaccttatatgaaatgaaaatatttagagaacatgattaaatgcctatattggtaaaagaagcaatagaaaacttaaataaaccaataggcaccagaacaaagacctccactccaaaaaggcacctggcccagacagttttacagtaaaattctagcaatctcaagttagaaaatagagaaataacaaaaactaccactcatttttgagctgaacataacatttgttccacaattagataaggataagaatagaaaattactgaccacttttgcttatgattccagataccaaaaccctaaaaaaattgttgtagcttattaaatgttaatattaagagtattaatttattgtcatttgataagtttgttcagaagtaaaaggatggtttaacataattcaccacattaatacacaaaaagaaaaaatcacataattatgtcagtaaatgtagaaaatatttaataaagttaaatacctatttatattgaaaaacctagagcacaaatcatacttaatggagaaagatgtattacattttaagactagtagtaggacaaggatacccattaccccccactattgttagcataacactggactttctagacaactgtaaatgaagaacaaaaagagataggaattaaaggggaaggaatgaaactatcattatttgcagataatgtgataatctacatagcaaaaacaacagatcatactattagagttaagcaaggttgccagatgcaagatcagcttatgtattgcaacagaatttctcaataccagcaaaaactgattagaaaatatagttaaaaaataatattcatggaagcaacaaaaactattaaatatttaggaaataaacaagatctctataggtaaaatattaaaaattaaaagctataaaaagcatgaataaatggagtaatttttacatattttaatcagatgacaatataaagttgtgttaattctccctcaatttttttttttttttgagacagagtcttgctctattgcccaggctggagtccagtggcgtgatcttggctcactgcaacctcctcctcctgggttcaagtgactcttgtgcctcagcctcctgagtagctgggattacagatgtgcactaccacgcctggctaatttttctatttttagcagagatggggtatcaccatgttggccaagctggtctcaaacttctgacctcaagtgatctgcctgccttggcctcccaaagtgctgggattacaggtgtgagccactgcgcctggccacagttctccccaaattaacttataatttcaaggcaatcttaacaaaattccagtaggatttttttaaggagcttgatgatgtgttttagaagttgtatggaagattaagaggttcatgaataacaactttgagaaaggaaaacacagaggaaacttgccctatcagatgttaagacatattgtgtcaagatattaagacatagccttattgtggcaaaatacaaatagaacagagtaacagagtagagcactcagttgacagacccatgtgtgtaaggaatttaacaaatgataaagatgacctactaagggaattggatcctgtggcagattcccttcccaaagaggattgcagcattatctccctcccacgtgtgcttctttacaaagtgactttgagcccttcctgttagaggtgaaatgtatgtttcctcgccctgattctgggcaggtttgtgatgacagtggaagtcatgctaaatgatttctgaagctatatataaagctaatatagcctaagcaagtgttactaaggttttataaagtcatacagcctttgaatttttctttatcttggaactcagccatcataatgtgaagaagccgaagcagcctgtgaagaggcgctagtggaaaggaactcaggtgcccctgccctcagtcccagctgaactctcagctgacagccatcaccaacttgccagccacaggagtgagccaacttgagagtggatctttcagtcccagtggagccatctcagctgacacaccatggtaaaaagatgaaccatccttgctgatccttgccagtgctgcagatacataagcaaaataaatgtttttgttgttttaagccactatattttggagtgttttgttatactggtgtgttaaacaggcctctatgtcacaccatatacatatattggctctaaatgttaaagataatacatacagtttgtggaatattatataatagactatctttgtaacatagaagtggggaaggatttcttaagcaaaatcccaaatacacaaattatgtgcccaaaatggatgactttgattaaataggaggtaagcaattttgcccaatgagaaattgataaaatgaacagaaagataattgtttgggagactatagttgtaaatatcaacaatctaatatttggaatttacaaggaactgttgcaaatcaacaagaaaaaaacagcagcccctatgaaaaagcaatcaaagactaaaaactttcagtttacaaggaagctcatatgactaaaaagcatatgaagaaagtatgcaaactcacaaatgagtagaaaaacagaaataagaatatcaagattttatgttacacctagcagagtggcagaacttggagagtagaggatattagtttcctagggttgccatagcaaagtaccaaacactaggtggctaaaagtacaggaacttattttcttacagttttggaggctagaaattcaaaatcgaggtgtcagcagggttggggtcttttaagaggtgtgggagagaatctgttccaggcttctctcctagcttatggtgttttgctgatgatctttggccttccttggcttgtagatgcctcaccccagtctctgccttcatcttcacatgatattctcctgtgtctgtccatatggtcttccctctatacgtgactgtctttgcatccaaatattttcctttctacaaggacaccagtcatgttggattaggaccctccctaatgacctcaacttgactgcattttcaaacatgatcacattctgagctactgggagttatgactttaacgtatctttcttgggggacatatttcaatccataacactgagtattgtgcgacgttggtggggatgtgagccttcaaaaccctcaggctatgctggtggcagggagaatgggagcagcctggcagtactcagtgaagccaagtatactgacaccacatgacgcagctttcctgatcctgggaatacatgctggagaatttcccatatagtttttttttttgtttcattttttggtatttttagtagagatggggtttgtccaggctggtctcaatctcctgagctcaagtgatccgcttgccctggcctcccaaagtgctgggattacagctgtgagtataccgctcccatcatagcctcccatacagattcataagtgacatatatgggaagataatcacagcattgtttgtggtagtgaggagttgggaacattctagttgtccattcttggggggctggatatgttaaatctggtgggtacagaatatggaacagtatgcagcatctaggagaaatgactagatgcatgtgtggcaatatggatagatctcaaaaacatcatgctaggtgaaaaaaggaagagaccggatgatacctaaaacatgagaacataacctttctatacattaaaatatatgcatacaagacaatagtcaaagcacatatacagataagcacaatacaatgcttgtcaactgtggggagagaaactgggctgtagaatggagatgaaagagaattagtaaaaagcggggcatgtggagttgtgttttgacttcaaacagtaatgtctcatgaacagaagaatttgttcaaatcaaccctgagtcctgaaacacacaaacgcttacccatgaaatactccacttccattgattgatttattgattgagatggagtctcgctctgtcacttaggctggagtgcagtgatactatcttggctcactgcaacctccacctcccaggttcaagtgattctcttacctcagactcccaagtatctgggattacaggtggctgccaccatgcctggctaattttttttttgtatttttagtagagatggggtttcaccatgatggccaggctggtctcaaacttctgatttcaagtgatctacctgccttggccactcaaaatgctgggactacaggcgtgagccaccatgtccggcctgaaaatacttttatcctgtgagagttttaagatcttaaggttggtggaatgggacatcagttttgcaacgttaagaattaaaaaagaaaaaaaaaaagagatcttaaggttggaagagaccttcccttcaacagccctgtcttgccctgcactgcttgttgagagagatacaagagaagcaagatgtacttcccatcctcaggatgattcatctaaatggggagaaaacatgctcaagaaacaattctgtgatgacgcaagtcagcacgcagctcagcaaagggagagggactggggaagagcagaatgtctgttcaagataaaaataggtagatggaatgtattgacttcagaagaatttgcttaagtacaaaggactccccaggccctcagcttgctgcccactgccagaagccacaaatttcatctgtttctaccaggaagctctgagggagctgtgacctgccgatggtgaagaggctttgcaggagggtgggctcacctcccagcttcaatcagattacttttatacctagggctccagattaagattttccttggccaggtacggtagctcatgcctgtaatcctaacattttgggaggctgaggcaggtggatccctgagccaaggaattcaagaccagcttgggcaacatggtgtaacctcacatttacaaaaaatacaaaaattaggcatggtggtgtgcgcctatagtgccagctagttgggaagctggggtgggaagatcacttgaggctgggaggtcaagggtgcagtgagccatgattgcaccactgcactccatcctgggcgacagagtaagaccctgtctcaaaaaaaaaaaaatattttccctgaggacagatttctatgttgaaaagtttgagaaccacagatctacaggacaaagtcctagtgttgcagcggggtcttctgggccctcccctcctcccagtctggctctcgctgacctcttggacttcctcagatcccaggcactgccattttatgaatacctcctcactctcttgtgcctctgtctgctgagtgaattcctcatctccctcaagctttatctccagcatcttttcctctttggactctctcctcatccatcaccttcccctacctagagctgataccccgctcctttattaaagcattcaccacaccctgtgctgcaactttcttgccagccagctatgagcatcctagagaccagccacacccttctccatctttttcgcctcagcaaccagcatagtgcctggcacttaatttgcgaaggcattgtgtgaattgctacatgtttgtttttccgagttcccgtattcacttgcataaaaacatatgacacttatttattcatttttattttttacaaaagtttattttttattttattttttgagacggagtctcaatctgttgcctaggctggagtgcagtggcaccaatcttggctcactgcaatctctgcctcccaggtttaggcaattctcctgcctcagcctcccgagtagctgggactacaggtgcgtgccaccacacccggctaatttttttgtatttttagtacagacagggtttcactgtgttagccaggatggtctcaatctcctgacctcatgatccacccgcctcagcctcccaaagtgctgggattacaggcgtaagccaccatgcccagccaagtttattcttaaatgtgcaataggctccaagacaactctttattctagttatatgtggtaaaagatattatggtagagaatccagatgtttaaataggaatggaattgagggtcatcatcatctcaggcacaaggagcagcttatttgccagatttctttttttcccattataatacttctaaaaaaattggcacattgtacatatttatgggaacagtttgatgtttccatacatgtgtatgttgtataatgattaaactagggcatttggcatattcatcacctcatatatttgtaatttctttcttttttttttgagacagagttttgctcttgttgcccaagctggagtgcaatggtgtcatcttggctcactgcaacctctgcctcccaggttcaagtgatcctcctgcctcagcctcccaagtagctgggattacaggtgcgtgccaccacgcccagctaattttttatatttttagtagaaatggggtttcaccatgttagccaggctggtcttgaactcctgacctcagatgatccaccggcttcgacctcccaaagtgctgagattacaggcatgagccaccgcgcctagctgcatttgtaatttctttgtggtgagaacatttaaaatccttgcttctagctattttttttttcttttctttttcttttttgtttgagacagggtctcattctgtggctcaggctggagtgtagtggcacaatcatggctcactgcagcctcgacctcttgggctcaagcgatcctcctaccttaacctcccaagcagctgggaccacaggtgcgcaccaccacgcctggctaatttttaatttttttttttgtagagatggagcctctctatgtcgcccaggctggtctcaaattcttgggcttaagtgatctcctgccttgggctgcaaagtgctgggattataggtgtgagctgctgtgaccagccttctagctattttctaatatgtaataccttactgttaaccatgatcaccctagtgtgcaatagaacaacagaatttattccatctttctaattgtaactttgtacccattgaccaacctctccccatcctcccttctccccttctcttcccagtcataaccactgttctgttctctgtttctatgacattaactatttttttttttttagagcccacatatgagtgagatcatacagtgtttgcctttctgtgcctggcttatttcacttaacatgatgtcttccatttcaacattctgtggaaaatgacaggatttcattcttttctatggttgaataatattccgttgtgtatatttgccacattttccttttccattcatccactgatggatacttggttgattttatatgctgcctattgtgagaagttctgcaataaaaatgagagtgcaggtatctctccaacatactgatttcatttcctttggatatatacccagtagtggaattgctggttcatacggtagttctagttttaattttttgaggaacttccatactgttttccacggtgggtgtactaatttttttgccagatttcttaactccacctgtatccagggccccttcagcctctgtttgtttctgcttgaaagccacatcttccttgtccatctccttggcctgttccttgtgctgtttcaggggctgcttcttgccacctttgtgtccagacatggcacctgctgcctctttaaaaacatatggcatttaaaatggggcgctctctatctagcatgggggttagtaaactatggcctgtgggccagatccagtctgtgatctgttttagcccacagattaagaatggtttttatatttttaaagagataacaaataaaaactaagaaaattatgggacagagacctgtatgtggcttgcaaagcctaaaatatttatctgaccctttacagaaaaaaattgccaacccaggggacactatcagaggacactatgaaaagtcatgggattccataggctgtgaggagtggatttgcactagttaacactagctgacacttagctaacataatcaattttttttatgtgccagctgctgttctaaggactttacatatgttaactcgtttaattctcctccaaaccctgaaagataggcattattgttagtcttattttataaatgaggaaacagagatacagaacatttgatgtggttaaggtcccacagtggctttctttctgatggatttgagacgcagcgggccatggtggttgagaacaatgggctcttgtgccactctgcctagtttcagtcctggctccacgatttaaatgagtctctacttaaagtgcttaccttagtgcctggtatagcatgggaactaggtaagtattccctagtattattggggtgctgcaaagtcacattcacaaatagcttctgttattataatggaatagagaagatcactcactagaactggagaaaaacagtcagattgggagaactatgtttcctagcgcactgtgcatgatgagggcagtcatggatagagagtgtggtgttgacataaaggtgtgtgaattgaatgagggagcagaatggtgatgtaggatgtgtgtgtgtgtgcgcgtgtgtgcatgtgtgcgtgtgtatatgaatgtggggggacagtgagggaatgtgagagaaacgtttgtgtgtttagctattatcgtaagtataaaactttggagacagaatgagaatgtctaaggagggttgttgattgggaaggttttggggtaaaacacttgcataaaactttataagaaaaccccaagactgatactgtttttcaaagcttctgaaatgttatacatgttttctttgaacacatctttgagagtggatcactcagaggccaggatttatatggattatgttgtgtattgactgaacacaggaactagtattggcctctccacccgtgatcctagaaagtgatttttcgcccaggaaattgacaggcatgtctgaaaacattctagaaacagatggctgagagcaaactagaagagctctatgaactagagtgcctctagaaccgctgccgtaggtcaaaggtgctgggaacatttaaaaatctctgagatgagtcccaggcatctggtggtggtggtggaactggcttgtaccaccttggaggagccaattgtgcctagatattcccaactccattgttcagcaacatccatttggtagcttgaaattggccatgataaaggtatttacattatagaaattgacaaatgctacacatcagagttttgttccctcacttggggctggttgttaaatatttaccagtgcaccaccacagacatcaggcttacctctcttatcagttccaaaatcctaagaataaaaggagcatggtaacaagagcagaatcactaggagaagaaacttattttagtggtaacattttatttttaacaggataaatagcagttcttagttttgagaggctttttcaatgctaattgatctaattttgtcctattttgacatcagacattctagggaaacatggtggatgtaaaatgattgggttatgtttaaacggtatgtgtgtgtgagtgtgtgtgtgtgtgtgtgagagagagagggaggagacggagggaggaaggatgtttgtgtggtgggtgggtaagagttttgagcagatgcaagacaaagaacatagtatgtgttgcacgaaatataacatattttaagatagttatatgaaatatgtatatatattttttggtcaattgtttcgttcaggtttttctttgttttctggtcttttttataattgtgcattgacttattgtcttttcactaggatattacagagagagaagtggatttttaaaagtatatttatttaatgcaagtcataccctaggagaataaaagattactgagtcattgtccatgcaaagttgagtattatgttgagattttgagttttcaacaatagctaattttcagtgaagagattatgctgtaaaattgaaatgagtttggaaaggagtcagttaaagtttcacacagttatgatgtagaagtttgttattatcagtggttaacgctaattaacacaagaatgtgatttcagatgacattgaaggggtatgtaagtgccttttttgtgtctcttactgtttatggaagaaccaactcttgtggaaaatgtagactttgcagccattggaatataattatatgtgttttgtttgtttttatagaacagatgcaagacaaagaacatagtatgagatattggaatgtaatttcaaaacatatgtttccaaaattatggaaacgttctggatggtaaataaatcctttcagtctcagagggtacaggctgcaaggctgagggagagctgagtgttggatggggaagaacgtggtttaagtaacaggctgaatagtaagcacatcaaagccattaaagcataaacccccagatttaaaaacgtgagaggcgaaagattatgtagcatggtctggcggctttatagaacccgtttcaaatgaggtatagaacaaaagaatgtgtgattgaagctcttgaagagatttatttcaggagagaggcaaacattttgctctgataccaattaaccaggagaaagcaccacgtcataaatgccaatattaaaaatgtaaatcctacacccgagggtgtattgaagacaggtcaaaattctttgaagatggaatgcataaagagataacaggaagagagccttccagctgctcaggctacctgtttagttctgtgtcctgtctgctgatgagattttccacggggaagcgggctcttgtttggggtggtttggctacttgacctattatgcgggatttagatctccttcaagagaatttattatgggaactctagaagatcttgtttataatactcctttatctgtaatgacttggagatgttccagggtttttctagcatagtttggatagcatagttcacataatggatgtgtaaaggtatttacaaaatgcagagtgaaaaccatcaagtgctatgtatagcacttttatgccttttaaagtatgtttacttccattaacttggttgttcctctccataattctgtgcaaaaggaaaggcatacagagtcatagtctttagagcttgggatgaatttaggatgatttaacccagccctttcatagtagaaaagaggcccagggaagttgagagatttcatccccattagcctcttggggaaactaagcaaggagagatttaagcttcttggccaccaaaagcattgcatgttgaatcctggatttctgtcattggtaataaggcagcccagtcttctgggaaaggaaatacacaaaaaagtcaaacaaaaaggttgtctggaatagagatgtctgttgctacaaaaatattcaacttcttgtcactgaaccaggataataaatctctttaccttctgtattttggtgcattgaaacattatcttttatgatcataggtgttgcttcattatttaaagcatacttgttattgcaggaaagacaagcttgcatttgatttataatggaaccattgtgctttgagttaaatgaaagttcaaaggaaaatgaattctaaataagaataattgaagagattcaaggttcatttgagtttatattcatcaaggcaattgtctccgaaatcctcttatttaaagcaacaggacagatcgtaacttacaaacttcgcctttatgacatcacttcattctatatatcataatcagaaatgttaagcctcagcagtaatttatacaaaatgtattgttacagagttataaatgtcattaagtggtagacttatgcctcagtgtcatgcaagttgaatcttggatttaaaaaaattacccataatgcaagtattctataaaaatattcttagtactctctcctccactgcagcctcatattaaaagttcagttccattttccacctgtactctgctctgggaagtgcaacctttatttctccttcatgtttttaaagtcaccttcttaattctggtagaacataactcaaacaactgaaaatgttaggaatggatttacagtccctctggctactctctatctgggatggaaaagaaagtgaagctggagataacttttcctgccatcaagggacatctatagaggagaggcaattaattgtaatgtgccaactagttttgattattcagggacttgtgatggaatttgtggattattcaggtccctggttttctgttttggctaatttcactgctcagtggcacctccagaggtcagggacagctattctcctatggagtgtccccagagagacagtggcaaaggaaccacccccttttgagcaactactctgtgtcagacacagggaggatttttttttaacatttgtagtctttcattaatttcacaacaaacctccattctattttacagacagtaaaaactcagtgtaattcattcatttctcaaatctctatcaagtgtattctgtgtgctagtccctgggataaaacagtgaatgaaagagatgggtcccggctttctctgagcttaggatgcaggaaggaaaaaaaataaagtagacaaatcatcaaatatataaaatataaaattacaaacagtgatatatgtaatgaatgaaaattttaagggatcacaaaatttgtaaacaggggatctgatccagttgtggagtcagagatggcgtccctgagggcataagcctctgcactggtgattgaagaatggaatagaagctgtcaaagcttgcacggcgagcccacagcagagctgggattcaaactcaggtctgcctgacaccagactctctctgtattgcactactacagacagttgaaactatgccctgacagggagacctttgactcccagcccctagccctgctccaccagctgccccagagatgccgtgtccgtgggagttggtgatggtggattggaagctgaagagctcctgtggtttctcagcaagtttaactggcaatatgaaggagccctcactctctgtgcattctttccattttcttcatggttctgtctagattggatttcggcactggcaggaggggtgtccttctggcatgactcctgatggggttgtgtggctaatttcaaacattgggaggggcttgattaatgaccagcccaaaccagagttcagaaacattgcctggagcctctgtaaaactccccagatcctgcctccttgtctacctccctttactcaaccctgcctcccctgatctaaagccatcttagagattggctacctgcctgaaaaactccctgacctgctgaggaactgcagcagggagtcctgttagcagctgtgggagggttggagtctgaccagaacattcctcgctcatgtttccacccactccgtgtctgcagggtgaaatgccccattggatgcggtggccaccccagagctgcaccttctagctggatacagggataggagtggttgggattgaaggtgagaagtctgggaaatgaaccattttcttaggtcttctgctgatttccacccctctgactaattatatagcaggggcagtgatttaccaaaaggaggcattgtatgactttttaaggacatctttccaaaaaaacaagcaaaaattctcccccaagcaaaaccaaccgcccccccccaaaaaaacctaaaagccaaaaaactcaaacatccagggaaaagaccttctctttaagcctaaatttccaccatttgtgacttaccttttttttttttttttttttgagacgcagtcttgctctgtcgccaggctggagtgcagtggcgcgatctcggctcactgcaacctccacctcccggattcaagcgattatcctgcctcagcctcctgagtagctgggactacaggcacgcggcaccacgcccagctactttttgtatttttagtagagacggggtttcaccatgttggccaggatggtctcgatctcttgacctcgtgatccacccgcctcggcctcccaaagtgctgggattacaggcgtgagccaccgcgcccagcctgtgacttacttttttgagttacacaacattactttcttgcttcaatgtttttgtgcaaatgcacgccgtctggggagaagcaaatttcttgaaattgaaaccaccgaaatgtgaatgaatttatcatatcccttgtttgtatctggtgaacgggtagctagagggcctgaggtatcttggggaacaggtcgttgaagtgggtacaggacggggcagtcactttaatcgctggtccgagctccccagcctcccttttgcaaaaagcaaaaatacgttatcgtcactagggggcggaagtaggccagcaatcggtctctagtacttgtttggtctgaaaactaaagttggcaaatctgcattattagtgttttatttttcttaagaatcccaagtctctctgagatggtatgagtgtgagagttaggctactgtagtgtaaagaagccaatcccaagaaaataaaagccctgtgtaggtaaagcagatacccgacagattctatcaatggactttgaaattgttctactgtttttattatgataatttactgaaaatttctcagatctaaaattcaaataagaatgtttgaaaccagccgggttcggtggctcacgcctgtaatcacagcactttgggaggccgaggcgggtggatcatgaggtcaggaggcgggtggatcacgaggtcaggagatcgagaccatcctggctaacacggtgaaaccccgtctctactaaaaatacaaaaaattagccgggcgtggtggcgggcgcctgtagtcccagctactcgggaggctgaggcaggagaatggcgtgaacctgggaggcggagcttgcagtgagctgagatcgcgccactgcactccagcctgggcgacagagcgagactccatctaaaaaaaaaaaaaaaaaaagaatgtttgaaaccaaactggtttgtcaaatgcataacagcgcccttgatttcacaaagggatgaaaacttacatgtagatgtatttttttctgattataaagaacaaattctcttgaggaatggttaaaaaaaaatccgcccccccgacagtaaaattcgtattgtactgttacgggtagctctgttcttactgaataaatcttgcttagcaacttacctccagagtaaataataaatcactgctgaaagcttcaggcatttagctccgtctgggcagtaaaactttgtgatggtcttgacagcattttgtaaaatcataattgcttagggaaagtgattctggatgtcttaaaatgttcggaattaaggaggagctgttcctttgagggaagttattctaatgccgtgtgtgtatgtgtgtgttattctttatacgaattctagattataatttacacacactcatcatttctattaagaatatgtaaaaattcgattagaagcacagccacatgtatcacaccaaggttttataaaaaaaaaaaccttgaggcaattagggcaaagatgctcagttatctgtgcacagtatactatatgcaggcctacctttatatacacatatagttatggattgaattgtaagcctccccaagattcataggttgaggccgtaaccctcagtatctcagaatatgactgtaattggatatagggtctttaaaggggcaaaagtgaggctgggattagagcctctttaaagaggtaaaaattagtggcttatccctgccatcccagcactttgggaggccaaggcgggaggattgcttgagccctggagtttgagaccagcctgggtaacatagcaagaccccatctctctaaaaaaaattagctcagtgtggtggtatgcctgaagtcccagctatttgggaggctgacggggaggattgcttgagcccagaggttgatgctgtggtacgctgtgattgcaccgctgcactccagcctgggcaacagagtgagactccatctcaaaaaaaaaaaaaaaaatagataaaaaaaaataaaaaaaaagtggctggctgggtgtggtggctcatgcttgtaatcccagcactttgggaggccgaggcaggtggatcacgaggtcaggagatcgagaccatcctggctaacatggtgaaaccccgtctctattaaaaaaaaaaaaattagccgggcttggtggcggtcacctgtagtcccagctgcttgggaggctgagacaggagaatggtgtgaacccgggaggtggagcttgcagtgagctgagttcgcgccactgcactcaagcctgggccacagggcgagactccgtctcaggaaaaaaaaaaaaaagtggtaaaatgaggtcattagggtgggccctaatccagtgtgactggtgtcctcctaaaaggaaatgatgccccagacatacacagagggaagaccatatggagacccatggaccaggcaaccctctacaattacaagcccaaaagcaaagcctcagaaggaaccaaccctgctgacaccttggacttccagcctccagaactgtttgatgtgaaattgttttcaaaataacaaatacaacattgttttcaaaagtcaatgtgttaaaatgatatattggcatgtttgaaatagagcttgtgatttggttgtaacaattttaatatcaataattttttttttttttttttgagacagggtctcattctgtcacccaggctggagtgcagtggtgccatcttggctcacttcaacctctgtctcccaggttcgagtgattcttgtgcctcagcctcatgagtagctgggactacagtcacgtgctacggcacccggctaattttttgtatttttagggcatcaccatattggccaggctggtctcaaactcttggcctcaagtgatccacccacctcggcctcccaaagtgttgggattacaggcatgagccactgtgcctggcctaatatcagtaatttttaagtagaattgttgaaaatgaaataaaatctttaaagagactcatatgattgaactgatcacccccctgtaagttgccagtgaacttagtatgcgtgtctggattcaacacaattacatggctgtttcaatttctcatcctttggaagtaggaagacgcctttttagatgttgttcttctctatcgttccccaaaattgtcataggacatttaaccccaagtcttgcatagtaagtgaagtctcttcctttgtcttatttttcccaaccaaacaacagtttattgtttccaggttcacctctggagtgggacgtgaccaggaaggctcaggtctagcccagcctgagtcatggtaacgttctggaatcttagcgtcttcctgtaatgtgtaggcacctctctgagtttcctatagcactaactttctctatagtaactaagtttttgaggccagtaagtgcagggctggaaatagtgatgtacttgacaaaactgcaaagttcaacattcccaccctggcccatggcctggtgtctcctttccaaggctgtttctgtatccaggagacccgctaacttcacctgtaggtatcataggctgattctctagtatgctattcttttccatctctctcccctatcaaaactggtcctccagagagtattggataggaatcatttatgatgtagtgtaaattcctcaataggttcccttgccccatggcaaggacacttaaaatcacatctcttatcttcaggacttcctccttctgagagcagttccaaacatctaggagcaggtggagaggcatctttcaggggtaggagatttttcctatgcatcacatctggaaggcagttcccttctttgttggtggaaaaagccaggtgtgaataaaagaactatgttaagtagttgctctgaactcatagtgaacaaacacacgtttgtgaccaggattagcagcctgggtctggctgacctctttcgtcttcatcctcttaggagggggtgtgtatttggatgtatgttgctcactctgggcatgggagaagtagctagtgttatacactggctgcctgagtcctgtgggtagtgagacaggacaagcatggcaagcctctgaaagatgctttcttcaccacctctgtctgatgtagtttgggcaacagagcctggtgtacacagggagatcaataaaatatttttttggatggatcaatgaatggacaaatgaatgtatgaatgaatgagttctgggagctcacaggtaagaccccactttggatctttccttttgctttcttgctgtccactctagttagccatcagtatgatgccttggtaccatcactgccgtgctggtaccactacacttcctacactatgtagtatgttatactgtggagtatatattacatatacacatacaaatgctgtaaccaccatgagatctatacaaaaaattggaacatttaaaagaatgagaaaattaagtgtaaacaagttctaatattttttcctacaccccaatggatataaatgcacacccgggtgggagttgggcattactttggaaagcacttgctgagggcagtggttttatgtctgactttggctagaatctgcattacatctactagatgaagtgagagcaggattcaatttaaatattcactgagggcctgcctggtggtggatagtctgctagatgctgagggtgacagtgactccatgctctggattattctaggcagacttgatttaaaatactctctcccactttcccacaagtacactcatactggctggttgcatgcccagatttttagtatagaaaatgttggccaggtgcagtgcctcatgcctgtaatcccagcactttgggaggccaaggcaggcagatcacatgatgtcaggagtttgagaccagcctggtcaacatggtgaaaccctgtctctactgaaaaaaacaaaaattagctaggtgtgatggctcatgcctgtaatcccagctactcgggaggctgaggcaggagaatggcttgaacctgggaggtggaggttgcagtgagccgagatcaagccactgcactccagcctgggtgacagagtgagactctgtctcttccaaaaaaaaaaagtgttgtgacaagagcttcggaagagataaaagatgtagaagaccgctcttgtttctcaggtcttattttaggttatgttgttaggagaggcctccaagaaggggcacacaggagcctcaaatatctttgtaatgcctgtttctgaacccaagaggagggtgctcaggtttccttttattctttatttttattttttgagacaaggtctcgctctgtcacccaggctggaattcagtggtatgatcttggctcactgcagccttgacttcttgggttcaagtgatcctcctgcctcagcctcctgagtagctgggattataggtgcatgtcaccacacccagctaattttttttttttttttgtattttttgtagagatggggttttgctagttgctcaggctggtgtcgaactcctaggcttaagcgatggtcctgcctcggcctcccaaagtgctgggattacaggggtgagccactgcgcctggcttccttttattattcatacctaatttatacatgtatgccataggtatgcttctgaaagttgaagtattttatgaaaagcaaaaggaaataaaaaaggcatttaaaagtgtggggccctctgggaccaagtgcaaatggagtgaagcagatagtacattacacagatcaatggggctgggacggtctggggaaattttgccaatgaggttgtcaactgcggggcctagcagcacagtggaacgtgggcaggtagagagacactggggacacttgggtgacttgaacagtgagagttaagcatggaggtggagcctggcctggaaggtaacatcagcaggagggcagcagccaggtggtcacattgggttacagtggggatccagtagagagatgggctaaaactggttggagcatgttttgaaaaccagatttaaaagtttcaaaattgtattgaggtcactgaagagcccttaaccaaagtgagtgaacttttggaaaggtgaatttgaagctatggtgaaatgacacctgttgatggcgtctacttgatacctcctgattccatttacttagctgtttgtactgcaacaatagcctccttattggcctctttctctcctatcttaatctctgctcatccatttcctatacttttcactgacagatctttaaaaaacactgtctgaacataatatatcagttcccagcgcaaagtcttttaatggtccctgctgtcttttgaatgaatccaaatgccatcgcagaacatacaaggccctgtgtgcctttgtccttgtcctcctctccagcattgcccccaacttccctctctaaccaaatggaagcacccgtgctttcctgaactctctacaccctcccctttgaacctgggtcaggaggctgctccccaacccccaacttcctcttactctgacttctagccatccttcaagagtcagctcaggtatcaggtcctttaagacctttcctactcgaaggcaggcctgtgtatcagcagcatcttagcatctcctgggagcttgttagatgtgcagaatcccaggcctacctcagacttactgagccaggaatctgcatttaacaagaactccaggggatttaggtgatgatccagaagccctgctgtgggcaggctggtctattcctctgcaccacccacaaggtcaggtagttgagccccatgtactctcttgaaaccttcaggggaaggcattgttatcttctgtttacttccctgtcttccttactaggtcctgaattctgagggctgtgatcatattttatttatctttggtgactcagtgactattctagtgctagcatacagtaggtgctcaataaatgcctatgcccatgtgaacaatcagtaactgactttggtgactcagtgactatactagagctagcatacagtaggtgttcaataaatgtctgttgtgaaaatcagtaattgaactttggtgactcaatgactattctattgctagcatacagaaggtgctcaataaatgcttcttgcccatgtgaacaatcagaataacagtggtctcttactcttgcaccatcaatgaccagcttaaggaggaacctgttttagatcctttgttgagacttggtttaacttcctcttttcaagcatctctttacttctaagtgagctgcatggccagtcaggcccttggtacctgccagagcccggaactagtactggtgatgctgatgcccaagagactctcatgtctgggaatgctttaaaatggccaccccttgggcatgcatcaactaactgtgcctgaaaagcagctttttcaattaaacattttccttctgatcagagatccactttgaagacttttaaatttggcttaaagtgaggattaagggactaagttaggcatggagcaccacctttgcctctgtaccctggagagccctcatcaggacccttgactctgtgagaagaatggggaagccactccagtcccagaactatttttttttttttccttttatctgggaaagggagatgagtgaccctaatgccagaactttagcagagagaaaccttccattcagcattagattcgaagggacatgttcatggtccagttgaaagagcctaaagcaccatcccatatggaggcagggaggagaggacttgaaggtggaggcttggctcagacatccttggaagccttctttactctctgcagtagaacagatttttgattccttttcttcctgccctaccttcctgaatttcctatcatatttggactcaggaaagtgtactgtatttgtgacaaaaataacgccttgcattgccaaggacttaactcttcaatgtgcttcccaatctttgatttcatttgcctgtcatgagaggtggcaggacagttttgttgacatcgttttagacacgtgggagtgatggcacagggaggggaagagacgaacgtagagtcctgcaggtagctggggacagagctcaggctgggattcaggcttctgactcttggtccagagatttttgcagcctgtttcaggttttataaggtgggttcctgcacatacataccatgcgccaggatttaaatacgtactctcttaattctcccttctctgagagatgggtgctctatctttcccactcgatagacgagggagtcaagcagacatccctgtctcaatcaggcgaactttctctcctgcaagaccaagctcaaatgtgactccttaagattctctctcctaattttccccacagtgatggcagctcctccttcattcttctttagaacgtctttgtctctcctcaattgcatgcatcctatgggatcataattgtttggcctatgagtggtttcagggtatcatttctttttgtgacaggattcaacactgggtaatgatattctttctttttcctttgcaatttcatctaaagttttgtttccttggggtcctctggagtaaaagaaagcatatgatacatcagggcacatttgacagatgtaagtgattatactaatagtgggattatttcccaacgtgtctaatgtattcagacttatttcaaatgaattgagtttaaaacccatccctaaaaatgaaatgagatctttaagttgttcctacctacctccttcttttatctggattttaaaacctttttgtttttaatatgagaatattgtattgcctgtaatttactttaaaatactttgacacagattgccttatatatatatttatatgcatatacatcatatgcatatatacacacacacacatatatatacacacacatatgcaattctgtgcatgtacaaatgcaactcatgttggcacatgtgatgtgtgtgtgtttgtgtgtagatttattttgctctatatcctagggaaagtctgttgccctaaaagggaacatacacttttggggtaggtatttagtgttttgaaagcttctaatcagaaactcacacttcagagatagactttagctatctttatatctaaccaataccagaggctttgttatttttcacaggtgaaaaaagtggtgttcaaatctattgattggccagaaatattgcagaggtcctctactcttgtatatatgggccatagaaatctggtctcgtagtctatacctttcaggtatggtgcctgagactacattctgaaatgaccttaagcccagtcattgatcagataattttggtctcataaatctaattgtaaggtcagctgaaacctgctgctagatgattgttaggtttgcctttggtgaacttcagacttcctacaagggcagaaagctggaacttcttcaaacttgcagactagattatatgattgtttgggggcctgcttgctaaatgaataaatgtatatgtggcagaattcagcctagacttaatttcattgttatcaaatggtgaggggagggatctgtagactccaaccacttctaactcttggatgccatccatgtttactaggaagaacataaaaattgctaacagttattatgtaccaaattggcttaggtacaatcacaagattatggagtaactgagttccctcttttagagtgggctttgacccattagattactttagttccattttcatgatattcaaggaccagccttctcaattttgcaagggaggctaataaagtgtcttctaagcaaacaacaataagagctccacacctttaataatgtctttgcttactctcatcatacctcctaaatttagttttaaaaatgcagtggggccacagatgaaatggatgtccatgtgacaagcacttttctttccagagaggcgggatcactaggcagtgtgcaaaaacacagtaaccatggcggcactactatcaatccaagaccacgggggagactcttcaacatttttttttttttttttagcacattttgccgcatgaggcctgttaggattgaggggaaaatgattgctgcagatattctgggactcatgagaatccatggaggctcaggatgggacggtcagttgggcaaatcctaccttgccaagatagggttttctctcatttccagttttggaggatacagttttaaaaatacagtacaataacaacttgacaaaaagagcttatacatagaagggaactctggaatgaaataccctaactgttaattatatttgtctttggatgatggaaatacatatcatatttttcactcagtttttgttttttccccaaatcattttagtgtctgatgctattattttgggacattcagcatagcgttcttcagctttgagtggattcagagtcctctatctgagctctgatctgaccacaggatgagagcaacccaggctgaccccttgggtattggagggtcttttataggagggaagagcccagagagagaagaaatagattttctcagagaggtggaggcttgaatcatcttaatttcctgttggaagtgatgtgatcttgttttatacctgaagcttctaaaacaggtcatgttggtcatggaggcatttttccatgtcattatatacttttcatgaatatatatatatgttaaagttccatcgtgtaaacacaatcactaaagttaaatgttacatactatgtcatttaatagctatgttattgtttaattaattatattcctgtagctggaaactgaaatccctttctttttttattatatattatgatgaagatgattattcatacagcttttttgtctttgataataataatgttggttagtacttatagagacctttctatgtgttggattttgtgctaagcattttgcattcttttatgtaatccttaccaccactctatgattagatataattattctggccgttgtacagatgagaaaataaaaacttaccccagggttgtagccagccttcttacactgtagccaacactacgttgccatttatgcagtcttctaccaacactggatgttgtccatgtttttacttttgccttttatcaaatattttcccatctcaactaacagacgtccacaaaagcattcctaatggaaacacactattctaaaatggggtcaacaactctctcatcagatgtttagatcatttcaatagtttgtcatttagtccttcacaaaacttagttttattactatttttcctcaattgcttttagggaagcagcaccagtgtcaactcccaccagcagtctaggagaatgcagcttctctatgattacaatttttaagaattgactgccagtatgataggtggaaaatgagatttcatgatttaaacagcatttctttgatcatcagaaaagcagcatgtttttcacagtgtattgggctcgtgtacttcttctttgtgaattgccataatggagtttgttcttttgctattagtgtgatcatctttttcttattgacacataggaactttttatatatgaagaacacacatttaattttaaataagtttatagttaaaaggaaacgtgattaacatgcaaagaaagtacaaacaacagtgtcttggctggtctctagtcttgttcttctctaactccctgtctgtgtggaagaaaaaaaatgcaagtctgattaagccattctccctttaatagctcccagttacatttaggagcaactcccaaaaggagggtatggagcttttatgatgatcctgcttgactctccagactcggttttctaatcccctgtatctaattctaagagccattcatactgcattactttcagttttcaggaagtgccaagctctctctttggggcctttagcatgtgctgtatcctctgcctggaactctcttccaattcttttttcttgtaatgactactcatacctcaggtctggattggataccccttcctttaaaccagtggttctcaaccagggatgatttttgttcccaggggacatttggcaatgtctagagacatttttggtcatcatgctggaggcgagttatgctactaacagctggtagaggccagggatggtgctggatgttcctcagcccccaggacagccctccacaacaaagaattatctggccccaaatgtcaagagtgagagtttgaggagccctggtctagatcttaacggtctttaccaaccctcccatccactccccactacgtatacatacacatattacatatgctgtaaccacatagatccatatgctattctaagactggtttggtgtctctcctggggcctcccaggaccaccctatgcttacagctttcacagttctactaccctgtattataactgtcttctaggctagaagcttcctgagagaaggagcgtgttttgtaaccccagagcccagattagggtcagaatatatgattgtcagaagcagtatagcatagtatggactaaagagacagagggctgagatgtgaatccaagactctgctacttactagctgtgtgaccttggacaaattactaacctctctgtgcctctatttgctcttctgtaaaatgaggatattaatagtacctaccacatagcattattaggaagaatacatgggctaatattcataagctgcttagagaactaagctctatgtaagagttaaataaaggaatgataatggaataagcatttaatccatgcttgtcgatacatgacgggtgtaggcctcactctgggttcagccctgtctcactcagcatgtggtaatttttgccaacaatttaaaaagtttcttcgtagttcttaattttccttggctcacattatatctttaactatctctgtagtcaccagctgttaattctcctaaaaatatgtccctgtttctattgtgtaaagagacaaatgagagtgagccacccatccgatcacaaacacacaccccccaccttggaaacaactttcttttcaataaaatgcacctctggttccaagttttgtgtgtggcatacaccatggagacacttgtacaagtgaatctctttagaaagagagatttacgccaggtacgtggaacacagtctgagcagcactgcacaccgtatcaaatcagggtgtgctgttacatatttcaagttaatttgacgttggagcaaacaaagtgtgtttatagaataattaggccttattctcaatgctgtggctaaaaagttttgtcacaattactgatcagtggttttctttgtttttgaaattccatagcaatacacaaaaataaagctgttgtgactacactagtacttatgtaattccagtatcctgtaggaagagtacctggggatgaaatcaacaagttcttagtggaatcttctcatttcttagaatgtaatgtggttggatgtttggaaattggtacgaaaggggagaatcctttgtaagcgtggtccagtcttctgaaatagctgtaaaatgtatgctcctgctcatcctttgcatgtaggtgcatctgccttatatgttgtggctttgtttccttgccatgggggagaattggttcaaggtcttgtgaaatgaatgcttccatccagatcagcaacaggaaacttgacatgagaaaacaaactgtgggcatgccatactgagtcaattttttaaaagaattttttctttcaaggaagctcattaagctccctaaaatagtgtacttaatcatatatacaatagaggggccctttcatggaggtgccactcaatgcctggaagatatgtctaggagagggggccttcaggaggctgaaggtatgctggaggggtagaggtggagagcccctctgagcaatctccctgaagtcgttcccacccactggagaggcctttttctttttcttttttgaaatttaacttttattttagaaaccataaaagtaattacgttgtgctcttttgaagttcatgagcatacatgtcagatctttctcttgcacattgcatgtcattccccctcctccttagcaaggcaaaacctcccagctgtggtggtgcagaccagggaccccattctcaacacctgccgtgctagtaacacaggtgggggcagagcagatggatgccaggatgtcagggtcaaagtgaggacaaagggagaagagcatggctgttgaagggatggagcaggatcggggttgggtacagggaggcagtacagcagacaccaggtgtcagcgctggtgtcagatgttgctcttgtaggaagccagcctgtgcctgattctccaaggcaggagccagtgcagggcctgggtaactcagagcatgcaggggagagtaggcaggtggctgcccagaagagttaggagggcagggccaccacctgccagcccatagtgttcccactgaagaggtcttaaggctgatctaattcttctgggacccccgtctcctcagttactttcttaggatattctggtgtttttgctgggtccttctacaaagaacttgtgtccctcctggtctcctttagagtgaggtgtagatcacagtccttaattcttagaattagtgtcagtttcatctctcttccacctaaccccaatcccccttgaccttggcgtacagcatcctgtttccctgtggtgtcttggtatcctgaacctctcactactcatttgataaccttgggtgatagtgggcgctgtgtggctgtcaaactctggagtctgctgctaagtgttattgtaatttatcttcatctaaattcctcgtagcgcagcttttgaaacatgagattgtcttattaagaggtacttattgtaaagtagagtgagctgcacctttgatgaagacagaagaggccaagtttgatgggttggacatcgctagacaaagacagtaattaatgacttaattgcctcttcacccttcccttaaaaaaaaaaaaaaagtttttcttcttttcctttaaaactcaccaggctggaaagtagaattcccaatgctattttatagtttggttgtttttttaaaagacaaatgaaaaataaatcagaacacaatttttctattacattttcctgtaacaacttcctcactttctagaatcattgtctattgattttacctttagtggctttagaagttgcagctatctgtttgtggagagttcagtacctcatatggatttcctcgtgttagtttaaatgctgataagatacgtggcaaattaatgaaataaaaatagctttgtcaataaacagaagcgaaaccactttcaacatttgttcagtactcattgcttttcagggcccagacaaaattagtgggtaggattaaagaatatattcgtcttttatcccatgtttgagtacttgatcacagaggcatggtttaatccaaacatcaatagcacctcgtcaattccgtcagagacagctgtcaaagtggactttgggtttgttagagctttgtgttttatccttttttaaggtcatggagtattttctttgatttttgatgctgaaatcttccttaatcttctaaacttgggaaacatctgttaagatttaatgggatggcttttgtcttaaaattagagccaatcttgcaaatctttccacctcccttctcttcccagcccccaattaggaaaatggggagtgggggcagaggaaatgaagcccaggttcttcatcggatggaagttctctggtcagtgtgtgagtgttagaatgaatcttaggccaggaatgacgcttttgagggctgaatgctgtgaacccagtgttcaattttattttgtttcctagtgacattagcaatttctctgtagcgtgtcacttagtctgggatctgagtggcagatttatgggtcctattgaataatgaaacaaaaatgatgtaaggaagagaaacggctggaaataggaattttaacctttccctgtaaacctccttgttactggattgcatggtgtcaacaaaatttagtagttaaaatagttggaggtacagtaacagcctctaaaaatacatgcctccaaatatgtacagacagctgtcatgtctgttgacagaatatattagtcattatcctcatcagtagacacaaaatcattgcagttttcctaatgtaggtgcttcaaagcacataattgctagtgattttggaggtccttggataaagtcactgccattgtaatcatggtgttttcatttagcttgctttttatattcttaacctggatgttaacaactcagccagagctcttcacagggaagtattaaagtattcccacttactgcttcagacacattcccacctacccttggcatgaaagtctggactagaaacttctattctgaataaagaaggcgatcaagactgggcacagtggttcaagcctgtaatcccagcactttgggaggccaagatgggtggatcatctgaggtggggagtttgaaaccagcctgaccaatgtgatgaaaccccatctctactaaaaatacaaaacttagctgggctgtggtggtgcatgcctgtaatcccagctactggggaggctgaggcaggagaatcacctgaacccgggatgcggaggttgcagtgagcccactccagcctgagcaacagagggagaccctatctccaaaaaaaaaaaaaaaaaaaaaaaggtgatcaagacctttcacacgagagatgcccatattccaatctgaagcttctatgaatgtagtattagaaaaacgtgtctaattcctgaaaactggatgaataccaccatctgaggatttcttgtcctttttaaaaagcaggaaggagcccccactgcagagcatgtgggaggcagagcctggacaggggttttgggattcaaagccaattcaatgccacatttaggagccaagcattttctgagcctcagatttttagtggaaaatgggagtgatcataactaccttatagcattgtgcagacatgtcatgagagcaccgaaaatgtgcctgttatacaataggtgattgaaaaactttggcttcattgctttccttccctattctctttgtatcttccctccactgaagtcttaccaccctcctctccccaccttcacacaagcatgcatccctgtctgttttcatttaaaggcttccagatttagttatggtaccaagtaaatctggtaccagatttacttatgaaatgggaatagaatgacaacctcagcttcttctcccctatcctcggctgttctccaatttggcaagatcaagaattctcattgttataaacaagagcaaaatattaaaagttatgaatactgtatcaggcactgtatgaagtgtttatatgtaaaatcacatttaatcctcacaatgaccctctgaaataggtacaattctcatccacatttcacaggggaagaaactgaggctcagaaaggttgaatcgcttgcccacgatcacacagctgagagtagtggagccaggccttgacccaggcagcctgtccccagaagcagcaggaacagcatgctcagagagcaaggcagccccagggtcaggcaggggctggaggaccccttggctgcatcctttctgatgtggtaggcagcatttcccagagactcagtcctcaaggccgggaggaaggcctcccacacagccgaggtggagcaagggcagcccttctgggagggcatgctgctgttcataatatgagagtggggtcctgtcaagggttgttgtttttccccctctgcctcttcctcccacttctgacaaggttttcaattagcagcttgtagaggcccagcctgtggtccccatttcaagctacatgcataactgaattccccaggaggggattaaagggcagaggaaggtggggggtggaggctgaggccccttgaatgggaggactgaaatgtgctgtgggtatgggctgaaagcaacaccttgccttgtttaaacttgagtggggccaggggtcacctgggaggtgactctcacagggatgaaaggggagatggctgcggcagcaggatatagggcccctgggccggtggttgggcctccctgcctcgtgtctggtttctggtgggatggatacagaaactggtgcagggaactgctcaagcctgttggtgcttaggaagaaggaacttgctctccattttgggaggtgaatgaagctcccagctccctgatggcttttccccatgggaggccttggtcatcttgagcctaggttgtgtgtttaatgcctgggctactttgagccagtgctctctcctctctgtccagggcagggaggataccactgttctgcaggcgtttctgatggctgcttcctcttcactgccaggctaggtctacacttcatccggtagccacactgactttctttttatcttttgaaagcaggatcattgttttaaggagggaaaaagtcaagatgttcatgctccccaacacacatgatatgcatttgccacctccagcacggagcttgtgatccacctgaaaatgagggcttgtcctgtggaatgacagcaatgtgctgtggtccacactggaaggaatgtcttgtttgaacttttatggggccagcagtcatctgaaaaatatgatggctcaaagccaaatgctgtgttctatcatagaggggtaaagaggatttctaaaagaggttgcgagtggcctttaaatacccagtatggggttgatgtccctttcttgtgatccccagacacagtttgctcttgagaggactgatggcctgggatatgttattgatggtcctgaaagggatctgcgtttgaataggtcagagaagatgttctggaagtctggagactgggatacgctcccttccctacaggttcgagagggctctgaggagcagttatagacatgtaatgaggatccaggctccagatctgttctgtgggagaaaaaagtgaggaaagtgagtttctggataaatcatggtgatccttgaatttgaagttgtccccaaagtttatcctcctcatcagagcatatgatcatagcttctgttttttctgtattttccttttcttcccctgccttgtttccctccccacctcaccacccaccccctctgcagcctccctgcctccctcccgcaaacacattttttttcccagccaagtgcttgttgagggctgtgtgggggaactagctccccacaagacagaggaacatgtgaaaacaggaccctgatgaagctggactcagggccacccactgccaacattttctaggtgaacaagagtgaattacaaatgcaggctggaggccgggcgcggtggctcacgcctgtaatcccagcactttgggaggccgaggcgggcggatcacgaggtcaggagatcgagaccatcccggctaaaaacggtgaaaccccgtctctactaaaaatacaaaaaaaattagccgggcgtagtggcgggcgcctgtggtcccagctacttgggaggctgaggcaggagaatggcgtgaacccgggaggcggagcttgcagtgagccgagatcccgccactgcactccagcctgggcgacagagcgagactccgtctcaaaaaaaaaaaaagaaaaagaaaaagacaaatgcaggctggacctcggtgctcggagccacaccagcaagaattgcctgtgttgaggacagcgagggggacacacacacacacacacacacacacagagagagagagagagagagagaaacctgcctcccagggaagactgtgaatctcaatggtgtttccctgtacatggtttcagcatttaaaacatcctgcaaatgaggcttttcctgatctgcacgagtgggctctcccctcctcctgcatctgacatccctgccaccacccactgattgggttgaatgatttgatggggcattcatcaggaggtttgggtgtccccgatgagtaaatacacttgctgttatgagccccatacataaaagggaaagtatcacatttttctctgaattcttgaggaaattgctctcatatacaacaccaacctttggctgcgtgacagagatggagtgttgtttgcatgccattatcaggctgtaaagtctggtcagggctgccttttcggagtttccaatcttttgggatcctgggagggtcaccctgcgggtcaggtttgtttagtctggtccgtaatggtgtaaagtggccttgactgttgagcctccctaaataatgccctatctgtttgatacttcaacagtccctcggagttgtatatatgtttcactttctaatattcgaagctgaattggatttcattgttaatagatgggaaattgtttctaaaaacaacctcatcttgctttgaaagttagccagagttcagagggcccctgcattttaacgggtgatctatgttttctctgggaaaatcatagagcacttctgtgtttttgtatgcatgttactcactctgcagctttttaaagggattcatctgaacatatgccactttaaaaagctttttattaaaatataatgtacatatagataagacagcacatataataagcatacagtgaattttaatgaactcaatacattgtagcaactggccccagattaagaaatagaacatcatcagcaccccaaaagccccctcatgcctctctatgggaacatatactattttaaatttctcttatttataatttattcaaggttttctgtattgcaccttattctgtttttctcaatggtgtaacattccctgaatcatcatatacaaataagggaaaagaacttgtctgatctgctgggtcataataaacagtacctatctagaatccttcaatatggcattgtaatgtcctatggagctttgtaaattcatcaatatcttgccaaaatggagttcatttttataagaatccctctaggtgctcaaagcttgcttctttatctattagacacaagaaaagcctggtttcacagatgagtctaaatagcattggtctacctagctcacatcctagttttgtgaaatactatctttatttaatttaatttattttatttttttgagacaaggtctcactctgtcacccatgctggagtagagcggcacgatcttggctcactgcaggctccacctcccgggtttaagcaattcttctgcctcagcctcctgagtatctgggactacaggcgtgcaccaccacgctcagctaatttttgtatttttaatggatatggggtttggccatgttggccaggctggtttcaaattcctgacctcaagtgatctgcctgccttggcctcccaaagtgctgggattacaggcatgagccgctgtgcccagcccttgttttgtgaaatactatcaaacccactttatgaatgttaagtaattaagtccttcggggtagagaaaatagtggtggaagaaagttattcattgcaaacatttttgctcagaggcttttggaagtaaataggttctcctccccagtccagctatatttcaaaaggaatcttgttcgaagccctataattggacttctcccctcctttttaaaagtagttcaatttctttcttcccaagctcctcagctcccagagcagctttcattacggcaacataaataaaaagtgacataaaattatacagccctgtgtaaagtagtttaaggaaaatgtcttttatggcagcttttatggtttcaccaattagttattagattttctccatttttaattcgctgtcctgcatgtgcgttctgaaaggtttcttccccctttcatctcttagtagtaacagggctggggggcgttgagcccctgtttagctgactttcttgtttcatgaaggctttcatgacagcctgttgctagatgtgggcagagcaagtcccttgggagagaagccagcattgagccattctgtgaagtgagcagagtttcaccctcttcctgtatgaacactcagtgtcctgtgtcccgctgagggtagcggcaggctggctgcaggatcccgtcacagcaggtggaccttaagctgataaatcctgaatttttagtaactttccaaacattcctggggagtgagaataacagagatttactcctgccaaaatttaatcatgcagaaaaagcaaaatttagaacagcgtatagattattttttaatgcgactgcttgacagcggagaacaaggaagttgaatacttggtgcagccgagtctagaccgctgcaatttgattcatttaggggaattgtattaggttttcattttggcttgggctgggctgtatctgtttggaagtgcatgatgtcatcgtatcaagcgtgtcacagccaaggcattctggtatttatgttgacttcagatctagcccagagtacatgggaggctcaatttattgctactttaactttgtttagtcatggagaggctttatttatgttggtaaatttcaaacagtggccaaaattaaccgcacaatgaaaaggcctgccagattcatcatcgataaatcatcttgttgctgagtttctttaattaaggaaaaactccgtctgtggatccctgtggttgctggaaggaaaggagggtggggagtactttgattaatccatctatcagcctggctttggaaagtgagtctcctgtttttgattgtagctgggcaaagacctaaataaaaatttatcttgtcaaaacctatgggctaactgaaagcaaataaagaaattttatggcatccacataaagttaaataaataacgagaaagcgtagtacgtcctacagacatttttcagtacagtacgtggctctgttctttggggagaactcattaacttaaaaaaaattacctttaatgggccactcgttatcgtcatcatcaaatgcttcgcttgtctaatgttccagtgtttaatgcctgattaaaactgaagatgggggctcatggcttggtgctgttggaactacccaggatagaatgcatggcaagtggggcttctaaagggtaaaatatggacgttgcaaacagcactgccagtatcggggagaactttttaaatggatccctctggaaggtaactgaccttcctgcaacataatgttgcaggggagggcaacagggtgaagcttttcgtgtctgaatgaacaagggacttcatctctggttgaacttatctttcatgtgggggcttctctctgctggaaaaagtctagaaaaatatattgggattgaaaacctcttttcatcaaatgtggtttaagcagacttctctctgggttcggtctcatggtggaatgcattttatttctaggttaaaaaaaagtccttgaatcagacaaaagacaacaggtagtgatggagaaggcccattctcatactagcacgtgcttcacagtatttgctttttctttgtaggttatggaaaggaggctctcttgataccaagcttcaggatccacccacaggaaaaggtgatttctcaagtgtcgagtcttggcgtacgatgcattaggcaatcagcccctgcctgtttgatggagttgtacaataaacatgggcttgggggaatcaagaacatttcgagaagcatctctggtggaatcctgatgctggaggcctctactttgggatgtgacatttttgggttggctgactaaagctgttcctggaggtcagctggtggttttgcaagttcttggctttttcctgcattctgtcattgtgccttgacttttttagtggggcgggattccccatgactgaggatggtggttgtggtgatggtgtgaacagtgagactgccctctacctcaggttaggagatgtgggaatgagacagagatggaggggtatgttctggcttaatcaactggatcagcttcactaaactgggtaggtttcaagcattcctagacaccaaagcctactccttaaatctgcaatgcaatgttggtgattttagccttctggaagacctttccttaggttaatgagacaacaatttgcttaaatgtgggacaatttcaatatagaagtcataatctgggccatggaatttggtcataggttgatagaagatttctagccacttcataataataactatatcttatgcattttttaatcttcttcattagttccaagatatagtttaaggctctcttggagtcaccttagtttgcctttagtgcatcagaaaggacactttgatttatcccagcatggaggtcagaggttaacaacaggacaacaagcatatactaagctcttgccatgggtgtagcaagtgcggtgcagtgtgcagactccatagaatcctgtcatggcctttgcccagaagaggcttctgattttgcagaggtaggatttatataactgttagattgaaagtgaggacttctgcagatgcagttgtaaaatgttgtcatcctttccttctaagcctgggctgtggggttagctctccattccctgggtcagatctagagaaagttccatcacttttctggctactccaggatcttttgtttgcaaaaatgtttgtaattcaatattatcacagtggttttcaacccaggtggcccatcagaattgcccgggcagctcttaaaaaatattgatgcctaggctaccgccaagaccagtgaaataagaatctttggtgattggaaaaaaaaatctttgaggatgaagcccagacatcagtatttttaaagcttcccaggaattccagatggatagacagggttgagaaccacagaaatggaatgtgcaattccagataaatcatgaaaaattccaattctatttaaaatgaaaacctctcctgttctctttctcttgcctacaattctgagttagggagaaagacttgggaagccttgacttctcacctgaccttacaagtgttttcctcctagccagcttgctcaccgatgttgccgactgctctgaggttggggtgggtaggaagggaggacaggtaatggctgggagggtctcatgtgactggcatcaatgccacctgacatggcttcttctggctgtgggagaagtttgaagttgatttgctttggggacagaagtaaaaatttgtatattcttcggagattgcctttcatctctgggagtctcttatctgcagtttctttggttttccagtaatctgactcacacagagagactctgctgtgtcccagtggcccccaggaggccatcttagacaaagtcccttaagagggtgccaggctggctctccctcagtcatgcaggccctcctctcctctctctgctttcagccctgctacccaccctttccctttaggctcattcatccagcgttctggcagtaccctctggtaccgcacagacttcaggggaccttgaacaagctccattttgtctcctggaagctcattccaccaggtttgaggtgaggggaaataccactttggcagaaacactagttgtcccccaatttttttttccattttttttcctacagtgatagagtgagtttcatctgcaaacgtggcttttcagaataaagacaacatttctcagtttcccttacagctacccaccatgagactaaacccattgtcatggtactaaattctgatcaatggcatattgggtacatgcagtgtaggcaacttccaggaaatatctttaaaaggaggtggcatggccttcttctcaacccgctttcccactggatggaaggcagttggctgagatcttggtcgcagaagtgggagcagcatgttgaggaggttgggcagtaggcaggaagcagcctgggcccctgatgagtcatacacacactgactactgaaacttgcatgtgtgagagaaataaacttccatcttgtaaaacccactatttgtcactggtaaagcctgagttctgtcctctctctctcctccctggacagtatgagcttcaccactcgctccaccttctccaccaactaccagtccctgggctctgtccaggtgcccagctaagacgctcggccagtcagcagcatgaccagtatctctgcaggggctgggggctctggttcccagatctccatgtccccctccaccagcttctggggtggcatggggtctggggccctggccgtggggatggccagggttctggcaggatggaagacatccagaacaagaaggagaccatgcaaagcctgaatgactgcctggcctcctacctggacagagtgaggagactggataccaagaatcggaagctggagagcaaaatccgggagcacctggagaagaagggaccccaagtcagagactggagccattacttcaagaccgtggaggacctgagggctcagatcttcgcaaatactgtggacaatgcccgcatcgttctgcaagtcgacaatgcccatcttgctgatgactttagagtcaagtatgtgacagagctggccatgcgccagtctatggagagcgacatccatgggctccgcaaggtcattgatgacaccaatgtcactcggctgcagctggaaacagagatcgaggctctcaaggaggagctgctcttcatgaagaagaacgaagaaggggaaataaaaggcctacaagcccagattgccagctctgggttgactgtggaggtagatatccccaaatctcaggaccttgccaagctcatggcagacatctgggcccaatatgatgagctggctcggaagagccaagaggagctgggcaagtactggtctcagcagattgaggagagtatcacagtagtcaccatgcagtccaccgaggttggagctgctgagatgatgctcatggagctgcttggagatcaacctggactccatgagaaatctgaaggctagcttggagaatggcctgagggaggtggaggcccgctatgccctgcagatggagcagttcaacaggatcctgctgcacctggagtcagagctggcacagacctgggcagagggacagtgccaggcccaggagtacgaggccctgctgagcatcagggtcaagctggaggctgagatcgccacctaccaccacctgctggaagatgtgaggacttcaatcttagcgatgccctggacagcatcaactccacgcaaactatgcaaaagaccaccaccggccggatagtggatggcaaagtggggtctgagaccaacaacaccaaagttctgagacattaagtcagcagaacccggggaccctttggggaggaggaggccgatgaaaagttcagaggtttaaaaaaaaaaaaaaagctgggtgcagtggctcacgcctgtaatcccagcactttgggaggccgaggcttgtggatcacgaggtcaggagatcaagaccaccctggctagcaaggtaaaaccctgtctctactaaaaatacaaaaaaattagctgggcgtggcagcatgtgcctgtagtcccagctacttgggaggctgaggcaggagaatcacttgaaccagggaggcagaggttgcagtgagccaggattgtaccactgcactccagcctgggccacagagtgagactccatctaaaaaaaaaaaaaaaaaaaaacccacaaacaaatccactgttgttatgggttgtctgacacaactgaacctaatactaaataattcagaattttgtcttgaaatggagtgctgagcattagcttgggaagatgataggctgcagaaacatagatgttgcagagtaggaagagggtcacccccattagatggtagcaaaacagtaggtcgaattgcatctgctatacctcaaaaggcagaccacgtgttagtgaaaatagtagaaaaaggctagaatgttggtggtagggcagctttttgctgcttttagcaaagtcctacaggagagagttgaattcagctgagagctagttagtccacaagcagatgtggaaggaaatgtcactttgctaggggaggcgctctgtgatgtagcctgcactctaatttgactgagagtctagcaatttggaggtgtttgaagtattaattaagctaactgtgtctgtaccccaacttgaagcagccccaagaggtggctgcaaaatggcagccttgctaacatgtagtactgtggccccaaaccctcttcaagcaatttattttaagagttctctgccatcatgggaatcagcttagctggctgcaaaaatcaaatcttagcaaaccttttgtttcagttgctactatgttgagagagagagaggtgtggccaaacactggccagtaagtaaaaagcctgagactttaggcttaaaagctgtgtctagatgacattgttgtctgtggtttttcacacatggaaacagataaactggaagcctactaaaattttgagggaatcatattggaaacaaaaaagcctgtgagcagcaatctgtagagtaatgcctgtgttccagaagctgcattagcaggaagagtgtgggaaaggagattgtgtgtgccctccaaggcccttttcagatgtggtcaagaggatgatggataaaggagagggaaaaccagggccaatggacaagggaattattctcagaaaggagagtgagaagctgccagagtgtccaaccaaggaagcgacttcactatcaaggacaggagcctttgctattcctgcccagtgggatatgataatagttatgggccagtgacttctgggcatttccccttctccccatttccaaatgggagtctttagaaattgttattatcttgtttcttctctaccattttaattttaggtatgtgatgggaagataacttactattagcgtatagatcacctgaccactaagagctgcatctgggcctgatggagaggactgggcaccagtcatacactctggatttaagctgaatgcagttactggttgggtcattgccttcttttatggaaaggatgggtatgttctatgtatttcaagatgggtgcacatgggtatttttagggttaaagaggtagattgtggggctaggcacagtggctcatatctgtaatctcagaactttgggaggtcaaggagagaggattgcttgagcccaggagtttgagaccagcttgggcagcatagtgagatcccctctctacaaaaaactaaaaagtagccgagcatagtgatgttaacctgtagttccagctacttgggagtctgaggtgggaggattgtttgagtctgagaggttgaggctgaagtgagcaatgatgatgcaactgcactccaccctgggtgacagagcgagaccttatctcaagaaaaaaaagaggtggattatggaagaaacacctagtttcctcactgtatcttccacagtgatgtagccttagacttttggctgggcatgtggcttttcagaataaagattacatttcccagtcctccttgtaactggggttagttatgttactcagttctggccagtgggctgtaaagactgtgtgtgcagtgttcaggaagtatccttaaaaggtcttagacctttctcctttcaactttcttactggtgggaatgtggatagattcaccatatcagccttgagccattactttagatatttacatgagagaggaatacagttctttctcttagaagtcatttgttttgtgttttctttcacttgcagttgaatccaatcctgtgaggggacattaagacagaaagcacactaataggagaatgaaaacatctatttcccaggttgctcaatttcaacattttataccattaaggacaatggtcacaaaactgtttctcagaccattttttccccattttttagaagttttattttgtttttaattgacgcaataattgtgcttatttacggagcacagtgtgatgttttgatacatgtatacattgtgtaatgatcaaatcaggataattaccatatccatcacctcaaacacatcatttctttgtggtgagaacattcaaaattgtgagaccttttccttgggattcttgcatagatggtttaacattttgctttggaaagtgaggatagctgacacctattttccaggtgccctagaggagttagaaagagttccattttaacatcctgttataatcatgtatataaactaatagttccagaatatgcacactatagttaaatgacagcatgtgtgttatagactacaaatgctcaaggaatacagagaatggatacattattgtaggctggcctagttagagaagtttctgaggtgtgacagacttgaaatggagggaatgaaggtctgtgataaaagacaagagagtgtgccaggtaggtgtgtgtgtgtatgtgtgtgtgtgtgtgtaggggtgaggcagttcagactgcacaggtaaaagcactgaagtaggaatgtgcatagttcacatggggccctttgtttggatctttatagttcttggtaaaacttgatctctatccacttccttgatttttcttctcctttgtctttcagggttgatttatgactgcaggatggtgtcttgaccacctactgcctttattgatggaaagtaacacccctcaaagaaccttccatgtatttatgggtgtttttcaggaatggaagacaccactgtctgcttttcccaaattcattcccccatccaaccccaacaccagtacatgtccccaagtccaggtattttcctgctcacagaccacagttttgtttgggtatcaggcagctgcattgttcaggaagcttagaccccactcacataaagagagagcatcttattcctgtaagccaagcaagggaatcttgtttccctgttggtagaggaacttggcatgtagtacaattctggctcatgagttgcaaggaggactggagaaacagggtgcttctgggaaagttatctttgccagggatacaaggaaggggtgttctgtcttacgtgttgtgtgagcttgtgatgcctaaaatatccacagtcatctggccacagaagggacagcctgagacaaaagccaacatgcctgggagaggagagcagaaagaaagtccctgggtctttaatggtgtcattggattgagaaccacccaactctgaaattgcttgacttccagactctttgttacctgaaaaaataacccccttttattgattaagccattttagcttggttcatttttatttggtggatatgccagagtgtggctccctgttcagaaatagcctcagttcttctcccatcaagggtgctatttggcagcttctgctcctcataccacctgaacagaggtcaccagggctcctcctgctggggagacctttgcaaccactatattgacctcaggggaaacagacccagctgttactgttgacacttcattataagcatgggattagtctttccaggaattatcacttgtaattcctgacaatgcagcagagcctgggatgtaacttttaacaagacttcccagaaggttcgaggttgatggaggggaagtgcatatgcacagtagctcacagctgaggcatgcatggctcaggccatcttcagggtgtcttggcagcctagctcccagtcttactactgctttgtctggggcaacttagctaactcctcgccccctgctccctgtaccctgcttctgcccccagagagagtagaaagatttccctcacactagtccttgggctgtgcaaagtgtggtccaaggactggcagcatcagcatcacctgggaagttatgagaaatgcagaatcataggccctgccctagacccactgaaacataatctgtattttaataaggcttctaggcaatttctaagaacattaaagtttaagaagttatcctagtctaaggcttgcctctcacgccttcatttcctattgcaggtttcaactctagctgggatgactgactatggggacttttttttttttttcaggggaaactgcatcctcatagtgattgtggacttttgggctcaacaagacactcgtgcaaccccaacaccagtacatagtctcaaatccaggctggtcagttttaaaaaatggtcactatgtggcatcaaaagcccagtccaggtgggggttaagcctgttccttttttttttcagttttcttaaattataaaagtaacattaaaatattaacatttaagacaaaggtgaattttatataagttgatattaccttctctacatacatatatatttaatttttacatatttgatttaatatttaatgattcaattttatattctacactttcattcaatattacactgagataggcttccattctgttattcattttttctttcccatagcttgtatttgctcattcttacatccctgagataattaatgttaaaaacttgattcacatttttgcatacctttctccatcctcatgcaaatatatgcacacatgtatatgccatttttttggggtcagtttctcttttcttacaaaagaaattatattaagcatttatatcaggttggttttttcccccttaaccattaaatggtagtctctccaggtcagtaggcacagagataactcctaatagctgcataatattccttagtatggatgtattataactgatgcaacccttttctcttactaatgaacattcaggttgctctggtcatatgtttccttacacaaagggtcttatatattccatacttttacctctaaagacagatgcctgtaagtaatattgttgggtcaaaggaaataagttagagtaagctaactgctataacaaatagaccctcgaatatatcatatttcaaacataataaaagtaaaatagtccacattagtttcaggtactcagaggtctctgctacacataatcactccgggttcaggccacaggggctttgccaccttcaacaagtgaatgtagtgtcatacctgagctaggactcagttgtctgctacagaggaatctggaaaatgtagtgtaggtgtgcccagaacaaaaggaaacaattttttgaatagttagtttctgctacaaagggtcaatgaatatttaatttaaatatatattaccaagttgcttttacaaatggtggtaacagtttgcattcccactagcaatatatgaaagagtccataatctggaattcttgctggtgctggatggtatcattctttaaatctttccaaatctgatggatgaataatggtattgctttaatttgcattttcttgattattactggttaagtgtcttttcacaagtttaacagtcatctggttaatttgtttctttcctacctgttctatgttcccttttgtctcctttcttgccttcttttgaattattattattattattattattattattattattactgttatttttgagacagtctctgttctgttgcccaggctggagtgcagtggaacgatctcagctcactgaaacctcctcccctcaggttcaagcaattcttgtgcctcagcctctcaagtagctggaattacaggcatgtaccacccatgccttgctaatttttgtatttttagtagagacagggttttgccatgttggctaggctggtctcaaactcctggcctcaagtgatccacccacctcagtctcccaaagtgctgggattacaggcgtgagccaccatgcccggcctggattattttttattattctacttttcccctctcttagtttgctaattttacattttgtttttgtactcttttagaggttatcctagaatgtaaacatatctcctagacttatgaaagtctaatatactgtttcaggttggatctcccaggagacagactttgagatgtagttattgttcagaaagtttactgggggaaatgttcttggcttaacaccagtggaagggaaggaaaggaagcaggtttgttaaagagagaagttggattgtgctgcaattagaatgaaagactgaagctctctccagggaaccttggaagtggggatggcttttcagcattgtcttgagtttgggtgaggggccaggcttttatatccacacattgagcagttattggatgtaggccgccttgggaagggggcttgtcactgggcaaggtggcccttttcagctgatggcaactcctaaagagaggtgacagctgagggagtaagtccctatgtcttgagggggaggtctgactggcagaggttagattacactacatgtaaaacagtacttttacctccacccaagcaattcaaggaccttagaacactttaacttcatttgacttctgatttttattactattgtcatttatatttattctgtgtatattttaactgccatgacatgattattacagtttttacattatatattcatttatgtttacccacataccttttctgtggctcttaattctttctgcatttctaagctccatttgagatccttttcatcttctccaagaaccctctttagaatttcctttggtacagatctactggcaatacgttatttcaacgtttctttgtcttaaaacacctttatttcactctttctttagggatattttcactggtatagacttccaggctggcaattatttcctttcctctgaaaatgccattatattgccttcattcttgaagtttattttctctgcatgtggaattcttggttgatagctttctgttccagcactttcagtgttttaccgacgtctctgtcagtttcaagtgagaagttcgtgatattttgaatcattgtttagccgtgtgttttgtgttcttttcttttgttgttatcaagattttctctttatctttggtattcagcagtttgagtctgatgatattaatcattttgtgtgtgtatgtcctgctcatgaatcattgagtttcttgagtctgtaaatttatgtatttcgctaaacttggaaaataattggaaattatttctttattgtttatgtcctattgtctccttcttcttcttctgggatccagttatatgtatgttggacattttgatatcatcccacaggtattcaaagctcatattcttagctagaatctgccccgtggttgtgtgctttgggcgttagccagagatttgggcagtttaaacacagaaattgtggtcattctttctgactgtatcctttctgagatttccctctcccttccagtggctgattatcgtgaactctgtcttctgcttttttcaagctggtgaggtagagattttctgttgaagttctatcagaaccacagtgtgcagcactgactttggcctacactcaggcaaaatgctgtaaaaatgggcaactcaccctgtgctgttccttttttccaagtgtctactttctttcacaatttacctgtctttgtttactttccagtgtcatcaggtttttattttttctaattttgtccagagtttacagttgtgatatgtgggaaatctgggtatggtagcagctactttaccatattggaagtggaagcccagttgttctttttttcagcagtttgcaagcatcattccattgtctcctggctttgtgaagcatgttcactatgtacttgtttcaatctcaaggaaagactctaaacactgcactagtttcaattcacttgcatgagtctggtaacacaagaaattaagtgaagcaacttttttactcatagataggcagcagaggacaatagaagcctaggattcatgatgagcttgttccctaaggctcaggaaagctgcccagggaggatgaagtctcctatgcatttatcccacttttcaccacagctgagggtccctgaaagtgtgttccactttgggttttgtttcagaggaaactggactcactgtgctaaagtgttgtaggagatcttattctaggagggactggaacagagcccaagctgttttggccagttcctccttatctcaagctattgcattcccagcacattctatagttattcttgagaattgtaagtgagaaaagaaagtaagaattgggggccgggcgcggtggctcacgcctgtaatcccagcactttgggaggccgaggcgggcggatcacgaggtcaggagatcgagaccatcccggctaaaacggtgaaaccccgtctctactaaaaatacaaaaaattagccgggcgtagtggcaggcgcctgtagtcccagctacttgggaggctgaggcaggagaatggcgtgaacccgggaggcggagcttgcagtgagccgagatcccgccactgcactccagcctgggcgacagagcgagactccgtctcaaaaaaaaaaaaaaaaaaaaaaaaaaaaaaaaaaaagaattggtcaccaaggtcatctggggacatgtccagcaggcttcagttatttctgttgggaattcagctgtcagtcttattgtcactctattaaaagtaatgtgtccttccacccctgtcccatctgcttttaggattttctctttttctttgaccttcaaaattttactgtgtttatcaagatttggatttcccacagcctggctattttcttctggcctgtcttccagacaaccattatctttttagctgctgctaagccccactcttgaatttttaattccaattgtatttttctgttctagcatttatacttgatccttttaaaaaagcttacgtttgaaattttccgtttcatcatacaatatcttgaacaaattaatctcagttactttataatatgtgaaactcgaatgtcttgattttgtgttagtctgtttctattgtctgttcttttctgttggtttttggttatttggtctcatctcctagcatgcttagacatgcatgtaagagctgtagagctaatttgaagttctgtatgatgttacatttttccagaggacctgttttgtgtctggcatgaagttaacccagggacagatcaccttgatcagacctgggattgcgatgatttgaaggtaggcttcagattttgtgaggtcggattaatttttgttcaccattatgccagtgggagtcccaactgaaagcataatgtggttaccagggcaccttctctttggtgatctcggaactccaatttttgcttccctccccacctgagactgtcaatgctctgtctagtctttcagctgccactttctgctcaggctttcaactttcagctattgctttgaaacctgtgaacagcgagagggcaaaagcagtgatgaatattggactcaattctctgcagttttctctccaggaatgtggctcctcaagtcttccttggcttggtagttctctgaagccaataaatacattttaaaaagtatctcgtccaggtgttctagttgttttcagtgggaaggtaagcctttaacaagcactgccaccattgccagaagtggagatcatcagttttttttttttttttaatctcaaggggtttagtgtcatggagggaaatttttttttttctcatgaggggttttacatgagaaaaaaaatttgttaattttcaaagcttattatgagaacaaaagagaatcaaaaggagaagacacaggatggttgttccttggtatccttgggggattggttccaggacccctgcagataaccaaaatctgtggacgctcaactcccctacataaaatggcatactatttgcatgtagcctacgtacaaacatctttctgtttactttaaatcatctctaggttatttagaatacctagtataatgtaaatgatgtgtaaatagttgctatactatattattttacagtttgtattttaaacaattatttttcttgaatatttttgagccttgattggttgaatgcacagatgcagaactcatgaatatggagggctgactgtataccttcaatgtccactaatagcatcaacattttattttatgaaaatatacctctgctttatattatttttctgtcaacaaggtattgctgtttttatagcaatgtaaaatactaagcatgggggaaagctctagaatcttactattgtatataaaaggtgaccagttctcatggcagggctcccgtgtgggaagaataaagcagccatcaggctaacagctttcctagtacggactgccataaccgcacagccagatctgatctgtcataacaactcaagtcacaatgcatctcctacaatggctgagttgtttagaggattttagtttgaggtagcagaggttgtgttcacggcagaggaaaaggtcttatgtattcccagcccaagtggcctaattccttatcaccaggcatgagactcagtgatcatggcagagccaccaccttctctgtgacaccccatcacactctgtctgctcatcctacccatccataatcccggactcccctgcttttggctgcatctacctatttcctcaccctttcattctcccacctgttgccttttgctgctaaatccacatcttcatccccttagttccactgcacagacccatgcctgtgtcagggagagagaagggagcaggttctcaagaaaaacatagtgagtaacaatgaggtacacagagcgcctgtgcctgtgatgtcttcattagaaagaacataggggaagacctgagggcataacaaatcttgggcttcctcactccagcctgcaactgacacgacagtgatcttgtcgattgcatcagcagcctttagtaaaagtataaaaatgttctcaccagcagattaatagcttcttcagcttctctatccctcctcctgtttagaggttagctgtgaaaagttaagaaccctttagcaggctttttggaaaatccagactctgggacactcacagaactgtttggtttctttaacaaataaattgcaagggaaaatattgaggaagatctatagatggaaaaaagacagaaaagaaataaatcagttgaaatgtataggcatttggattcttattaaaacaaatacatggttaaagtagtatgacatttattagacaaattagaaatttaaacattagctggacatttgatattaaagaattgttattaagcttttaagtgtgagagtgatatatggttatatcttacaaatgtgaattcttttagagacacatagaaaatattgatgggtgaaatgaaataattttggggatgggctttgaaataataggattggggaaagtgggtggggatctagatgaaagaaaagtgtccatgaattgatagttgtagaatctgaataaagagaacataggggtttattatgctattttgtctacttttgcatatctttgaagtttttcataataaaaaaaatctctgtatttctggacaacttcgtagaaagaatcccaaacaactaataatacagttcaaaaccctgtgcatcccatttgcataatagtccccaaatgaggtccctagcataaagaagcttccaggtctaaagaacatagcacatattatggggtggatcttcaattttgcagaaaatgtgtgttggcctggagcctattctcttttaggtttagtgcttgcaagagatcatccagattattctatttgtgtgtgtatgtagttggggagggggtgcctaatagccactttagtgcctttgaaatggggtttcaccacttgctacaatattatcccccttctttatagaacagtcctggtcctgaatattccagacagagcatgagtggatgaaatggagtttcatgggatttctcttcacatagataatattagctgaatccatactcggtctcaggtattaaacttagtattttacatgcagtatttcctgaaatgttcacaattactctatagagaggtgtattcattacactatttttttttgagacaagaaaatggaagcttggagagttgacataacttttccaaggtcacaaaaattgaaattaagatacagaaccagctggggcttaaaatctaggttgcttgacccctaaggctgaactctgccatgaattttatggtacctcagtttatttcagattaaattaactgtagatcctgggaaacatatatttgagcaaagattaaaaaaaaggttaaaataaaaacaaaagccaaatgccaaagctctgaagacttcaggtttgctagaatttaaaggtatcttatggggctgggccaaatgaagtggttgccattctgggaatgaccttccataaagctttctggaatcttcttcagagcacctcacaactgcatgtggtacaaatattttcttctctttctttgccattaaaggcagaggagaggtggctttcctaagccacaggagtttgcaaccctgtgatgggatgacctgagaccttgttttccatggatgctgttacactgctattggaagaacaccaggagatgctcagcttcttgacagactgtcagtgtaaggctttctcctgggcatgagacagtggccaaggtgagtttaggagggaaatagagcagccttttgtgaagggctccagtgtctcctaggttagcttcattttccagatggttggggaaacataaggccagggaaagacaaaatgccctccatggtggaggtgggagaaattttgtaatgcaaataaggccccaagatggagaataatttaaatacatcccatcctagaaaattctctaaggcttatttcacagtgctccaagtatgctcatatttttgaattatttccaagggacctggtagaagactaaaagaaggctgtaactatgtgactattgccataggatgttggtttgtctatgaacttgcagtcttggatagtgatgccattgagaggaactctaaaattggagctagccaagctcaaaaacacttggaaatatgtaccatgctggagtggctacagaatagacatcagaaggagacctctattccaaagacctagtatgtgaaatccctaccatacagcttatcagctgtttgttgctgtcttgaggtcactgggctatagtcgagcaccaggggtaaagagaaggtcattttctaagaaatactcagatcactatgaagagcaacactcctcagcaaatggaattctattgccccataaactatttgttggcagaggcttttcctccaaggggtgggactagagactcagaactattgtttactctcctccatgctcttggtatccagctgtttggcagggcacctgttcacaggaacctcaacaatttctctagagagctaacattaggagggcaatgggatttgctcttttttttcccaccagagagagggagatgaaaaatctcctagggattctttcaggattattaaggtgaaagttttaagcactgcctttacaagatgggactctacaaaatagttcttttagcaacaatggttctgggtgcttcttggttcttcaactcccccgttaatgtgcttactcagaggagaattcagagagcatatttcttccttcttatcaccttttagttttagttcaattgcttattttgcccaatgactgataccacagaagaatagagttttaatgaaaacagagcttttaagagaagttgtgcatttctctgttggtgtggactatcccgtaactctgcctgggtctcttgaattcatatgcaaataatttatcaaggcagtgctctcaggagaacaggtaaggaagtggaggaaccaggacagggaacaggaagaagccattcatgttgctgtggctgcataacaaattatcccaaaacttaatggcttaaaactatggcatcacttactttgcctgcaaagctgcaatttgggcagaaatccatgtatacagcttgtctctgctctacttggcatcagctggagtggctcaaggactaggggtggggttgtgtaagagactcatgcactcgtatatctggtggtggattctggctatagggtgatgcctcagctggggctgtcaactggaacatcaaaatgtggcctctccacggaacataatattgagagaaaacaaacatggcaaaatggtaccattttcaatatgatactgcatatagaaatttaataaacagcccactgttatttatttataaatccatgtgtaagtagtaaaagtatgaaaatatgactagatacacaataatctcaaaataattatatctgggtgatatggtttgggtatgtcgccaccacccaaatctcatcttggattgtaactaccacagtttccacatgttgtgggaggaacccgacgggaggtgattgaattatgggggcgggcctttcctgtcctattctcgtgaaattgaatatgtctcatgagatctgatggttttataaaggggagtttccctgcacaagctcccttctcttgtctgccaccatgtgagatgtgcctttaaccttccaccatgattgtgaggcctctccagccatgtggaactgtaagtccaataaacctctttctttcgtgaattgcccagccttgggtatgtctttatcagcagcatgaaaacagacaaatacactggaggattatagaggtttgaacttaatctgtgatagttatgtgtctaagaaagatcagaatcaaatatgataaactattaacatctgttatgtgtggataaagactcttctacatactattttttttcttttttatgattttttttaaaatattatagagacagggtcttgctatgttgcccaggctggttttgaactcctgagctcaagtgatcctcctgcctctacctcccaaaatgctgggattacatgtgtgagccaccatacttggatcaaatttttcttcttataaaggaaaaattgggggaaataagaaaaatttttaaattagggatgtttacatttgtaccacctaaaaacaggcagtagtgttgatgtgaaaacaaaacaatgtagaatgaatttaaaaaagatgaaataattgagtgtaaggaagttagaaatgagttggaggttaaaatctgtagtgaagttatgcagggtggtgcacagatagtacaaaataaaacttttctcaggatatggagggaaaaaagacaaagattaaaacgatgtggggtagggtagagatggaggccagaggaatgagaagagtgaaaacgacaattggtgccattgaggaagagctcaccctccatgttgcacaaaagtggccatcggagatgtaataagcagaaagtttcctgaggcaaagaaagacttgaatgtagatggaaaggactcacagaggtcctgatacggtccaagaaaagaggtctacccttagactcttcctgtgtcttttgaattatgaggctaaagaaagctctttaagcatccgagttcaaaattagtctacaaaggaacaaaaatcaggctggactcagagttctccctagagaactaaagaagctgatgcccacctccagagttttgaaggttaagaattggggacgtcacaacccagaattgccttaatttgtgaagacaatattaaaaattctgcaatatgccaagttgtgcacaactggaaaaatgactcgaagttttactccagccaattgaaggattaaggacttggaaaccatgatgtaataagatttacaaatagcttcttattccgtttagattccataatagaaaatctaattatattagatattttcaaatggatttataacccacgggcaaagctagggtctataacacttccattaattattgttggtttttgctattttccattagttgttattgttggtttttgctattttttcaaaatcaggaaaaacttttttttggggtaatattccttacctcatgggtcagatggaatcaccttctacttaaaacaatacaacctacttcttttctagtccaaaaaagggcctgcaatatttaaatgacagggcattgtgtttgcagaattgctaaacccagaaagtatttttttaatccctccattgaaactgatttttattcagcaatacaaaaacattgcattgacaaataacttgagtaataattttatgctcattttgaatgacctgagtatataggtttttttttgtaattatgaaaaatgaataacctaccagtggcagatataatctgtgattaaaacctcctttataacgtcttccaactaggaattgtgaatgactcttcttgggttaattgtacttaaaatcagaatatgtaatataatcttaaccatgttaaattatgcatagaaaaagaactttaaagaaataaaatagtaaatgaggatatctgagtcatgagattctgagtgattttaattttctttgtgtatttgtatatttttaataaactatatttcttgtcacaaaaatgaacgctgttatgaaaatcagcatatactgttttacctatgccatatgataaaatgatgtgaatattacacatgaggagaagattgaggggtacactgttgtgttaaatggacagtctgaagcctttggatgttagagctacaaatgatttatcttctttttttttttttaaagactttatgtgtggcaagactatatatttctttccaactgaaaaagttctttattttacaaatatactaaaataaaatatattttattcaacatagcaatgctaaatgggcatatataggaaaggtatactatactttctatttttaactctttaaaattgtagccctctccagccgggcacggtggcttatgcctgtaatcccagcactttgggaggctgaggcaggtggatcgcctgaggtcaggagtttgagaccagcctggccaacatagtgaaaccccatctctactaaaaatacaaaaaattagctgggagtggtggcgggcatctgtagtctcagctactagggaggctgaggcaggagaatcgcttgaacccagagacggaggttgcagtgagccgagatcacgccattgccctccagcctgggcaacaggggcaaaactctgtctaaaaaaaacaaaaaactgtagccctctcctcttgccaataagttgcttttaaaatcagtgacaatccaaacagtgggctaatacatatttttaatacaaataattataataaagataatataatataaataaaatatataataaagcaaattttaataaacattatattttaagtgaaataactacaatgaagttaatacttttaaatacaagtattacaatgaaacagaagatctgaattttggacttgaaattctaaaccatagggttttagagaagaaaagacttctgagttgatatcatatttaacttccttatttgatggataaggaaactgagtggggagaggcgaaatgagtagctctgagtttcacattaatttgcactggaactcagggttccagattccctgcacagcaatttctcttcccataaccatgctcctagtgaggactgcctttgagtgtggatacagaggagagtgacatatgcaaaggtgaacagagactgttcacctgcccatcttcctatgcaaaataaaatgtggactgtttttgtgtttgcaattatgtgaagcaccatttgattctcatgtcatagctccatggctaaagctgcttggtgagcatcttgaaaggaggcagaaggtctccaatgctgtcctggctcagaacgttactgtagaatttcactggaggaaaatctatgaacattctgctgaaagttaagtagcttccagtattaaactatcaacatgtatttagtttttcttaactactttctagattaaaatcagtgcaaaatttacttcaaaagatatttcaggttttactgaacccactaggcttgcaaaatgatttttaaaaattgaccaaagaacccatctctaggcttggcgcggtggctcacgcctgtaatcccagcactttgggaggccgaggcgggcggatcacccgaggtcaggagttcgagaccagcctcaacatggagaaaccccttctctactaaaaatacaaaaaattagcggggtgtgatggtgcatgcctgtaatcccagctactcgggaggctgaggcaggagaattgcttgaacctgggaggtggaggttgtggtgagccgagatcgcgctattgcactccagcctgggcaacaacagcaaaactccatctcaaaaaacaaaacaaaacaaaacaaaacaaaacaaaacaaaacaacccatctctagattctagagtctggaagacaagaaagagaagaatgatgatgatgaggaaaatgatcttatgggcatggcagtggtgggctggtgctaataatgatttcatttgcagtgggcaggcatccaagagtattctgggcaagtcttatttcccaaggcaatgtattctagtcttatgagagcactgcagcaatttttttgagatgtatttgagactggactctggcacgaagtttttctcaatacgaagcaccgtaatgacatattatctggaatctgaggctctcctttgatgcagaagtgatcagatttaccgtttccactagatggcattagaaacttctgaagccatgaactaattactagtcacctttgttaggctgtaaattacacctgcaggtttaagaggtaattggcaatcgactatctggtgtgttttaactttgatgccaggtacatggttaagacattggtatcagatctcacccttgacataaatagcttctgggattatcagaatgtcattccacatctcatgttccaagcaagagttttgaaagcaacatataaccctccctcattgtaaatcaaaaccaagtaatactagctcctcttatcctagctaggcaatcagtttagggcaaacatattaggtagaaagggtaaatgaaaatgttttcctagcatgcagagatttgtttttttggtttcttttgccatatttcaaacatgagggagaaaaacaacaacagaatctgaagatttatcagcttctcctagtggcggttttaagaaaactgggtaggtttttaaattatacatgaaaacatccgggatctagaatggatacatgtcccagtgtttctgaaaagtctttgcctcttcagatgctctatgtagctaagccaggaaatggtaggttcggtgtgtgcatgtgcgtatcattttcttttctcagtggtgtgtttccgcgcctgccgctgtcgccgccaccaccattgcctgctccctagcctggctttcatcatttcttcctgttgattggtgtcacctcacatgcttagaatgtctgcctgtctgttcagagtgtgaacacattcctcagaatgctgatctgttcgtttcacaccagtgtcaaaatgacttattaaattcggcacctcctgatactcagtggctgatgtgttgctgtccaaacagtaaatgacaataagcatatgcagctggtgggcctagcaaactcatttaatttgataaaaatgtcaccgcaatatgctttaaatcgctgtccttttcatcattgctaattgctagctatagaccttttttcctatgcttaatacaagtgttagaatactactccttccagcctgattaagaatttaaaaaaaatgtagaattccttttcagtggcagcattatttcatcaagagatggattttgctcttaattaggcaacatgccactagggaagcttcagagtcatgggtgtgaaacagcctcaagcaggagatcaatctaaaggaaaaaaatggtggctggggaataattggcagctccagtgaacgtgggctggttataacagtgacaatatgttccagtggaatatcacaaacctctctctcctatttccaacttggcacatttcaagctcaacaaaagctgaacaatatatcccgtggttatttatctattgttttatatttttttcttgctgcttcattgaagttttttcatgtgttggcctgacaatctggacatttctccagaaaggattagaggattaagaaggaatacaaattcaaaaaataataatccttcagtagcttggtgcttaaaaacagatctggaactgatccatacaccagaatcaggcaaacctgcattaatttgctaaacctgaagttgatttaacacccccactacccgccacccacatactcatacattgaactcaaactttttaaaaagacgtgcaccagattgaacagggactattttattatacaggcaaaatggaaaaaattgcaacataactgatacttaaattggttaaaacctactttttttttcttttaaaataagctttgtgggtggagtctgacttctggagcgggtaagattatagccactcaggccatcagcctctctgcccatccatttgcacctcctcccagcaggaggctttatctgggatttgacttatgcaaaatggaatgaacaaaggaggggaaatttgcctttcctcctgatattcttgcatttcagagcttgatagcctttgctagaaatggagcatggattctggattaatgtctactttatttatgtggttgaacgtatatttttcaagttgctcattgaagaaaacatcacaatcattttggtacacattccaagtgatgcccccagtcatcttctgtagtcttcctgctgtgattggcccatctaaataaaatagtcagttaaagacataggtaacctacttttaaatacacttttgctttgactcccagtctatatctaaagtaaggagggacattctgagcactagacaatctcaggctgccagaggtcatttcattttctcttgtgcttgtgtgctagtgatacctttacctctggtgtataaaaaagaaatgtcttcggggtatttcccggaaggcccatggaagctcttttcgcttaaattgagcaatgctaaagagctcatcaaaatgaatgagggcaatgggaagtctgggtcctggctctgaactcttccagatcaacatgtctccacctaggcagttccaagtgagaagaaccaaaagttctgtgccttgttcaatatgagggcggggtggagggtaccatcattcatattagtgctcccagtaactggtttggggtgttgatgagagtgtgtatcccatgcctggcagatacatagtggatggctcgccaagaggctctctggttgacatgctggggcagaggggacccccccaagctttcctcccacccagggctcccccagtctcagctgcaactccattttacatatcttgctttacaaggtccatttcaagtaggttttgagcccagcttagtaaggtagcatacttacatcatcctgaacccaggggttctccaagttttggcctcatcgtaaccccagctctcatttattgactggcagagacttttctagaattactaaatttattcctgaaacaagctagatgatatttttactgaccacataaaagttttcttctctcttgcataagcaatatataaatatattctcttcacttgccctgacctagttcaaacctgcttccagaagagtccacccttgtaccttggcctgtgtgcctcagtctacagttttgtgtactcttacacatacagccaggggcctgtagaaatcatccagcgttgtcagggtaggttatttttcccaaatgtgaatggtattacccagtgtgtgtcattccatggcttgctgtttgaactgaatgctgtgtctgagagctggccatattgttctatttagagacgggtcatttctctgaagaactgcacgggcttccataaaataaaaagagcagagtttgcttagcactttctcttcatttcatagacgataaaaccgggggccaggaaggttaagtgacttatccaaggtgttctagctactaagcattagagcgtgggtgagagcccaggctgggctgactctcctgcatgcctggctcctcccatatcatcaggtttccttgccatgctgccttctttctcctctctgcactattttcttgcctgctttactcttgaagctacattgggcttgaggtccacatttcagccatgagtgtcctaattcctggggccagatctatactgacctagaaagtacttgaggatgaacattttgaacaacattttacacaggcagggggtgtctttcagcatttttaacattttatttcatttttctaaccaggtagttttctaaacgcttatgctattgtaaccttacaaatcttctaaagatttttcccccagcagggtctgcttcccatatttaacaggaaagcatgtaggagggatgtgggaaccaattgcttgggggaaatattgccctcacaaacatgaatatggcagtcacagtggttcctaaacaaaggtttatggcggtattgtggatcaacaggaatttctgtttgtgaaatggctgcaacatcagaatgggaggataggctgagtaactcagctgctttataaatgaatgagcttttatcctccccaaagcctttcacagtatttgagactcagtggctagttctaaaggggacccattcttgaaaatggtccatttagcagcagtttgagaagtcatcagcgagtactcatggatggactgactcagaaaaaaagaatattgttaataaaagccctgtttgtaaattctgcttacccatggaatgaactaatttttgcatctcagtaccaagatttggaacttcacatagatgtattcgaacataaaattttaaagccattgttgccccagctatgtgctacagacccccccaccgaccacctggttagttttctgagagtttctgcgggaaaggtttacaatggctggttcctggtttgatgtcacatcgataaattatggtgctttaaacagatgtgatctcacagcatagaattcttcagggtaaagctcgtgaaaaggttttttccccctcttggtttcactgtagttttgttgtttggaggttttatgttgttcatttagttccctggctattggggttttatagtcgtatttcctttgtttaatataatttcttttttttcttttagctattttttttagggtgcccagaggcttcagttatgagtggctgtaaagtaaaatatattatgattattacaatgataaagtatacgcttttaagagtctgcttatattgacccatatattctcttttttcctctctccaagatacacacacaggcacattggaaacgcagtagaaaatggctgccaatttaaaaccagaagttaagaagagcaaactcgaatgtacagcaagagagcttcaggctggactggcttccagcagaagtgggactggaaacctcggattctattgtctcttctctgtgaagtgggaaaacatgtcagtatctgaacttgagcttggtaattactgctcatttctcaaccttttccaagccacgtaactcccctaaggcttagttttcttatctgtgaattgcgagatggtatgttcttcatcacgaggttgctataaagactgaatgagataatgtgtgtggaagcaccaagcatggtccttggcatgcagtagatgctcaataaatatgaactggagtacacatgcactctgctccctcctgccccctcatagtgcctggtctggctctgggctccctgggatatggcaggttaccaaagcaggcactaaggcatgtctacccttggtaccttattacctaggtttcctgtgccacctgcttcattctaatcgcagatttcaggctccattcaaacagaacctcacttctgctagctgtcatgctcaaaaagggactgatgaccactgaagcaggctatgatagtgatttatgaatgtcattcctccagacagcatttggattattactggttttgcttttattttatttggcgctaaaaaggcattgagagccaaaggaaagtctctttaatggtgggatttaggcactatagcatatttctttatggaggggaagaaggattttcatcctgaaaccctctatgtcctaccccataggtcgctgctgagtctctctactcatactgatctctttttgcactgggttgaaatagtgttttccccaaattcatgctggaacctgtaaatgtgaccttatttggaaacacggctactgcagatataatcaagttatgatgagatcatattggaatagcatgaaccttaacttcaatatgactgatatccttataagaagaagggtattaggccacagacatagactcacaaggagtcaggctatttgaagacagcagaagaactaggagtgaagcatctataagccaaggaatgacaaaatttgctggcaatcaccagaagctggaggaggcaagggaggattctctcctagagccttcagaggaggcatggcccaggcaacaccttgattttgaacttctagcctccaggatttggagagaataaacttctgctgttttaagccacctagtgtgtggtcctttttttttttttttgagacagagtcttgctctgttgcccaggcttgggtgcagtggtgtggtctgggctcactgcaacctccacctctcaggttcaagtgattctcctgcctcagcctcccaagtagctgggattacaggctcctgccaccatgcccagctaattctttgtatttttagtagagacaggtttttaccatgttggccaggctggtctcaaactcctgactgcaagtgatctgcccaattcagcctcccaaaatgctgggattacaggaatgagccaccgtgcccgacctagtttgtggtgctttcttctagcagtccttggaaattaacacacttgactaagcaggatgcttgctggatggcctagtgggcccagccacagggaggggtagaagggagatgttggtggcaggtagctgatgttggctgggactgtgcttggcgtggatagcaggaggaatgtgctcttcaggtggggcaaagacgtgtaggttttgtggtggacagtgttacaggggtttctgagagcccagaaagtgctgtgggaaacaaactgggttcaataggagtgtgcctcattttacaaaaggaatgcactcccggagtatttcaggggagctaaatttttcttgaacttctctaggagaaagtgaagtttgaagagatcactgaaatttcgagaaagtagaaatctccttgtaaagtgaaaacccacccctgtcccaacctgggtgttgtttattttggaagttccatccctctacttgtgaaactgaggccttcctgaaatgccaggtctctccttctgagagtccaagaagatttgggagagggaagggaggccgacttgcactcattttctagagacaagaaaaaaaataccatacaactcttctaattgaagaatttgagaatgatctctttaaacatttgataattcatttctgaatgttaaggaatagaatttatcaagaagaggatattgtgtgtcaaaatagaggagggccgtacttgatcatttgaaatagcagagaaaaccagtgctgttgaaccatccattcaacagacatttccaaggcactcagttgggtacctggggagaaagatattaataagcttgacccctggcctcgatgacatggttaatgagatggtgtgtggggggatagacagatttgtaaacatgtaataatagcaatagctaacatgtttgaacacctacaaaatactaggccccatgccaagttctatacatgcaagacagcaacatttatccccccataaccatatgaagtggttctgttactcatcccattttgcagatgaggacactgaagcttggagagaatgagtaacttgcctagtgtcatttcacctaagtaagtggcagagctgagattcacactctggtctggggccctgaagactctattattcttcatgacaagtggttaagatgtatctgctgtgtgggtccaagagccagactctttgtgttcaaatagcatatacctacctgctgttaatttgcccttgaacaaattactactaggtttctccaatgaggttatagagttgttgcgaaaatgaaatggcctaatgcagaacaggtgcttaatgcagcacttgacatgacaaagacagtcacaaaatagcagcttttgttactatatgggcaggggctactgcagatgatgcccagagacctgtgaagagtgaggggtcccagccgctctcaactgggacagcaggacacagcttgcagattggggtctgcccccttctgcattatactttgcttcttctttaggcatggattaggacaaaaagacatcaaaagggaagttaaaagggagacttgtgtgtgtatgagctttggaatggtgtgcggcgggtgcgtggtgaggtgaggaaacaaacatcagtaggttgacttttatagaatcccattttaaagggatatttaatggcttccatgggtctctttaaatgtattccaccatattatttggtagataggccaaataatgggatggggatgcaggtatgctagttaagttcccctagcagaagtacttccatcccaagtgggttaagggaattaagagcttgttgaaaatgaagtgctgtatggtagctgccaacagttggaaacactttacctaaaatcatttgaatgcaagaatactaaaacaaagttagttctttgaaaacagcaattgtttctgaaatgattctgataaaacggcaggtaaatttacacgataggacattttgcttgagactgagaatagtctaaagctgctggttctggtggcattttgaagtgcagagccttgaacttgaaggcagtgtttggctaactcctatataaccttaaaaattgggctcaaacatcacctcctctaggaagccttccctgatcttcccagagccccttatctatgctctcaaagcacaacctgaacacctctattgtaatattcaccatattttattggagtgatctttttagaaattttttcctctaatttccactcctgtcttatttctagcaccatcgacttagcacacagtaggtgcccaagctagtcaaactgaagtagatatgactaggttaccaagagaagagaagggggaatgaagacagaaagggaggactctaagaccgccgacaatagtctctcatttcatcatcttatatcaaacagaccctggctctacatatttgaattcaaaatccaatgtattgtcaatctgggccccttttatagaataattttttattccccatccagacctggaaaaaccacaaacctcaggcagttcacgttactttcttggaagcaaagcaagcatggctggcttgggttcaagagaaaggagggaaattgatccatcttttttttcctaccctccaagagaaaaaggagaccagttcagcttaggcaagatcccctgtcaggcagagaccaaaaacgtaggaagagtttctatactctccaggtcaatggtgccaccctttgtctctgtaatctgcttctccaacatggtgggcaatgggggaattttgcataaacactctctgatcagctgtgtcatctaggggcagctccaccacctgtgcctgaaatgtcaaaaataattcttctaagtctcttctcaggcagctttgggatgatttcaaacttgagaaaagaagctgagggtaaaaaattacataccattccaaatcagagcagacaggctgtaaagttctagattttgtttgaaatttctcttcagtgtagaacagcatctttactctgtattgacagaagcagccctttccttaatataagccaagacatagccataaaccagatcgacaggtataatatgtttggcatgtattgttatttgttaccaggagggcttgtagcccacaactcaccctaaacagatgagctctaaatgcttggattacaaacggctgtgaatttaaacatacccaacttgtctttgttagagtgaacccagagcacatggctttccacccggactggttggttactgctgccctattctttgatggagataaacaaacaaacaaacaaacctgattgcaatggtgctttggaacccctagatcctgaactcctttgggagagatctgagagtgggagcagggccttctgcagccaagttagcctcccaggctggctaatagctggtgagtttcttccctaggttttggcggaggtgaccactatggtgtcaagactatggacctgggaacagacagacttgggttcagattccagctctaccacttactagttgagggacttcagccctaatccagttctctttttcattatttattttctcttcttgaatggggaatactttgacatgtttgaagacttaaacaatataaggatatgtgtgctcggaatctattctgtcctgtccttatccatcatgcttacctataccctgaccattgtccttagattctcattgtttcttctggtgttttttatgcaaacaaaagcaaatttattatatatattattatttttcttccttccctacccaaaaggcatcctattatgtatactgtcctgaacattgtcttgtttttttttcattcataatatcagaacacaaagatgttccttatttttaaaaatttaaaaattattattattttttgagatggggtctcattctgtcacccatgacagtgaacgaacatggctgtctgcagcctccacctcctgggctcaaatgatcctcctgcctcagcctctggagtagctgggaccacaggggtgcaccaccatgactggctaattaaaaaaaattttttttgtagagagaagatcttgccatgttgcccagactgtcttctttatgtttcatatatgcatattatgctatagcatggatatatcatagtttattcaaccagtaccctattgcatggattctagtcttctgctattagaaacaatgctacaatgaacatcctgggttgcatgtcctatgtttactggtgtgcctttaggaatacctctgctgggagaaaggataaatgcatctgtaatttaagtagagctggaatcatgtggttctaacttcttgaagaatttgctttaagaatggtggctggaatgatgctattatctcatattaaagcatactgtagcaacaagtcatccaaaacttattgtatgtactcccagatagtaccatgctacttgatcatggagtaagcatggacttgaatcagatagtcctgtgttttgaatcttagctccaccacctaccagatgtgctatgttggatgcaccaccacaggttttaagtctgtctgtttatctggaacacagttgccctcatattgggtgtttaataaatattccttgattgaataccatagggacactgttgaagatgctgttgcttggttcattccatgtcttcttcatgaggaaccccagccaatctcttactagtctgtctcagggttgactgtacttctaaacaactgggatttgattttatcccatgaacactgtggatcgtgcaatggattctgtttttttcttttcactttggctgctaagaggctcagaaccaagtttcctgttctcctctagccagcatcccgtcttttagggcagacattttataaaccagtgtttcccaaacttggctgcatggctcaatcacctgggacacttggaaaaatcccaatggctagatcacaccccatattaattaagtcaggacctgtatgggtaggacttaggtgtcagtcctttttttttttttttttttttttttagacggagttttgctcttgtcgtccaggctggagtgcaatggtgtgatgtcggctcactgcaacctctgcctcctgggttcaaatgattcttctgcctcagcctcccaagtagctggaattacaggcacctgccaccacttggctaatttttgtatttttagtagagacagggtttcaccatgttggccaggctggtctcaaactcctgactgcaggtgatctgcccacctgggcctcccaaggtgctgggattacaggtgtgagccattgtgcccggctggcatcagtactttttaaagctcctcaggagattctaatgcacagacaaggttgacaacaggtattctaagctaaatatacccctcctttttctcatttttcctgttcttatttttctttcatagtaatgtatattagttctcttagctcctgcactgttcccatcatcttccatgtagaaaataaaacatggcttcttataagtcaatggcaaccagatgcttgagaataaagcaagcaagggaacagagaaggaaatcaggtatgtcactaggggaaaatcatttattcatttatgcatgcatcattcatttatattcaacaaatatttatgacatgctgtgggctcagctccatgttatgggggagggaattacctctctggtgaaaatcatgtctaggagagattctttctagggaatatgttttttaggtgtatgataatttcagattgtttaataggagctgtgtttctgacgtttcttttcccctccagggagaaccttggcatttacccagggaaacatcctaatgtgtaccgtggcagggcgtggtaaagaacctagaaacatgtcagtcagtagaaggtgtgttggcccccggaaagccaagcatttgtctgatgaagcatagagtgaattctggcttatatgtttcatcacttggctgggtccttcgtcagatgaaaaggtagcagctgagagcattagcagaaacaattgacgggctaagctctctgtgagagcagcagactcaatcgaggagggctggaagcccaggcgtgggctgtcatgagaagtccacttgcagcagtggcagtgatcctcataaacacgggcccaccgtgctcagagccccattttcccactgacattggccaagatgcatcctggctgtgtgcagaccccagagagaactgcccgatagtggcaacactggcacagtggccagccaaggagggaaaagcaaagcaaagaggactgaggcaaagcaaagaggactgaagatatgaagacccgtatctctgctgagaagagctcatcatagaacaaggacaaatggccagcaagatgccatgcctgaaaatattcaaacatcaagtcccacttcctggtcttacctatgtcatcggaagtgtgtagattctaggctggagagctactttttttcaataggtggaaacaaaaattcatgaagcatcctgaaattattgctgaattcagggatgagggcagcttcgatttcttctctgaacttggaattgtttgctagattttgcaggcttgactccagcagtgcagttgtagaaacaagccagcagcagcagccacacctaagctgggttgcgccttcctgggaggtgtccctgccaagatgggaaaacctgagatgctccccagtggatgcaaatatgtgggagaaaattgaataaaatttcccctggggtgccccccaggaagcatgcttcctcctccacttggtttggctctcattttcagttcgtctgtgttcaggcaaaacctttatgttgttaaaaatgaaattagaaccgaaaggaagcagggagcagttgtggccaaagatgacactgagaaaaggtggaaattggtggcagcatcaggctttccctgctggagtctgcacccctgaaataagcaggcagaaagttgggaggaaagccgagctgcaggcctctcggtcactgggtcccaccacggggatacccggtgccgcgctgagcccagagcagatccagactctcctcccgactcccccaccccttcctctccttgagggggcctcacagcccccccacccccagcacttacccatgcaatgcacaggcccttccccagttctggagggatttatgccttttggaggagcaggttttaaagccaaaagggctttttggtgatatgcaagagcccaaaggatggcaccacagcctggccactgggtgcaggctggtgaggttcagactcactggccacagaggttgggggttgggcatggggtgggggctttccctggatcctaggtggaccaagtcacctcagaggagtgaggaccggagtggatgctcacgcttccttcctcaaggggcaagcgctgcagggagaggctcccagctgacatcctttaggaggcctggaattggggcggcttttcctgacagagggctgtctggcttgctgagctgggctctgccaaaaagccatctgagccctgactttcatgctaacgtaaggaagtgattatgactggaaacttgaacttggaatgtggtctctccaggtccagggtacttctagtgtgcctcgttgggtaaaacaggctttctcagctgcccaggtggccttgccatggagcgggaagagccagtagctgcaaggtgtgagctgtgggcctggcctggcctgttacccttggtgtgaggggacagcaccctcagcatctctgggcctcacaggagggtctcagcccctttctacctcaagaaattttatgtaatcaagtgtgttattcatttggtgtcattctttccccgtagtttgtgtagaaaggaagtggagttgtggtaaaaagaaacccggtgcagccaaaacacacatacacaaaacccccgggcatctctccgttgagtttcgcttgtcagaaagtgccgcgaaaggacagcttgatttttctttatgcagcttgtctgcaaatggcacttgaactaaaatattccctttcatctttgtgacagaaatatgattcagtaattctttgtgaaaatgtagatgatacgctgccgtagttacagtgagttacgtttaagtggcaaatgcctactgataaagacttaattaaagacacaatagcagtgggaggtcattatagtaattacagtcccggctttattgttggggtccagtactgaattgtagcagcacattgccgctacatagtgtcttggtctgatgaggcagtgctccaactcagtgtacttaagactttcacttgccatgggatcaggcctttctgcagttgccctggttccactttatttttgtgtaggctttgcgcctcatttaaaatacgtgataaaataaatcggtaatctcctaggggtgcgttctgtttcatctttttctggttacgtattagactggcaccagtggcatgtgaaggattacgaaggtaccctggaacttcttttatggcagcacaccagtatgcctgatcttggggaattttgaaaccttggagacaaagatcttgtgaggctagcaactttctcgttgcctgggataggacaatgggtggtgctctgtggaggtctgcaagggattgactttggttgattgtgaagtacatgaagctcttgtctctcatttctgagcaaagaggtacagctctcggcacctcctgagggcctctgcttccaggtctgtcacatcactttgagggcactgctccaggccagaccgcaggcagagtgcctttgtggatttaaggacaaacctcatgcttgcaggacacaggcagggccttgaactgggttgtcatgcaggttggaatgttggtatcaaagaacaagagtcattagcagtttgctaatgtggttaagaatattgtcagcatcatttacagatgatgggaacaatagtcactggggactccaaaaggagggagggagagaggaggggcaagggttaaaaactacctatcaggtactgtgcttactacttaggtgacaggatcattcataccccaaatctcagcatcatgcaagatacccatgcaacaaacctgcatatgcattccccgcatctaaaataaaaaattaaaattaagaaagaatattgtcagcttcatttcagagttattcccaattgaataccataagggaggggtaggttaatcatgaaggtgcatctaaatggtgccttctgcctcttagaagtctgggataagtagtttgtgggttattagacatcctgcttatccgttgaagttgtagaaggtcttacctgttttcctaaaatcactgcccctagacatcaccttgcctaatgactcttcaacaggcatttctgcccctgaccagcgctaatgagatgtcagatgagactcatttagaatgattttagaaaatccagagaatacagctcagaaatatctttctcaatgctttgttgctatgacagaaatcatcccagtagcaatcctttaggttatgttagaagttatgaacacctttaaggtgaataacagtatggcccagaaggtgttccttgaccctatcataggagtgctaggccatcaaggatcagataaaattaaataagaccctcacgtgtccttccaagtcctggatcctgacacttcttgagcttcttggctagtttctgacttcattgttgattgagactctgactattggctattccatttggcttttgacctctcccagcctactggttggaattaattttggctttgcttgattgactcatctgctgtctcctggactgactttgatgtgtggctgtgtctcttctggcacctaccttcagcaagtctcagccttgggttttaccacatcttgcctgtgctcaggaccttggtgtaaagtgccaataatcctcaagggagtggctcccctactttaaaccctttaaagggattggcttccaaaaggcaaagtattagatccttgggtagagagtgggactgggatgatagatgggggacaggatattgaatagttggggacttcaacattttactttcagcaattgatagaactagtagacagaagatcagcaaggatacagaagaactgaaaaatatcatcaaacaataggatcgaattgacatttataaaatacctcacccaacaagagtagaatttgcattctttttaagtacccacaaaacagtcaccaagatagactatatcctggatcataaaaccagctaaaatgttttaaaggattgaaattgtacagaatatattcctggagcataatgaaatcaaactagaaattgatagtggaaagacaatgggaatccatagatcagagaagaaaccttaaaggaaataaaaaatacaaccaaataaaaaggaaaaacaacaacaacataatcaatatttgtgagatgcagtgttgacaggaaatttataacaccaactatttatgtaaaaaagataaaagattttgaatcaataacctaagttctcattccaagaaactggaaaaaggagagcaaaacaagcccaaagcaaatcgaaggaatgaaataataaagaacagaaatcagtaacactgaaaactggaaaacaatacaaaaaagtaatgaaacaaaaaactagttattcaaaagaaattaataaaattgataaatctcaagcaagattgacaaagattataaaagagaaaatatacaaataaccaatatcaggcatgaaacagaggctatcacaacagatcctgtagctgttgaagggataataggggaatattatgaagaaatttatgctcagaaatgagaaacttagaagaaatagaccaattccttaaaaaccacaagttactgaaactcagccaagattaaatgggtaacataaattgttgtataactatttaaaaattaaatttgtaattaaataactactgaaaaaaatttccaggcctagatggaaggattttactggaggatctttatcaaatgttcaaggaagaattaataccaattttatacagtttcccacagaaaatagaagaggagggaacatcattcaactcattttgtgaggtgagtattaattactgttgttccaaaaccaggcaaacacaacagagaaaaagaaaactatagactaatatctctcagaaacttaaatgcaaaaatattcaaaatattcaacataattttagcaaatcaaatccagcaatgattaaaaacagtaatagactatgaccaagtgggatttattccaggtatacaaggttgattcaatatttaaaaatgaatcaacataatttaccatttcaacatcattgataatgtcacttggggcagaaaacaaatttaacacaattttattcctatttataacaaagactctcagtacattatgaatagatgagaacttcctcaagctcataaacagcatctagaaaaaatgcagctaacattgtatttaatgttgaagaactaaatgctttccctctgagactgggaacaaagcaagaatgtctgcactcactggtcttattaacatagtattagtacttctagccactggaacaaggcaagaaaaagaaagaaaaggcattcagattggaaaagaagagagaaaactgtatacacacacacacacacacacacacacacacacacaatgcaggtgtaagtggcaaaatctgaataagctctatgatttgtgttgtgtcaatttcctggttttgatattgcactgtagtacaatagttcagcaagatgttaacattggaatggtggcatgggggctaggtgaagggtgcccaagacctgcttgtacatttcttctattttcagataacgtaattgtgtatatagaaaagtccccccaaatctatgaaaaaacttctagaaataaatgagtttaacaacgttgaaggatacaagatcaacacacaaaactcaattgcattgctatatactaacaatgaactaaaatttaaaaaagctatttacaaatgctgcaaaaagagagacacttaggcacaaaatatgggcaagatctgtacgctgaaaatgacaaaatgccgatgaaagaaatgaaagacctaaatatttgcagacatgtcacagattagaagactcaacatagtaaagatgtcaattctctctaaattgatctataggtataatgtttttactattaaagcctgctaaaattcacatgaaaaaggagaggcactgtaatagccagaataaatttgagaaagaagaagaaagtgggagaaattattattttaatgttaaggtttattatatagttataataatcaaggcagtgtggtatttacagaaggatagacacatgaatcaatggaacagaatagggaactcacaaacaaatccacacaaatatacccagttaattgctgacaaaggagccgaagcaatttaatcgaggagaaatagccttttcagtaaatggtgctggggcaattggatatccacaggcaaaaaactggatgtcaaccaaaatctcacaccttgtgcaaaattgactcaaaatggatcatggatttaaatgtgaaaccctgaactatacaatttctagaaaaaaataagaggaaatccttgtgaactcagagtagacaaaaggtttatagacttgacaccaaaagcatagtccataaaataaaatattgataaattgaacctcattgaaatttaaaactttttgctttgcaaaagaccattttaagaggataaaaaggcaaattacagactgggaaaacctttgcaaatcatgtatctgacaaaggacttgtatctagaatatacaaagaactctcaaaattgaacattaaaaaaccaacaatctatttagaaaatgggaaaaagacatgaacagacatttttgaagaggatgtacagatgataagcacatgaaaaatgttcatcatcattaggcattagagaaatgcaattttaaaccacagtgagatacatctctcagatgtctaaaataaaaaatagtaataacttcaagtgctggccaagttgtggagaaatgcaatcattcatacattgttaatgggaatgtaagattatacaatcattctggaaaatagtttggcagtggcttaagaaattaaacatgcaactaccatgcaactcagcaattcttctccttgggcatttatcccagagaaaggaaacttatattcactcggaaacttgtatagtaatgttcatagcagctttattaatagccccaaatgggaaaccacacaaatgtccttcaatgggtggctggtaaaacaaactgtggtacattataccatagaattcaacttaaaaaggaaagagctattgacacatgcaacaacttggatgaatctcagggaaattatgctcaaggaaaaaagccatttgcaaaaggatacatactacataattccatttataaaacatttgcgaaataacataattatagagatggagtggttgccaagaattagagatatagtagggtcaggggggtgcagtagacatggatataaaggggtagcacaaaggagtcttgtggtgatgcaataattctgtatcttcattgcattggtggttatataaagctaccatgtgataaaattgcacagagctacacacacacacacacacacacacacacacacacacacacacagacagacacagacacatacaatgcaggtataactggtgaaatctgaatgagctctgtgatttgtgttgtgtcaatttcctggttttgatattgcactgtagtacaatagttcagcaagatgttaacattggaatggaggcatggggggctaggtgaagggtgtccaagacctgcttgtacatttctctacaacttcctgtgaatctataattatcttaaaataaaaaatcataagaaaatccaataatccttgaaggagtgacttctaagccctagatgggaaagtactgattcttgggtggagagtaaggctgtcatggtaggtaggggagataatattgaaaaaggagaagggagcagaagggtttcaaagaaaaatcacatttcccatttatttgggggccagggattgccaggatgttatactgaaatagttttggggttggggtgggtgggaacagagctttgaaaggcatagggcatgttttaaatttttatttatctaaagaactatttttttgaaaaactgaaaaatacaggagagtaaaatgaagaaaattaaagcctattcgtattcttagtacccagaatgatccattgttaacagatggcatcttcgtttgtaggcttctgtttttttttctgtttgcattttaaagaaaaatcactgttgttttttccagggaagttatattttacggtgagaagcaaggaaatgggctagagagatgggaggaaggaaagagataacaaaagccaaagagacttcttgcatcttcttactttgtttcttcacgtcgatcttttcttttctgcctgagcaagggaggctgaattacttgaagtgttgaagggctctttaactgcactcggtattcaaggggatgttttatggcaccacgacgatctggtttactgctaaggagcagatgcccatggcacaaaactcaggtaataactgagtttggaggctcaggaaagacagataattttgaatgaatgtagtatttagtaatgattaaccaccagaaagtcgggaaatcattcattatgagtatagtctgggaggttaatttttttctgttttctttctggctatttagatattttccacttcagtaactactttttaattccagctaagtgaatttggaattccaaacattcctggaaatataaacttttagtatctgaaaatcaagtaagagtgagtgttgtacattctttgtgcaacacacattccatctgcggctgggacatctctctgcttggaacaaaagttgtaagacgaaagtttgatctctaaccttttcatcctggcccttttggaagcagagttgctatctatccttaagatactgtaatttataaagcaaagaggtttaattgattcacagtccacatgactggggaggcctcacaatcatggtggaaggtgagcaaggagcaaagtcatgtcttacatggctgcaggtaagagagcatgtgcaggggaactcccctttataaaaccatcagatttcatgagacttattcactatcaggagaccagcatgggaaagacccatccccatgattcaattacctcccactgggtccctcccactacacctgggaataatgagctacaattcaagatgagatttgggtgtggacacagccaaaccatatcagataccaaaaagtgatcttggaaaaaatgatggaattctggaaaataaaatgtgtcttaatgaggaatgttagggagaactgtgcatatacagggaatttgaaagaccaaaggcacaaggttgccgatgtgaacttgacctggagggtcagacagagttctttcttgaagggagaagtgaattctttcttgaagaggcacatttccaggtttgtcactgactgtttgtccacaggagaacaaaggtcacctgttaatgccccaggcatgatgctagtttcagacgttgctcactctatgggaagagggagagagtagaatagacacattggatttgggaggtatatctgtggttgttgggatgggggtatttttgagtgcattgtgataaatctgagttccttccgatgaatgtcagagactttggggaaagagagcataatgaatggagagcaaattagaaattacagtactaggtgaaacttgagtcttgagaaaaagccaggctgtaaaagaccaggggaagagtgttctaggaagagggaacagtgtgtacaaagctcttgaggcaggaatgaactttgtgtgttcaaggaacagaaagaatgtcagtgtgctagagaacagtgagcaagggggataataacatacaattaattcaaagactgtagttgttcatactgtctacaacctagcaattttactcttaggtatttatctaagagagatgagtgaatatgcccatgaaaagacctgtacaaaaatgttcacatcattttatttataatacccccaagctggaaactacccaaatgtccattaacaatggaatgaaaaaattaatgtggtacattcatacgatggatactatctagtactgaaaaagactgaactcatgctgtatgcagtgatatggatgaatcccacgggtataatactaagaaaaaagagtcagacataaaagagtacatactgtgtaatttcatttatacgaagtccaaggacaggtaaaatactctatagtgatagaaagaatcatggtatctgtggggaggtattacctgggaaaggacaccagagagccttttggcatactaaaagtgttttatatcttggtctgggtggtggttatatgagtgtatacataaagataaaaattcagcacgccgtatacttaagacttgtgcattttaaaaatgtatgttattcttcaattaaaaaaagtagaaaacatttaagtcattggttaggcagacaccagactatgtaggaccttgtaagccatggcaagaatttgggatttcactctaagtacaatgggaattcattggacggtttcagcagggtaggaatgtgtggctggattgcatttttaaaagatactctgctgccatgtcaggagtgatagcatgaagaaaagttagagacctttgtgaagttcaggcaagagaggatgacattgtgaactagcatttcagcactagaaatggaaagaagtagacagatttgagatttaatttaaaggtagagctgacagacccactgctggattgtgggtagacagaggtgctgagtccaatgtgacgcgatgctggcagcaatggaaggagtctgctggtgaggagcacagactgttgcttggctcccagcacctgctgtcctgggaagcacatggcatccctggtaatgaggactgtacagcatttctctgacttccttacagctaggtacgagcatgtgactaaattcttgtttgatcatgcctttaaaggataagggcatggctgtcccttcctggtggctggaatgctgctccatgataatgagccatctgcaataggtggacaaggaagacaccttagggatgacgatgcagcaacatagaaggagcctggacccttgactttacagagctgagctctcaaacaagcttagacttttatgtgagcaagaaataaacctcggctaagccactacaattttgggtttcttttgcatgcagccaaacccacggcagatcaagcattctccccaggcctataagacattgaagtctttcagcagttggataggtgagtcagagcccaagaatgggggtggagatggaaatctgagaatcattagcatgtggcacctaaagttcacctacttatctacctgcttctacaaacttgacttattgcctagccttagctattggtgccagcatttgtatcaaactcattgctctcaggtctcaggcccttgaggtccactgtaaaaacagcttgtgaagagcttctaggtccccatgttcctctctcctgtactgaatgccctgtgctctactgccagctggtcacactcatgttggctcttaactatgaacagctttgagttgttgtggaattgttctaagtacctatgcctgtctccacctagtggagaactagtcccgagaggcaggggggcattttttgctttattgtgttccttctgcagacaccacactatgcctgtaggcacagctcaagaaacatccctaattatgaaacagatcttaaaaagtgcttgcagatagatgaaaatattttcaaggaatctagactagggagcatcaaaatgatttctctgctcaacctaccaacgctaacctcaggagaggttagtggaagcgtatttgctggagtgcacttagagttagagctattaagggcatagatgaatacggtaatggggttatggattgatgtgtgtgcaggcctgcacatgggtgtgcacatgggtgtgctgggaaagaagggcaaaacattaaaatgtgtggtatgaatgtcagttgccttcagagagacaaatgcaacccacccatttctcctcacgggggacactcactgatggggagcaaggatgcatttagttaggaatcccagtgtatggcataatttcatcttggagaagctgattgggttggggtatctgtacaaccaaccaacagcatgcctagcatccagcacccaagaaaaccaccttggagggaaggaagtcactagaaaaacatgtgctctcaaaatgtttccgactgtaagtccagttgaaaacatttcatcttattggttctattgcccctgggtttcagcttgtctcttttcatgtgccaggccctttgctcagactcaacaaccctcgaaattctaagagagagagaaatagctacaaaacattggattctagcctgaacttctgaatagagaacagagggaataaatttcagaacaagtatatctctctgagatagagacacttgatgttctcccagatatttatgttttttatactttctatgttttctttcttttctcttccctccctccttccttccttccttctttcccttcccctttttccctttccccttttccccttcccttcccttcccttcccttcccttcccttcccttccccctcccctccccttccctcccctcccctcccctcccatccccttttcttttcttttcttttcttttcttttcttttcttttcttttcttttcttttcttttcttttcttttctcttttcttttcttctttttcagagcctcaccctgtcacccaggctggagagcagtggtggagtttcggctcactgcaacctctgcctcccaggttcaagctattcttgtgtctcagcctcccgaatagctggcattacaggtgtgcaccaccacgcctggctaatttttgtatttttagtagagacagcgttttgccatattgaccaggctggtctcaaactcctaacctcatgtgatccgccttccttgactttctatgttttcttgaataatagcttggcctctcttaacaggcaaggaaacaatgttttcgtgtaatagagcaaacagggaatctgggggaataatgtgggaggaagagccgatggaacacgcatggaagctgtgtccccattctgcattgtcacagttggcagtgtgacttgagccagataataacaatagtgactatactatttttctagaacttccataataaaattccagatggcttaaacagcagaaatttattttctcacagttctggaggctgcaagtccaagatcaaggtgttggcagatttggtttctcctgaagcatttctccttggcttgtctttttgctgtgtcctcacatggccttttctctgtgcaccagcttccctggtgtctcctgctcttcttgcaaggacaccagtcattttggattggggctctacccttaggacttcacttaacctcagttacctctttaaaggccctatctctaaatacagtcacattctgaggtatactcggggctaggactttaacatatgaattttgggggacacaattcagtccataatgttgatagtaataataataatgttaatagaaggctgctggaaatcccaagacataaaaatgataactaataactaataactagtaataataatataatgacagaaggcttcatttattgagttcttacttagctcagacactattataattgctgtctatgaattttctcacttaattctgaaagcaacctgtgaaatagttactattattatctttcacaggagcacaaaagctgtctgaagaaacacatccagtgaattatagggttaggattttgactccagagtctcaggtcttatctcctaagctatactaactccaaacatctgggggcttcatgttatctgtgtgtacaatggaatagatattgcttagaatctttttcagttctaacattcaaggctttatttgactacatttttcttgtttattgaacatgctacttggaaggaaggcccagtttttggtgtttcggaagatgatgaagcaggactggttttgttctaaattttcaaggactcgccctttgcttggtctcttgcattattgcttatgatcaaatcacctgcttggatcctggtctgtgtttgggtgtgatattccccttgcctgagttttgttttgtttccttgtactcaccatatacgatggtttctaagggattcgagttctgtgttgctttcagcagagtttccaggaacaggggacctgcccttgcacccaagtccctagtcctagttccagggtctctgttgccacctgtgtgcctgtgcctctaccattcacttgccttaggctccagaaccccactttctcagatggggtactagttggtgacctgctttgctccaggaagcctatgcaatgcctgacccccatttctcctggcctgagcccttcttggcagctgtattgccccttcctgaggcttgtaagaaatgagaaagagaaacttggtaagatggggaccaaatacttggctttaaacccacaataccctgggtcatgaaaataatggtattataatctaactttcagcttgttgcaggattacatttcaggaggtgtcccagttgcctgccagttaccatttttatgtcttgggatttccagcagccttcaagtacatgctggcatttcagattcacttggtgcaattaaagaaattgcatgactgctagtttctcctcttttttttctcccctcaagataaattgtagaattcaacttgattaaaacatttattaagtgagatttaatagattccagtaatgctctgtgtgtgtgtgtgtgtgtgtgtgtgtgtgtgtgtgccctcattatccatttcttccacatgtgccaagaatggccatgtgcatagagaattgttcatggaacttgctttattctgcaatttaccagcaatgtcaaattacggggtttaatggattcctgcacaaaaattcctagtgtggttgtattagcagcacgtttcattaaaaagggctatttttctctaccgggatttcagtaaagagacaatgtttattttttcagtggaaaattgattgtaactaagaggatacttggcttgaaagtggggaattatcatatcatatgattaaatgaaagcttaccttgttataaggtaactagacatatcccagtagaattgagacaatgtttgattaagccagattttcctactttatattcaaggaacaaattaaagaataattgagatccttttcagatcttttatgagctgcatatataaagcttcagctccaggtggcaaagcaattagctgatgaataaaatcaaccccactgtcatttgtcagatgtttaaattctataaaccagataaattaatgtgttccttaagccaaataaacggtcatgctctccatgttaccactcaattcccttggggaaaggttggatgcatgctcatggagaggctagaatctacttaatcagaaaggttgaaattaagttgcccatttgattttctgaaataatgtccatctggcacaaaatgtattttccaggcaaagttgttagacatggtggtttggtttgtttagtaaactaaggataaagctggactcagtgctgcatgctgctggcttcattgaagatcttttcatttccttgtacttggcattgaagttatttataagcaactgaaagtgctctggtttcatttattccttgctcctgcatattaatacagagaattagaatttctgttgcctttctgcttccagatttatttctctgaggtgagtttcctggacaagtacaacatactgccattgcatgttgacatgagcttttctgacgttgacatctagataaggtagacttaagtctcagaggacattatttaattagctggtgactaagttttgttggctggttctgccctgctattttcattataagcattgcttttaggggctgttgactgggcttttactcctagccacctgctttggtttgcgtggctttgatattttggtcactgtgaatggtcctttagagtctttctactcaaaatgtggtactgtgacaagcagcattagaatcacctgggagctaattggaaatgcagaatctctgctccactctgacctatttaatgattgcatgcattttgtcagtgatatggtttggctctgtccccacccaaatatcaccttaaactgtaattcccataatccctatgggtcaagagccagaccaggtggaggtaattgaatcatgggggtggtttcctccatgctgttcttgcgataatgagtgagtctcgtgagatctgatggttttataagcgtctggcatttcccctacttgcactcattctctctcctgccgcactgggaagaggtgctttctgccatgattgtaagtttcctgaggcctccgcagccatgtggaactgtgagtcaattaaacctcttttctttataaattacccagtctcaggcatttcttaatagcagcatgagaacagactaatgcagtcacattcatataataatcaagtttgagaagcactgtgttagactttgactgtggctagggttggagttatgaagtaaaagcatgtagccagtgggaatatccactttgtagattttctaaacctcaagccatcttttctttttcatattttattcccgttagccactagcactttaaaaaaggataacaaaaaagagctagaactcattcattataatattgattattggagcacagcattctttaggaactgtaacaaaaattggcaattatttatagaaattgaatttagatcttgaggtcattatcaagatgactctaggtgaattttcatgttgaactgccagcttgctatctattaagtgcaaactattggtctccttgtggcatagtagagagacaactggattgaatactcaagcaccaactcatcatctgatgacgggcaagcagtttcactttgagcttgattcccctgtttgttaaatgaggaatttggaagcagatgattctagggtctcctcaagagctgaatgtttataatttgatgtgactatgtggaagtctgagcaagacattctgaatacatcgactcacagctattccagtgtctggaaaccaaccccacacataggttctcctgatgctgtttgactagtatcatccctagtattcattttacagcagtttggaaattagctcatcacatgagttcccagggatcaagaagctgatctttgggtgtgatgcaggcatgtgcatgaatgcacatttgttgcctatagtctaagtttttattcatgctacacagggactggagagaatgaagcagcagcataaataggttttaatgtaaggaagaatatgaaactcatgaatagcagaatgaagcaaaactcaacacactctttgctataaatgaatatttgaaatttttccaacccctggtgtgttgtatgctgttattgtttttttttttttttaaaccacaatctgtcttttatttctttctttttcttcctcagtgtgttttattctggttttcatttgaaggttcactttgggttgtatgtgtgtactgaaaatgttaaggtgattattttttgatgcaaataggcatggtttcaagatttaaagaagtgctactgagagaagtcaggcagttaaagaaaagccttttctgttctcttatatttggaaagcaatcctgttcaagggctgtgtggggaagagatgacctgggaagcaccttctccttgggcaaatgatttgctcactaattccttcaaagtttcctttcctattttcttctttcttaacacaaaactggatttattacctacaataggttcaaaactagagatgcagagaggaaaaaagatatcatcccagcccttaaaggctcagatctagccaaggaatgtgtagtctataatttctgtctccactgatagctctcactccaaatgttattgtaatgtgagcatataagaaaagtcataatggttatttgagagcaatttcattttctggttacacagtgtttactcaaattcttgtagggatgtgtgtgtgcaggagcatgtgtgttgagggctttgagtaacagcttaagtgatattaataaagcagatttcccgtctctgaaggaaggcaaattctcaaggcaaagtatgacatattctggtaagtgagtttatgtctaaaattgaatatgttatatatccagggatcttttagggatcttcctgggaaacttctggctcttaaagtcgatctttgtagtttctctgtgttgtaatttggggtggcaaattttctcttgtcaaattttgcaggcataaggctgtgctttgtggatacaaaagtgtgccaattctaaggaagtagttctcaagccttggtggggaaaaaaatcacccagggaacttattcacaattcagatgagccccctggctgcttcttcacaccccaaattctgacatggtaggtaggagatgggacccaggaacctgcatttagaaaagcttccctcaagtgtttctgatttagcagggcagaagacacactttgagaacactggcatggaatttcttcatttgaatcacagctaggcataagcctgtatatgatatactttaaaaagcattttaaagttcttttttaaaaaaaatttatttatttattattattatactttaagttctagggtacatgtacgcaaagtgcaggtttgttacatatgtgtacatgtgccatgttggtgtgctgcacccattaactcgtcatttacattaggtgtatctcctaatgctatccctccgcccgccccccacctcacgacaggccccagtgtgtgatgttccccttcttgtgtccaagtgttctcattgttcaattcccacatatgagtgagaataaaagcattttaaaattcttgattgaaagaatgttatgcaaatttattcatttcacaatctgacaaatgaatagaagacccatgaggctatcttacataatgttcaagaatttaggctctgctgtcacgcattttatttcccattcctgtgcttgctggaagcatggccttgggtaagtcacttaacctctctaagcctcagtttcctcagctgtaaaatcaggataataacaacaatctaatcaggctgttgtgaggattaaatgaaataatttatatcaaatgcttagcgcaggacctgacacagagtaagtgctcaataaactttggctgacactgctattagtttgtaataggaataaaaaattatagtaaataagagtgtatcctttcattgcacaactttcttcttaggtaactgtgagcactttacagagtcccaagttaatcagcacagaatccctaggaaacagtccaggattctgtagttactttacactgtcccctttgaactgcttatgccatttttgtgttaagtccggttggtagtggctttgcttcattgattagatgtataagcctcttccacgcctcagcacatagactgattttactcagaaatgagtccaggaaagtgcatcttcctcttcccaggagtgcacacattttcttttgatgtgattgtcatttacttgataaactgtcatttacttgataatcctctccaacaagatgatctcttgctggaaagcattaatgcaattaacagtcatggttaggagaccatggctggcatggtctcaggtcaataactgcagagaacagacgattcttggaacggtggtgcctcctctggagacacttagcgtttcgattttgtttaggtgtccatatgctcatataattctccgggaagtgcatctaggtttcacttcaacctaaagcttgagatttgcctgatttaacatggtgtgtttcccaatgctttgcaaaatcctagcacagtctgggcttttggttttcttattgattgaaatgctaaagtattatcagaatcataagagataaacagacttattgttacttctctctcacactaagctctcctgcagtggcccacaaactgcgcatactggaatcacctggagaactctgctcaaaccctaaggttctgattcaattggtcagggggttcactttgagaatgggactttgaaagtctcctcaggtgattctaaaactcagccaagattgagaacttctgctttacagggtgatttcacacgctctcatctttggatttttttatatacattgttgtcttgtctgatacgtcaaactcatccctccaacctcttctgcataatttgtgaattttcacaaatagaacttcagaataacccttgagtagtggttctcaactaggggtgattttgccccttcaaggacatttggcagagtctggagacatttttgattgcaccagccaggggtgtgctactggcatctagtgggtaggggccatggatgccgctaaatatcctacaacatataggataacccctacaacaaggaagcattctaccgcaaatgtcaatagcactgaggttgagaagcactgccttagcttagccactctcattttacaagtgggaaaatgtggtccggagatgatagcttgatttgctcaaggattcatgtgtaattatcagcagaataaaatttctaacaattgtaacattatagtggaaccctgcccttattctccaactctctcccttttaacctactgccctagggacattagttattcttcttgtttcctttccctcctcaaatatccctaggctctcaacagtagttatttgttttctgtattttagtatttcaaatttcttgactaaaaaacagaagccaagtctacttaagctaaattgcatagcctaataagcatcacttttctttgctctaggatggcattgttgcaacttgttgctaggcctggtttgttttgtgctgatcagcacctctgattggaagttatataaatctttggttaatttaaaaaatgggcaaatgaggtaagtgttacttcataaatctagtttggcgagcaaaatgtttctaatttaaggacccacaaaatgaaattataaaggggcttcttggcgatgaaaagaacgtctccccaggccttctctagtgcagtgtgtgtgtgtgtgtgtgtgtgtgtgtgtgtgtctgtgtgtctgtgtgtccaagcccccagctgcttggacagagtttaggaaggtgatggagattttgaattaaagacctgtgagtccacctttcttcatttatatgttccctgaatacctctcatcttaaccccaggaaagtaattaactggttatttctggaaggtaggatttgggatcatgcatggctaaaatgtattttttttaacttcttctctctgtttttttttcctgtgcacacattttttttaataaaatgaagccatttaatcaaataatataattttattctcaacattccgtgcaccataatctcttgggagcttaacaaatcgcttgggtaccatctccagagactctgattgagttggcttgggggtggggtgggggcgtggggatgggtagcgtttagtgacttcccagctgattcttatgtgtggctagaattaaaaactcctgtctcagagagcagttctcaaacttgtctgcatattgcaatgtcccgaagaacttcagaacacctgtgcctgggaccaccatagaggttctgatttaattggtctgggggtgctgactgggttttgggtgtgttaagatttccccaggtgattctgaaatggaagggctgggtagtatctctgaagagttttttgggggagttcttaatgttgctgtcttactaaggaggtgtaccaacctgcccctgctttctgttaaatgagagttaataaggtgggattgctctaaaccttgagcacaactgatcataatgctagaaacaatagtccctcctcctcagggtgaaataacaatgttacagggacaccaattatgaagataggttgtgtttttaattgttgagaaaatgatgagcttgaaggagattttgcttattaagactgctttacctttataaatgactgtaagtagattcatcaagaattgggagctgccttgagctacaaacaagcctatgcaataggtactaatagttgtttttagcctccagttatttttgtcttttctttttgcctttttaaaaagagggtgggagtgaagagggctccctatacttctgtcttaacagactgtcactatgatgatgtccaagttgaattctgaattttctttggttagactagccctgtagctttttagaattatttaaaagggctgccttctttgttacaacaaaaagtcttcttggaggtgtgagcggttgagctcccccagtgtggtgggtgctaggaagggcctctggggcgaggtctgcaggtgggctctttagcagtgaggctgcagcgagacaggaccctgggtctggagagctttccagctccagccaagtctggcttcctacttctccacagaagccacttgggagcagtgtggccttgcctatgagggaggctcagggaaccttcctggaactgaccggcacagccagggagcctggagcccctgcctgatgacaagtgaaatatttcacagaatataaatctttcctcttgcaaatgctcctttggtgagaaatcagacagcaggtaagaattgggcagaatccttgtcccagcaaataaaatgaaaggatagagcctcccatctttgttctgtgatatgatagtatgaagtttgtggaaaagaagatttcctgcttatgatgggtccattgatcataacaggctcctgaatgggagacaatggtatctccctttatctcactgacaatagaaagaggtgcggggagagggggaaggacagagaaagagagagagagagagagaggctcccatcagcctgatgtgatgatatttcaccctgtgactgtttccaggttgtaagctcttctgacaaaagtcaaacagaagaacaaatgactaaggccttttcagtctagttcttgtaagcaactgtatgaactttgcaatgttatgcttgttctaggtctttgaattagaccctttaccatgcacacttctcacatcaaagaagaccatatataaagtagtattttgcagtattattatgacatgtctgtgactgtgtgattagcattgtatccacatttttggccctctttactttttcaggcttttaagatttacttagaaagggagagaagaaaggatatacagggagctgggggtaaaagtcaagggagcagttgggaagagacacaggaaagggagaagaatgagatgactagaggattctcctccaatttgccaaggtcatagggaagcaggagttgaagtgtaagccttgtaacttgattttttggctagctgtgaactacctctcaggtaacacccttttccaggtattatctaatgccaacatttgctcaatttcattgcagtcatcaatcctttgctgagaataaacccaactttggaaggagagtaggaggagttgtcagatgggagaacaaacagatcccactggaagcttcagcttctccctaaaagcaggagtagataaggacccctcactgccatttttactgtcctgcatctgaggtggatttccagagtttctgagatgcatccagatcctgacaattcgaggctcatggccagattggacccagcacacaagcttgcctatctcctctgctgtcccttcctctgaagattagaaccagccagtgccaggtgtgccaaccaagatgtgtcctttcttggtgctcttgggagcttcttacaccccaggctagagggtgcccctttggtcctaggggtgatctggtatctctcttgcttttgggattctgaggggtcctgacctctctggggcaaaatggagatttctaatcatgtgctatctgaatttaacctaaaagtcagtaagccaccaccccagctgtttcttcaatgaatccctagggagacatggaagcaaacaaatttgggctccataactttgactaataaaggtcaaaagtcaactgaaaccagacttacaagaaagtgcttcatcataggggtgagattcaggacttccatgacaaactgttaggggctctacaaaaaccatgaaacaagagcttgtcctgggaacacaggttatacataaataacccattatatattatgaaacagaaagttcttcaggtaaacagacggaagccagtacggttggcacagtgtctttgtccatcgcttggtatggcaggatttatagcgattccatccttgagcatggagtgataatggagcccatgataaatatgcaaggcacagtgctaagtgccttaggtatattttcccatttaatcctcgtaacaaccttatgaagtaggtactattacaactctattatgcagaaaacactttgctcagagaggttaagtcatgtgtgcaggcttggctggatggaaggtggaggagcctccagagctcatattcttactgttctcccctttagaggttctttgctactactgtgggggtggaggggatgttccaaggtgttgagcctcatggattttcctactacaggttaatggatgtgagaataaaatcctccctttcatttagattaactgtgccaacaaattaattgggagaccacgaggctgagagactccaactcttaaaatgtgctaggtgaaatgaacaactccttcttgacttcactgtagttgctttaaatagcaatgttgaatcttcacgtgggactttgagtcatggctttggaccaacttcctcttgaaagtaagttgagaaatctacaattcctagatagatgaacaaactaaatatcccctgtactctgacaaacaaacaatcatttacaaaaccaacaaaactgcagtagggttttctcattttgtaggggaatattttaaggactgtttctctacttaccttgaaaattatgggcatgttcacctgggatttgggcaacaaggtcctcagcggcaccatcgctgaatgaccagacttgatggcagggcagtttgaaaggtgatgcaggaaacagcacagtagcgtggaaaatctggctctggctgtgacaccaatccatcccatgacttgaactagcccccatcaccttccctcagcttgcttcactggcttgggatgggaagaagaacacctgccctcccaccttgctgatcataggcgttcctggagaacatgtcaaataatgaaggtccacatgcaacttgtatattgtgtgactcattttgctcattgtaaatacttgactcacactttctagatgccaggtactgtgctttattttaactcatttaattcttacaacagtcccacaaggagagattacttttatctggattttgcagatgagaagatgaaggcacataggaagcaatttgctcagggtcacttacaaatagcacattgtgtgatattgtaatacaatgagaaatatatttttagtctttgtctctagttcctgaaagagagctcctgaaactcttgtgctttcctgagtgataggggtgaaaggagcatcttttgttattcatgataagccattttcaaacatacctgagttatataatgctaataatgctaataaggtaactcttggtgagcctcaagataatctcggaatgggggctggttgctagaggaaccaatcacttgattagagaattggaattttcagtccctcaccctgacttctggagagggagagggatggagattgaattcaatcaccaatggccaatgatttaatcaaccatgcctgtgtcatggaacacaggaaacctaaacaacataaaaatccttaacaacagggtttggtgagcttctggattggtgaacacattgaggtggtagaaggctagagttcaggagatgacatgggaagacatggaagctttgtgtcccttcccatataccttgctctctgcatctcttccatttggctcctcctgagttgtatccttttgtaaaaaaccagtattagtcactaaactgctttcctgaatcctatgagctgttctttcaatttatcaaacctgagaagggttcaaaaaaacccccagcttatagctggttggtcagaagtatgggaagcttgggacttgtgattagcatctgatatgggggctgtcttatgggactgaggccttgtgggatctgatgctaactccacatagatagcattagaaaatggaattaaattgtaggattgaattaaattgtagttggtgtctggggagttgaaaattagttgttggtgtggaaaaacccacacacttggcgtcagaagtgttgtgagtataaacagattgtagtaacatggtacagccagactaaaacccaggctgtctgaacacagtatgtttctaataactgctgtagtcctctatctgacctccttcaaagtgtattcagttttgacgtatcttttttcttccggtggtagtgagggttctaatatttctgaataaagaggtaatatgtttgtgcagcctgaaggaggccagaactacagcttaactgttgtgagaccctgtggacttcagatttcagaatcttgccttgtggaagatcatggttcagtttgaggactctgatgtttttattttattaggtattccaaatgcactactgtttttttcccctagagaatattaaattgtgtccatattgtatttttataaattgtaaaattacttctgtagccacatcattcatttatatcattaatatgtgacttacagttgagttagtgcctccttgacaacagtgattattggcgtgcctctcaacatccagcagaatgtgggaatgtaagttactcagcacaaatcttttgattttatttgtttttattaatttaaaaaattacaacaacctgcgttcagtgtggaacaaataaaataatgccaaaatgccaacaaaaagaaagataaaacctcctataatcacaccactctgtgatagttatataaaagcaatatctgtagagttttgtttataaaaggctgtgattcaagaattttatacccagccaggttgtcttttatgtgtgaaagtgacagaaatatattctctgtagaccacgtttcaaaaaaattatatgataggcaattttcctgggcaagatttaacatgaatctctgttgaaaaaatgcttgaagataaattccaggtgaccaaggatgatagatgctagagtgaaggattaaaataggaaagctagagtataaaaaaggttgggagtaaacactgaagccagttaatgtatatttatttatatatctagataattataaatattagagactatatataaatgctttaatttctctttattaaaataaaagcaaatataaaaatatcacctagaagataatatagtacaataataattatgtggtaatctgaatctatacctccagctagcatcatcaaaatctaagatggaagctctgggaatgggtagggtgaaggaatgggtggaaacagtatgagtggaaatgagggctgggatggatttcaaggcatctgacttggactactaatcatttgaaactggggtttgtttatgccctgaaaatgaaatgttattagtcaagtgaggatgattattattttaggtaatgctattccttaaaatatttagctaagtgacttcatggcttttaggcaattacataatttctgcattttgtttgtttttgagcctggttgtctctgagttcctgttttggtgctaatcttcagtgtgtgtttctgaaagtaaccatgatgacaggaagcatatttttctgtatgcctatgactggtgtctgactaccctactggtactagagattaaaagacactttcctgtaattaatattttcccctgtgttttgtctgaaagtcgttaagttgaagctggaattatagatgtgtgtacatctctctttaaggaaacacacaaaacaaatgggaatttaccaaatgatatcattctccactgactggatttatatatgacacttcttgaatgtacttttctcataatgtgggggcacacctgcattggaaatagcttctttgagaaatgttagatgttgcaatttggtaatatcttaagtgtgaatttgtgtgtgtgtgtgggggcaggggggaagggaggataaggaaggattcacagtgttcagaagaggactgatgaggctccctccatgagcaggctagtagcgcaaagcctaatcaacacttctgtgaggaagttagcagccttccttctgacctgactgcttccgcttctggtggtggcagcgctgtcaagcctcattactggaaagttcatcttgttaaatttccacttagagcaggggatgtgttagaagatagctcagactctgtggccattatgacatcaaactcagacagtgacattccaagtggtagtcaaggagttttgtttctagcttcattgaaaaatgtgaacattggctgggcacggtggctcacacctgtaatcccagcactttgggaggccgaggtggctggatcatttgaggtcaggagtttgagaccagcctggccaacatggtaaaaccctgtttccactaaaaataacaaaaacaatttagctgggcatggtggtacatgcctgtatcccagctacttgggaggctgaggcaggagaattgcttgaacctggaaggtggaggttgaagtgagctgagatcgcaccactgtactccagcctgggcagtggagtgagacttcttctcaaaaaaagaaagaaaaaaaaaagaaatgtgaacattaataaacaacttaagaagtcactgtatctgcatactactggattagatttaacagacgcaatcttggctgaataatgaaaggagtttggcatgagttccagtgtcaaagcagaagtaaaagcaaaaccagtgatgggcataggcttgaaatataatatattaatacactcaccaggtagtgctgcattaataaataaactcagaaatcttagggagtgaaggcaacaaaggcttatttcttgcttgcataaagtcctatatgggttaggcgattctctgggcagcactccctctgtcttgttatgctgccatctcaacaggtggcctccagggttgccaaggcaaaggactagaggtcacttccttatgctgtggcccaggagaaactcatatgacttctgcatacatttcactggctatgactagtcacatagtcatacctaactgcaagagacctggggagtggagacttcctgagtgacaggaggagagaagggtataggtgagcactagaagcctttaccacacataggaagcgagtgtgtatggtcagcatggaatcgggaatggccagagtctgatgttattaatattcagcatgagattaatttatattgaacctaataatatcttaatacatttgtaaaaataaatcagcctctttggttaccttccttggccactggccatgccttagtaggattatctactattaacatccgggttccttattccagtctggcccatctgcctaacgtcctggcatcctccctgccttgcaagggtcatccctcactctgtttgtgaaacccatagctgcatggcacaggcggtaagggtgtggtgagaccttaccagggcatgcttctcaacaccaggaagtacttttctgatgtcattgttctagacatgctgacacaggccctacataagcagagagggcccccaccttcctctctggtgaacgtctattgcttctctgtatagtgttgttggttgaaagagtggttttaggagatagactgtctaggtccaaatctcgtctctgtcattagcaaagaatgagaccctgagcaagggacttaacttcactatgcctcagtttcctcatctgtggatataataataacaccttcctgttagagttgttgtgatgattaagtgagttaatacatgaaaagtgcttagaatagtgcctggtgagtggaaagtgattaaaaaacatcagctatgatcactctacttcaagactcagttcaaatgtaactgaaacttccctaaacttgcttcttttctgggtgccttcagcactcagcaaatgtctctgttataacatttatcatggtatataataattgttaatttacccattcttctctctcgttagactgtgattactcaagggcaatgtactgctcaccatttactctagtccttgacagagtgtctgacatagaaaatacattaccaaatgttttctgaattgatgggcagagccagggtggtagaaattgctacaattcaccaatatacagttcttttgtccttcctgtgcacaaagcaaagctatgtttcccagctccctatgcatctagatgaaccacataactgagttctggaatgtgagcagaaatgatgtgtgccacttttcaggcttgtcataaactcaatgcacaaccttccatgagctccttctctccctttcattcaattggctggatatggtagcattttaagatagaacgagcccaaatctctgagtcaccgcttggaagagagggacctagactttaaaattgtgtcaagcttttgaaatctgaacctgtttgttatagcagtgagtgtatttacctggctaataaaacaagaatctggacacaacatttttttctgcaggtttcatggcatgatatggctcaatccacagacaaaggctgctgagcccagaacagcttattggacgagcccctatgagaagcagaaatgtatagaagcaaactgaacccaaggaaagattggtgatactttgggagggatgacagaggaaggggaaacacactgtccatccctgtcccagcaaggagccagctcccattcggcagtccctctgaacatctaggtagcttcccccttctttctgtccagttgtgagcagccaccaactatgatgcccctcttccagcaggctttgctttcacatcacaaagcatcatcctgagaaacaattacagttctttttagagttctggttccttcataggtacctattgtcctaataaatggaattccttggaacacaaaagcatttatttcctcttttagctaatttaatttttacagctctggtgaaaaaatattttatgtttttactcaatgtgattttaagatagcttattcttggattcaattttgttttcattttctagaaaatcaatttaattcacagaaggttcattcatttagtggctttccttgcacatggttaatgcttaagcatttgatcaagcattcctcttagcaatatctttacaaggttcaaccggagaaggtgttagatgggggaaatcctctacatttgggcaaagcctctttcctctggactaattgaaatggaaaatcagtctgaattggtgaaattgaattgcaaactatttttcaaggagattcctgtgtgatttcaagttgctcaaactaaacttagaaaagggcacactaacaaagctttttaagttatctccatctagcttcctagtgaagaggctacattgtctgggtaaatacctggggttcgtcatctcatgccaagaaaatttaggacacggacccacatgaggagtttaggaacggagatttaataggcgaaagaaaaggaaaggaaaacagctcgctctctagagtgacagagaggagacttctgagaggaaaaggccagctggcggcagatgagccaggttttatagtccggcttgaggaggcgtcgtctgatttatgtggggctcacacattggttcaatcaggtgtgacgtttacaaagcatgtgggtaaggctggtcaccccaccctaatcttactatgcaaatgaacattccccttggctggcggcttcattttgtctgctccttaatgtacacgtggctggccaagaagggaagatggagccgccattttctagctgccatgtctagtcccaggtagttctttcctgccggcattcaccgtgaaagctcccagcgtgcttgtctatgtctgcagctcaacttcacaggctgctctttgttagaaaatgatttggggcagcttttcattaaaagaaaaacgttaccaaggacttctggactatctgcctaagtaatttcttcttaactcctgtatcactagtagttagaatctatatttgtacctatatatatcttacaaaattctcttgggttcttgaaaactctttgctctcaagtcctttaaacattcctcttgtactttcgtttactaaattatgaagaaagactattagcaaaaggaagtccctgtctgtataattgtaatttgtgaattataggcttttttatttaaagtcgggtgacaattcatgcttggaaagaaatttgttgactaattgatcatgagtttttttttttttttttgagacagggtctcactctgccgcccaggctggagtgcagccgtgcgatctcagctcactgcagcctctgcctcctgggttcaagcaattctcccgccttagcctcctgagtagctgggactataggcgcacaccaccatgcctgtctaagttttgtattttttggtagagacggggttttgccatgttggccaggctggtatcaaactcctgacctcaagtgatcctcccgcctcagcctcccaaagtgctgggattacaggcgtgagccagtgcgtctggcctagtcgatcatgtttttagtgttataactaagggatttttggattgaatgataggtgtttttgatttgttggtgtggctttggaaaggaacactggcacttctgaagatatcagttcttccctggaaagcgaagtcagagatatctataaggcaaaacttgtgcttttcagtgtcagacattgctcctttatgtttagggcactgcttgtgctatagcacagaggaggcatattgtggaatgacatgtttctctgaagtgaactttaaagttcaatgaatagattttacttacacataggaaagtatatggtggtcatgtaaaatggaaatatgccactcttgatgttttcttctttgtgttacagatctatgccttgataggtcttcagttactcatggtgaaacatgtaagccttgaaaaactttttggtgagctcataggttatctataagatggtttatggccatctgtcttatagggtaacaacataatttatcctccaagtttggacacttttgagagtaaaaaggggagttattaatcattatgtcaaggaaataagcaaaaatgggacttttctaagcaacttagacatatggtcattctacttatgagaaatatgtgtcttttataggttagatattaggtcccataagagcatgtggccaagatggccagctccaccaaagattcatacttccccttccatagtatggagttgtgctgggaagcagttttcccaccagggacaacatcttctagtccttttacatctaagtagtaccatgagactggatcatgccaaagaaatgttttggaagtgagatgtttcactttggaaccaaggaactgaaaaaacaggtatgcctccaccttcctcaccttcccctccactcatctctatctccatctgtaggctgaatgtagacgtctccaggaccctaatggagggaagacctacaagatagaatgattccgggtcccaaatgaccatgtgaaaggctgcccgctggtcagaaacatccatattgcagtctttagggcacacaaaattaaaatatattaagcctcttaggttgtcacatttgttatagcagctaacattaccatagctaatactgaatactttaattcaatacatccaaccactactgagaatctactatctttccattgggaatacaaagacatgtaagatctggtcactgtcctcaagaagcttagagtctgggggaagtacagatgtatatatgttatggtaattaaaagttctgaataaaaggagatgaattttgaatgctgatttgtctgcagcatattcaaatggcactgtcttctatgtagatagagggagcccaagccaagaagagaggtctggtatcaaagatttgctgaattcacaattgaagaggcttatgtcagtcccttagaaagaatttgaggactcctcggaaagtaagaaaacttccctccacattcctaaggattttttatttatttttatttaaaaatgttttttcttactttatttttttttaaacttttaagtttggggtacatgtgcaggttcgttacataggtaaacctgtgtcatggggtttgttgtgcagattattttatcacccaggtattaagcctagtacccattagttatttctcctgatcctcttccttctcccaccctccaccctccgataggccccagtgtgtgttgtttccctctatgtgtacatgtgttctcatcatttatttagttcccacttataagtgaaaacatgcggtatttggttttctgttcctgtgttagtttgctaaggataatcgcctccagctccatccatgtcctgcaaaaaaaacatgatctcattctttttaatggctgcctggtattctgtggtgtgtgtttaccacatttttaatggctgcctagtattctgtggtgtgcgtttaccacattttctttatccagtctatcactgatgggcatttaggttgattccatgtctttgcgattgtgaatagtgctgcgatgaacatgtgggcatgtgtctttatggtagaatgatttatattcctttgagtgtatacccagtaatgggattgctaggttgaatggcatttctgtctttaggtctttgaggaattgccatactgtctcccaaatagttgaactaatttacactcctactactacgggacataaacattcctttttctccacaaccacaccaatgtctgtgtttttaaatttttttttttaataatagctattctgactggtgttagatgggatctcattatggttttgatttgcatttctcaaatgataattgctgttgagctttttttcttatgattgttggctgcatgtatgtcttcttttgaaaactgttcatgtcctttgtccactttttaaaggggttgtttgtttttttcttgtaaatttgtttaagttccttacagatgctggatattagacctttgtcagatgcatagtttgcaaaaattttctccctttctgtaggttgtctgtttactctgttgatagtttcttttgctgtgcagaagctctttagtttaattagatcccattgatcaatttttgcttttgttgcaattgcttttgttgtctttgtcatgaaatctttgcctgtgcctgtgtcctgaatggtattgcctaggttgtcttccagggtttttatagttttaggttttacatttaagtctttaactcatcttgtgttagtttttgtatatggtgtagggaagaggtccagttttaatcttctgcatatggctagccaggtaagtattccagcaccatctattgaatagggaatcctttccccattgcttgtttttgtcaagctgtcaaagatcagatagttgtaggtgggcagtcttatttccaggttctctattctgttccattggtctatatgtctgttcttttatcagtaccatgctgttttggttactggagacctgtagtgtagtttgaaatcaggtagtgtgatgtctgcagctttgttctttttgcttaggattgccttggctatttaggctctgttttggttccatgtgaactttaaaaatagttttatcttgttatgtgaagaatgtcaatggcagtttaatgggaataacattgaatctataaattgctttgggcagtatggccactttaacgatattgattcttcctgtccatgagcatggaatgtttttccatttgtttgtatgataaagatgcttttagatgcagctgcactgtaccctattagggctcactccaccagtgggatttgtgctctgaagatctcttggccactgacttcatattgcgaaagaaatgtatctctagatcctttttgtagtttacacattactttcatgaacattgcttagtttgaatctcatattcaccctgtggtgttgacaggggagttccctttcccactgaatgtccccaggtcttggccaccgtcaagtaggggacatatttaatatgacctaatggctcaattctgaaggcactcagcccattcttcacctaactgtgggacctcttgagctctctttgggattcctctattgtttctggggtcccccagggatgcctcacttgggctcaggagccaggactcacatattctgtcacattgtgctggcaaatagttttccacccatattcaggctgatgatggggctgctcccagtgagattaaaggaaccttctactcttctgttccttctgtcagacccatgttcgccaactcctacttttctagcgaaggaacatctatcgacacctgcgaatagatgtctggaggcatgggtgtcacccccacactagatgtgtcaagccttagttttgaaggtactagtttacccttgtatgtacacataatacacacacacacacacacacacacacacacacacacaaatgcacacagtctgagactcagagacatgactaacacattctaggccatcccatttgtttttttcataaactggatgtagaacccaggacttcttactccaaatctaatgttcttccctttgcctatcctgatttaaagaaaaaatgttctataaaaaagttgctcagatatgcagaattacctgctagaagcttgaaccagtaccacagtagaaactctgctttttgcttcattctgtagaacttagggaggctgctgtgcccatccctgggaactctcaggagagatgggtgaataatgggggctttgtcataggagcaccctgaaatcttcccccagtgtgagtggtgtcaatgttttcattatttttgactgtggtttgtaacttgtcataagaattagttctggcttaattgagggcctcatgttggggtgagagaaggaagtgttgtggcctctcaaaatgccttttataggatcctgacactctagggcttggcagatacagctgggagcagtagcacgtgggaaggggatgatcccccaagcgttcgcggtccagccccctcttggtttctgacttggagattgcttaaaggtctcttggggagtagaaacagttgtttgttcccccttcttttctttacctcttaaaaaaaagtctttattctgggattgtactgcttgaaaggaagaaggcctctgggcagcatgtgatatgtttcttccccaattcccttggaaaaaggtattcagtcctcgggtgaattctaagctctgctttggacctttcaagtcttcttgatcaaatcatgctaatcttatgtccattctttcttctctacgctaatcagatgcactaattcatactgaactgttagtaggttaaagtgtgatgctatgtcaatacgctaaaaatatccttacatttttccagagacttttattgtctcaatgtaaagctttctccaaccaagccatggaatcctccctttcctctgattccctgggcagattctcaaactttagtgagcagcagagcagccttggcagattgctaggcctgccccagagacactagcccaaacataggtgaagccgttgaagcatgccacggtatcacatgagaagtaagcagtgaactatgcagatctttctcaatacccctcccaccatgcctggaaatctccctattaatgccttcaaaaaatgtgcacttcatacttgctatgtggaaggctgtaggcttggggccaggagccaatcctgtactctagtggaggaatcagcacacacatttacaacacactctaataattaccaataggaggcagctgagaagggaagtgcgaagaagaaccctagggcggtgttactctaagtgtagttcctgcactgacagcagcagcattacctagaagctagttagaaatgcaaattcttaggtcccaccccagagccttttgcctgtggaagtcaggttaacctgtgaacaccctccatcctttgcttatacctcaggttgcccctttctgtcttgggcactgacaggtcacagcttgctggtgatgacataaagagaaaatgaatgacctgtaattctgtcatccagagataaccgctctcactatttagtgtataccttttcagatttatttccatgcaatgtaggtatacataatgaaaaacaacagagaaacaaaattctattatatcacaatactgctttttgaatttctttttaccgcaattaacactacggcggactatctttccatgtaagtaaagttatgtttgccaccttaattttaataacagcatggtatttccttgtatggacatattataaatcacttagctattccctatggtacaagtctttccacatttttagaatctctaaacaactttcagaagaatatccatgcacatacatctttgtgcatatttgaaataattccattaaaattaagtaggttcttttctgtaatgtgtacttcagatgtaatttgcagaacatttgtgtcagagagactcatttaagagatgaagacttcccgtttaataagtactattaatcacgatgccagtcatccattttataatcaaaagtacacgaagatagaacaaattgtgctgaagtatttttattttacataattaatggacttaaggccattggtaaaggaccttgtcagttatcatgggacaaatacactccagcaaatgtaagcagtgagataagactctatcttatgtttttcagtttgctgcttgctgaaatgcatcttgaatttttggaaacaaaagtgagtttctaaaataagtggaagatctgcttatacaactctgattttaaaataagtctatacacagtatcagcagattgattaagaagtctgctggtggtgatattaaaaagtttggcagattttcaattcagattgacactattcaagacagaggcatagctgatgtttattcaagaatcctaagacatatcacagattccgtggagaacatctgatatctatagagagcttgaagtaaagtcctgggaaaaatatgttccagacggttacagatgttctcatatcaaatcatatttctatgaaaagttatgtagcatgttcaactgatggcacagccaatgtgaaggaacaatttaaggttttcttcctgttaaaaaataattgattctatcaactttatgggtagtgttagtcacatattttgagtgttgcaatggtagatttagaagatgtctgaacctccagttaatcccacaaaaatttgagtctgtggtatccacttagaacaatatgcatgctgcaagccgtgtagaaactccctgaatcttaactgaatgttttaccaaattaagcacatttcgtaagtcctcaggtatcacatcacaccagtgcatacatgattgtttcagatgttggttctgaggcattagacatggtggaaggctacaaagagtgccctgaaaaggattaaaagggctttgtcattcccttgtgggaactaatggaaactcaggagaacatattcccacattggagattttggtgtaaacaccagaccaatgacaaagacatccaaagaattatcacggaggcttctttttagattaacttgtctgcagaaaaatttgacctggaaatgccacagttcagaatatggatactgaaaccatcaaaatgagatgaagtcaagaagacagaaaaggtttaagtattttatgagtaagaggggctcttaaaggcagatgtgaactattgataatactctagaaggttcttcacctcaactgtgtttgtatgtgatttaaggatgatttgagaaaataagttgccattcaatgatattttcagggtatttacagaatctcagtgtagttacccacctgccttatgttttgctgaagcaaacatctttttaagaagtattcctaatctgctgaaataatttctactgagatctaaaacatccactttgcaaagcagagctcaatttgacactgagaaatttaaggaattatccaagtttgctgtggcttaggctatgataaattgatgtgtttaccctgtgactgtgctggtgaatgtacagtgatttaaggagccaggaaagggagacaaggaggtggccttagtgctaaaattaaccctggtgctagggtgatcaaccatccaggtttgcatgggattgggggtggagggtttcctaggatgcacaacttccagtgctagaaacaggtcagtgcaacaataatcgctctgtgggtcatcaagactgtgactttgtgggaatggacccacctctctgtttcttttaatacctgtttccccttctaaaatgccactgagacccatttaaacataacttcatctggatatcaccgtgggaggcaggtacatgcatgtgtctgcacacaaaaaacatgcccacctctctctctctctgtctttgattgtttgcctcaggctccgccttcaacatccatgttaggaatcacagaaaaacagactcaagaaagatttttacaataagggcttttacaatatatacaatacaatatatatatatatatatttttttgagacggagtctcactctgttgcccaggctggagtgcagtggtgtgatcttggctcactgcaagctccacctcccgggttcaagccattctcctgcctcagcctcccgagtagctgggattacagatgaccaccaccacgcccggctaattttttttttttttgtatttttagtagaggcggggtttcactgtgttagccaggatggtagtgatctcctgacctcgtgatccacccgcttggcctcccaaagtgctgggattacaggtgtgagccaccgcgccaggctgagtttgtcttatattaagaaaaataaaacacgctgacaaacagttacatcagcagaaagaatgtgataaatgccctaagaaagatgccaacaaagtgctataggagttcatagtcattagggttttcatttatttagttcacaggtgggtggtatttgtattgagtcttgaagagggtggcgatgggcaaagattagggaaagcaggtttctggggcatgcaaattgcttaagatttggggggggtccctgctctcaaatcacttacgttctaagtgggagatggaacagtgaacagtagagccatgggaggtcagggaaaggaaaacattgatctgtgtcaggtagagaggaaagatgtagtggtgggtggtgctgtgaaaaaggactaggtttttagtgagcagaggcaagctgggggacacccaggtagagtcttggaatgtaagcagaaggccagaggaaggagtaagcaccgccatattttctgacaccaggaggtgcctggggcatggtacgtgtgtctgggagtgtgggaagagttgggctaagaggatggcccagatgactgagctctagaaggccacagtggtagtatgggagcttggctttaaagaaatgaagccaattggaaattgtaaagacttctttgggacggttgggatgacttgttaaaagtacttgcttagagattcttctgtcagttgtgcacaagatggctcaaaatgtgggagggggagaaccttcttcaaaggttctttcaacaatcccagaataagtaagtgagcatgcactgggtgtggggttcatctggatggagaggcaggaggaaatgtggtagacattttgaaggaggatgtgacaagtggatttatggacaaattgagtcaaggggatgaaagaagagtcaatttacttatctttaaagtaaaggtttttcaagatgatctgtaacattcctttctgtactgggaattcataacttccaggtttctagacttaggtactggaaaaatgccaatactttacttcctacctcttttccatcacttaaacccttttattcagtaccagatattgtagggagtaaggatgtagacctgtctatggaacacttttcagtttaggaggagctatggacatttaaacatataactgtaatttggtatgatgggtactattgtggagttatagtcaaaggactaggagaaaaccaaggaaggaagcacaaccaactctgcctggaaaagtggagacgagttgacaagggtgattaagggtttgttaggctatatatgggggtcgggggcaaagaaaaaacataatgggagaagcatgaatgagactgatgtgcaggaccctactggtgacttgtctggctggaacctagggtggattgaagtgagagaggaagggaggagggaaatgggagatttgttagcagagttagattgtggtcaaatgaaagaggacctcattccatgacaggaatttggacctcatcttcttgctgattatgagttagtagagatctttaaggacagtagtaaatgatccaacttgtgtcttaggaattaactctgatgaccctgaagagggtggactacaatgggaagaggttggagacaaggaggccaataagagattattagaattcaggcaaaagacaatgcataaatgggttacttgggaaggtatttggggaaagttgagttcaattttgaaactatgttttaagaggtggcagggcattcatttatagattcattttttcccttgtgctcaaatctttattaactttgccaggtactgagggtaagaagataaatagatcactaccgtgacctccttcagctcatttgcagtgattctcacttttttttctgtgccaacactcttaagagacttgacactcaattttgggagtaggatggcaggggatgagaaggggataggaaaggagtaagaatatggaggagggagtatgtccttaatggagaaatagcagaatgtggggcggcatgatgtgcagatatcccccttccccagggggatgaaacacctgcgcctgtttcatttaggagactttcagctttcagtaatagaataccctactcaaaatggcttaatcaataatggcacttattatgatatataacaagaaattcatggatggccatctcagttgctcagtaatgtcactgagaaaccagattccttatgcctttccaatctgccatccttagcatgttcctctcggcctatttcctctcatggttataagacagctgctgcagttccaggcatcacaggcagaggtgactatgtctagcagaagaaagaggcctctttcttccttgtgcatctttttgttttcttatgagcaaagaatcctatcccagaatccccagcagacttctcatatctcaatagccagaactgggttggaggcccacccttgaacctatcactggcaaaagaaagggggaggcaggaaacactggaaacaaaattatggctattagcagagaagaaagtgaaaatggcttttgagtaggcaaacattccttctgctgaaatttgctggatgtgggaaagaatttctttgcatttggaaatagagcatttgttgcagataagcagtttgggattagagagatagatttgaaatatactggaaaagagatagagtgtttttgtttgttttttaattttttttaaaaaaactaacctgacataagttttgtgcttcttacatcttaattcacggaacctcatcaggacactgacagtcaggccattttcactgaggaaaatgaagctcagagaggttgaggaactggggatggtcacacagttagtagatggcaaagctggcaatggatatgctcactttcatctaattatggagaattttgaacatacacagaagtagacagaatggcatgatgagtgtcccatgtatctgtacttagttccaatcaacaacagctctttgctaatcttctagtcacccccctcctcccttccctctgttattattttggagcaaattccccaccattgtatcatttcatcactaattatttcagcatgaatctctacaagataaggtcttttttcttttaaagataatgacaaccattatacccaaaatatttaacaacacttttttaatattaaatttttaggtagtgcttaattttcaaattatctcataaatatcatctttttttacagttcatttgaattaagatccaagtaagttccacacattgcaattgattaataatgttttaattctcaatctataaattcttcctccatgtcttcctgtctctctctctctctccctctttcttttatataattaatctttggaagaaatcaaattatttgactggagagtttcttacagtctggattttgctggttgtatccccatgatgtagtttgacatattcctctgtcctctatatttcctataaattggagttggagtgacaggtttggtcagattcaggttgaatttttttgcaaggatacttcataagtggtgccatcttcttccattatgaggttctctttcccttggtgatgtagcagccactgatgctcaatgcctggatcccttaatttactagaggctacacaatggcgatttcatcatcaatagtttcttctttatggatttgccagaagagctgagatttaaaagcctgtctgactcaagaaggtgccactgctatttgagaggaagtgtcatgccaggggtggaaagcagaagggaggacaatttcaaagcaattgagacagtacagaagtataccctgaaaaataaggttgtctgggttgtttatacccacaaattagctagtcacaaacatataacctggttagaattgtggagtatcatacatcaatcacagtgatcatatcatggcgtaaccccaaaacacatgttgattatttacattttagtgtgctgtgcttgaataatatttttcccttgaaatctacaagtctctctgtcagagggacagagagaacacaagtgatgatgttttagtgtgcctaaagcatgatgaaataatagaaggcattgcaccacgagcaggacagtttgaagtcagtgagcgtctccgggtaatccacataatttattttgcagtcacaaaattacaaagcactctagcaggcattgtgagcctcatgaaggaaatagaaaactcacaaaccaaggaggggatggggccgatgaaatatacctcaagacaacagtggcagaaacataaatgggtataaacaccatctgctctattgtacctcatggctagagcagggctttcagaagggtaagaacgaaagaattgagggaggttggtagaattcttgtaggaattgaggcaggtgtggaagctccccagacaggagaacccggagcctgtgtgagggaggagaaggaacacctgagatagtctggagttgggatgctcctgagggtaacgtcagagagggaagaagcacccactccatccatagatgaaaacacatttctgaattatatttacaaaaattatacttctgtggaagaggaaagggggtgtttttcccctcagaattacataatgttgaaattattgatttgatttctccattagatttactgtcaattcttgttattcatggtagttttgttctataaagtcagaagaacactgaaatagcaaatactgagctattgctcctaggcaaaatatagggttaggtttctgctagcctctggtcacaattttgtcaactgatcaatacgtaaccttgctttatgtgtgtttctgtttaaaaacatttaatatatattgttgattcattaacattgaatgatggtcaacagaactataactcatgcctgagtgaaacttatctgacacacttctgttctctataaggcacctcagagccgtcctgaacttaggaacactgggcagaacttcagccctacccttgaggggcattgtaaagagcaaaatcactaacgaaaagcacaaaaatgcaaaaaaaaaaaaaaaaaccaaactgtggtactaaatagagtgcaaaaagcacatttgtttacaatatgagagctgaaataagaaggtagagcattgtcttgttcaaacctcagctgggcatatgtgcgtgggccaggttaaattttttgctgttctgcccatgtctgcaagtaacctcaagagtgcccacttggggattacaaataaagtttagtgagttggtggatttgtaaatatggaatccatgagactcaactataatttgaaaaccagtattgaaagataaactcgggttggaggtggggtggagaattgcaacaggttttctgggcttctccagcacgatcaggttgtatcactcagctaggcgtccaaatcctattgataaaggcctttttgttggagagggaagaagaggaagagaggaggtgtggccttcagagaagtaaggagaaactgaaggagttgtgtgagggcttaggaatccaggaagtgggggcataagagtaatggaggaagtctctggaatcaggacagctgagtacaaaaagcttggacaggggagagcagaaggagcaggaggaaggagaccaccatgaatgctagaaccacactgtgatttgggtcagtgtagcgaaagctcagtaagtcagattggttttttggcgtagggccgccgtacttatcctttgcttggagctctgtgactgagtttttttacttttcaaccaattgtggtaccccctgtggactgctggagagggagggacagccatgggttctggttccgcctttgctggccacattagagatggcttgggtggaagcctcatgccacagagttatttgtggatgatttaaagaaggatgcagaactgtttttcactcacaaagagaaaattaatgctagagatttgatcctttaagaggtctttgaacttgtaaacccagacacatatgtgtcaagaatggaaactggcaaagactgtattccatagtttgaacttaattgcatttggtatgtacttgaaaagataaaatatcccaagacgtttaactttagaaagtcattctgttgtgctgcacagtaagtcattttcacaaggatctggccgagatattcagtatcaacatgcaggaatggtttcaatatgtggtaggccaataaaaagaaagtcactctgacccacactttgcagatctaagaaggacagaggagcaagtagtgataattcgttccagtttcagggaaatactgtaactctgcagccacatgcctctgtcctgcccgctgcgctgtgtgtctctcagggaggggggcttaacgtcccaatctatgcttctcaggtgggcactgcacatgacgtggttacgcagggaggcctgaaagtgggtcctgtggagatagggagtgttggtttgatctgaaatcatgggactcacagaattggccactgggtttggaaaaccctccgtaggagcaagcctcagtgagaggaaataggaccgtcccactcccccttgctttgctgctggctagcacaggcaggaatgctgcccagagcctttgacccacttccctgcttctaggacagtcagagcccaagcagtggggggtctgcttactcttccccctggccttaattcatcagtgttccctttctcctctcagcctggggttggaggggtggtggaaaagagggtctttccttcctggtgttaaaaaacggatttaagcatatgtgtagggcaggggagggaggaaggaagggtgggacctctggaatcatacccatcgtactcaaatagtcctcaaagtttttgctgttctgcttatatctgcaaatgacctcaagagtgcctgtttggggatttgtaaatatggaatccatagtctccaaaatggagactttatttatttatttatttatttatttatttagtaattgacatgatcttgctgtggggttgctgtttatacagagtaacccaaaagaagttaaacttgcccgtttaaataaattgatctattccggtttgaagcaatatttttcaggcaagctcagattctgtaggcttaagccttttctccttctctcaacccctcttctccttctccccgggtgacatctgggcacaggaaaaggcttacgtaacattgtcatggttggggcaggatgttttctttctttctttctttccttccttccttccttccttccttccttccttccttccttccttccttccttccttctttctttcttttctttctctttctttctttctttctttctttctttcttccttccttccttccttccttccttccttccttccttccttccttccttccttcctttcttttcttttctttctttctttcatcttgagacagagtctcactctgtcacccaggctggagtgcggtggcacaatctcagctcactgcaacctccgcctccctggttcaaaggatctcctgcctcggccaccagagtagctgggattacaggcatgtgccaccatgcccgactaatttttgtgtttttagtagagacagggtttcagcatgttggccagtctggtcttgaacccctggcctcaaatgatctgcctgcctcggcctcccaaagtgccaggattacaggcatgagccactgcaccctgcgggatgttttctgcttgtgttgtccttctcttctggcttctgttgacttctttttgaggtgcagctgattttgtctcctctttgggagttagcttcagctaccaaggtgtctttggttggtgtgtcttgtgattgtcagctgggtgtggctgcccctaggtttagcatcctctgctttgcctcttgctgccgtagaccctctggggcttagccaggaacttctactggaaactggctttatgtggcctacttcccagcttctgctataggattctcttgccacacaccaggcaacttcttagcaaatactcttacttttcagctcccttcttccatgtctaccacagggctatttgggagcttctagatgtccccaggccaggtatatctctgggaacaagagaaggttatttttggcccatctgcttggcatttctctctgcaaatgatgttctagggctcctgaactccaggggccatgcgtgtgtgcatgtggagcacaggagggtagtacacattaaagcaccagcctaagtagttttgtattcttcctcaacctatctggaatttttgtcttcttgctctctttcttccagggccatcccccggtaggtgaggagatagatgggtagaaagtcttgccccttcttctgttcaacaggagttgcccccacatcccatcctctgtcctctctacacagtaactcatagtaaaactctgtgcttagtcccctgggctttgttcttaatatgtgcaaagataatttttgaatagaaataacatatttttctctttcaacaaaactcacttctaagacaatagtttctctctgacttgagaaatccaatataaaacacaaggtaaaaaaaaaaagagttcttggttcagggttgtgcctcttctttccctgaaacaacaaaggccattgattcagtgggcagagagctgcagggcaacatgatttatgggtaatgaaaaatacattagtgtaataatttcaaaaatatggtagaaagagttgggaacttctggattagaagaaatggatcaaatgaggctgcttacatgctggggtggctgactcaaaggaaaatgtagctggatcgccacagctggatatccttgggttatgtggttgcctttctcagcctcactgagcagggtcagaagatgtgagtcacaaaaccaactgcagcaggaaagacaaacatggcctctcatctcatggcggcacagaggggcaacagaagctcctgtgagcttgtgaattcttcttgctcagaaatccttttcttctcgtttacatggggctaccccatgagtcttcaggggtcagcaaactttctataaagagccagatgataaatatttttgacctttcatgctatggggtgtatgtcacaactattcacctctgccactgtgatgggaaggcagacatagataatatataatgggaaagtgggctggagtttcaataaaactttatttagaaaaccaggcggtgggccagatttggcctgagggtggtagtttactgattcttaatctggaataaagtgctaggtcaatgtagagaaagaactgcctgaactgactcctctatcctgtgtctacctgtttgatcccctccctacctcccgttccccccaccaccccatgcacatctgcctccaattgcacatacagaccagaccaggtttttaacattattgtgacccagcctttggcttcactcatcaagtctccaggatggagaaacagaggccctgaatttttttttttaaaacacttgtcaagcttaatgactgttatttacagaggtagtttaaattttttttattgtattattatcttttgcccctgggaaatttccagattggctcacattttgatttccaggctttctgggcagggctggatgctcaagaggtcaatatgctgatgagtagggaagacaaaagggccaagtgagcagatgctcctaactgaccacaaactgcagcacaagtaaggcattccgcctctatttgagagcatatagtaattttctatggttgccataacacattaccacacacttagtgggttgaaacaaggcaaatatattatcttacagtgctggaagacagaagtctggcataggtttcatggagctaaaatcaagatgttggtaaggctgtgattctttccagaggctgtaggagaggatccatttctttgccttttctggcttctagaggctgcctacattccttggttcatagcctccacctccatcttcagagccaggaacattgtgtctctctgaccattctttcaatagtcctgtctctctctgactacagctgggaaagttttcaaagattcagatgattagattgggctcgcttgaataatccaggataatctcgctatctcagcatccttaaccttaatcccatctgtaaagtctcttttgtcatgtaatataacatattcacagcttccagggattaagacaaggagatctttggggcaccattattttgcccaccacagagcaggatcctgccttgtgtttttctcatagatactttctgggcacatagaggtgctgaataaattacttgcatttactgggatctaagcccctaggctaaggggagctgttgaggagaagccccagtctgctgcgtgaggagggcatggccttccttggggaagggaggctgagtggtgtaggacaagcactgagctcacaggctaaggacttgggctcttgtcccaactctgctgcacatctcacttgctatctctggtccctcgtgtaatcttctatagcatgaggaatgtagattaggcagtggttttccaaagctttttaagcaccaggggcctttcttcaagtcaagcctatagaattccaggtcagagtggagctatagtgtttgaagaagggctaaggcccagagccttccctgcaggcctttcccaagagctgcctggcagctgcagagatacagtttctttccaggtctcctggaacgctatttggagatcgctggactagatcagggttggctaattgcagccagcaggctaaatcaggtctgaggcctggtgttgtttgattcctgaactaataattctatacatatatatagtttattatggtaaaatacatgtaacaaaaatttaccatcttaaccatttttaagtgtgcagtttagtgacattacatacatttactttgctgtgtatccatcaccaccatccatctccagaactcttttcatgttgcctaagactctgcatccattaaataataattctctatttctcctttccccagtccctggaaaccaccattctattttctgtctctgtgaatttgacagaactgagacctcctatgtgtgtatgaaattacacccagcacaatgtgtcctaaggaaatagtggaggctgtgcactacggtggcagtattgcttatttcagataaaaattggaatcaaaagtccaacaaaaggagattctttgaatcatttatgctgtgtctataacatggaatgctacaaggctattgaaaaggcatcatagataaatatttgtccacatcagaagatggatgtgatttattaagaaagaaaaatagattgtaaagcatatgtctatatgtgggtttttaagttgttatatatttgttttaatcagtagctttaattaaaatatatacatataattcaaaataagatatacatgaaaatattaacattgattggccctgggtagtgggatcacggttggttttcattttctttttgctgactgagttcatttctttctcttgcagactttgggcctttcctctgggtgggggcctgctaatcagagttgggaatcatctttcttttttaaaccaaacccatcaagcattttcttcattttctacttttgggtcctttaaagtagaacgaggatgttaagtatcctttttttaagacttttacaacatttttaaacagttgtttagcctacccctaattccacagaaactacttaaagcaactcatttgactgtatcatctcaatgcaatttagttttcatagaaacaacactgttttggttctcctatttcatcatttttatgcatcaagcaaattgcatacttataatagcaggtacacttggcatagacaattcgggccctttgtgagtaaaactggtagaagtggaggtgctcaggaatgataagagcagcctactagctataggcattcagtgtgtcctggcattcatctgtagttttcagagagggaatggggagcatttattgacctaatgagttggttaaatgacagtcagttgagagaatttctaccacatatattttctctttttttaattattattatacttaaagttctagggtacatgtgcacaatgtgcaggtttgttacatatgtatacatgtgccatgttggtgtgctgcacccattaacttgtcatttatattaggtatatctcctaatgctatccctccctcctccccccaccccatgacaggccctggtgtgtgatgttccccttcctgtgtccaagtgttctcattgttcaattcccacctatgagtgagaacatgcggtgtttggttttttgtccttgtgatagtttgctgagaatggtggtttccagcttcatccatgtccctacaaaggacatgaacttatccttttttatggctgcaaactcatccttttttatggctgcatagtattccatggtgtatatgtgccacattttcttaatccagtctatcattgatggacatttgggttggttccaagtctttgctattgtgaatagtgccacaataaacatatgtgtgcatgtgtctttatagcagcatgatttataatcctttgggtatataccgagtaatgggatggctgggtcaaatggtatttctagttctagatccttgaggaatcgccacactgtcttccacaatggttgaactagtttacagtcccaccaacggtgtaaaagtgttcctatttctccacatcctctctagcacctgttattttctgactttttagtgatcaccattctaactggtatgagatggtatctcattgtctaccacatatattttctaccacattgccttcatcatatcctccacttctgctcagatctgccaccctccctaggtgacctgactctgcagtttggggaactgataccctcaggctcatttctaatgcacgagggtctcctctcccagtatgtagaggatctcatggcagccatactcctgaagctaaaataaggagtacgacaaaggatgagcttgtttggatagactcagactttgggtttttaaggcctatcactcttgatcctactgactttttcccagcagccaatgttaaggaccctgcatttaggtgctggatgcagccattcctgcctgatccctgctgctatctcatggcctcatgcagccttgttttgcctgggtttgcctttgagtctgggttttctacataggatactacataataggccttcaataaatactgacagactatggtatgtctggggtatttccagagtgacctgcagttccactgatgatcgtggaataaaatccctttcttaatgttttaattagttgtttatgcattattattattattatttattccagacttcttggcactttatatctttctgccagctgggttgttgacctcttcaaaaccagcactgtgattacattttgtggaccagtttatgagtcagttggcagctgatcagttcctcactgccaaattcacacattttctttgttatcacttggatgacccactgaattggatcacatggggcttcataaacagaatcttactaggaattctaagaggagtggctcttgcatgagagaaaatatcttgggtttgatcagtggaaactgtgaatataaattccaaaaatgccaacacctgtgtaaggtttaggtgttgcactataaaaggtcttcagtgtccagctggaattcagggaatcaaccgaacaactccagagttactgattatttagagttatattatttgtacttactcgtctccttataactgcatattgtttctttttcagattgctgagttgagtaaatatttccttccataaaggtaaataagcatctcaagagcaagtttctacattttgtatttccctgttttatttctgtaaaattgtgcaaccaagaattatgacctactgatattagaataaaatttgcagaagtttgactacatgagccagatgggtacttacaccagtgattactgagcgttcaccagttaaccagggccttgcttgctgcttcttaagagacaggaacatttgtgttaaaataatgtattgctaggtgtgattccaagatatcctaatttgtatcatcagaggtgtgacttaggagtttttatttgaaagatgcccttcatgtgattctgaagtgttctgtacttgcttgttttggtgaaaattgtttaattcatgttgtagtatgttcttgcattgctgtgaagaaatacctgaggctgggtaatttatataaaaaaagaggtttaattgactcacacttctgcaggctgtacaggaactgtaacagcttctgcttctggggaggcctcaggaagcttccaatcatggcagaagacaaagggggaatgaagtgtcccacctaaggggagcaagagagaagcaggaggtgctacacacttctaaacaaccagatcttgagagggctctatcacgaaaacagcaccaagggagtggtgcttgatatggttttgctgtgtccccacccaaaatttcatcctgaattgtaatccaaattgtaatccctacatgttgggggaaggaccctgtgggaggtgattagatcatggggacgattcccatgcacttctcttttttgctgccatgtgaagaaggatgtgtttgcttccccttctaccatgagtgtaagtttcctgaggcctccccagccatgtggaactgtgagtcaattaaacctctttcctttataaattacccagtctcaggcagttctttatagcagcatgagaacatactaatacagtactaaaccattcatgaaggatccgcccccatgatccagtcatctcccatcaggccccacttccaacactgaggattacaatttgacaggagatttgatggggacacagatataaaccgtatcattctgcccctggcccctgaaatctcttgtccttctcacattgcaaaatacagtcatgccttccccacagtcccctgaagtcataactcatttagagcattaactcaaaagtcctaaatgtctaagtctcatctgagacaaggttagttccttccacctatgagcctgtaaaatcagaaccaagttagttagttctaagatacaatgggggcataaacattggataaatattcccctcccaaaagggagaaattagccaaaagaaaggggcgacaggccccacaaaaggggggctgccaaccccacagcagggctattatgaaatctaaagcttcaaaatagtttctttctttcttactttttttttttttttgagatggggtcttgctctgtcacccaggctggagtgcactggtgtgatcttggctcactgcaacctccgcctcccaggttcaagagattttcttgcctcagcctcttgagtagctgggattacaggcacccaccaccatgcctgattaatttttctattttttttgtagagacagggtttctccattttggctaggctggtctcaaactcctgacctcaagtaatccacctgccttggcctcccaaagtgcagggattacaggtataagccactgtgcacagcccaaaatagtttcttttgactctatgtcttacatccagggcacactggtgcaaggagtgagctcccaaagccttgggcagctccgcccctgtgggcttttcagggttcagcccctatggctgctctcattggctattgttgagtgcctgtggcttttccaggctgaaggtacaagctggtgatggatctattattccaggatctggaggacagtggccctcttctcaagttctactaggctgtgccccagtggggactctgtgtgggggctccaaccccatattacccctgcacactgccctagtagatgtcctccatgagggctccacccctgccacaggcttctgcctagacacccaggcttttctatacaacttctgaaatctaggtggaagcttccaagcctcaactcttatactctgtgcacctgcagatgtaacatcatgtggaagctgccaaggcttatggcttggactctctgaaacagcagcctgaactgtatttgggtccctttgagccatggctggagctggagcagctgggatgcagggaccagtgtcccaaggctatgcaaggcagcagggccttgggcctggcccatgaaatcaatcagtcctcctaagcttctgggcctgtggtgaaaggggctgttgaaaatttttctgaaatgccttttcctcactgtcttggctattagcacctggctgttttttacttatgcaaatttctgcagtctgcttgaatttctcccctgaaattggccttttcttttttaccacatggccaggctgcaaatattccaaacttttatgctctgcttcctctttaaatataagttccaactttaggtcatttcctcactcatgcatatgagcctaggttgttagaagcagtcaggctatgtcttgaatgctttgctgcttagaaatctcttttgccagctaccctaaatcatcactctcaagttcaaagttccacaaatccagagggcaggggcgcagtgctgccaagttctttgctaaggcataacaaaagtgacctttgcttcagttcccaataagtttctcatctccatctgtgacctcatcagactggccttttctgtccatatcactatcagcattttggtcacaatcacttaaccagtctgtaggaaattccaaactctcccttatcttcctgtcttcttctgagtcctccagactcttccaacctccacctgttacccatttccaaagtcgcttccacattttcaggtatgtttatggcaatgccccactccttggtaccaattttctgtattattccattcttgcattgctattaagaaatacctaagactcagtattgtataagaaaggtggtttaattggctcacggttccacaggctgtaccagacacataatgttggcatctgcttggcttctgaggagccctccagaaacttacaatcatggtggaaggcaaaggaggagaaaggcatttcatattggggagcgggagcaagagagagcaaggggaaggtgttacacacttttaaacaaccagatcttgtgaaaacgctatcacaagaacagcatcaaggggacagtactaaaccgttcattgaggatccaccccatggtccaatcatctcgcaccaggcctcacctgcaatatcggggattgcaatttgacatgagatttggtggggacacagatccaaatcatatcaattcatatacatttttactttttcttcattatcaaaatgttctagtttcctttttgagatcattttttactatatacaaatttatttaaagttatagagttactatgtagttgaagactagaaactataaaataaattgaaatgggcatgctaaagtgtcagctaggtttccttattagctaaataagttctattcactactggtcttttaatacccaaaattcaaattcatgaacagcatccttgagaattaccaaataggttgataaggaatagttgaaactaagattgttaaatccacaaatgccaaatatttgtatcattatttagttatatgttctgccagtttcttttttttaaaaatatgaatctattgagttgtatagagatgacaatatgattacagagtagaacaagtagatgagaataatactaggtactacactgagccaacagcttcttgaggcattaactgatttccaatctgtaaatgatattcttgtgaaaaaaactggagaaattggaagtgtgggattgttcagctaggcagatgtatagaaggtagaagaatctgaaagatagatggcagatcgatcaatacaataaatgaagcctccagaggcatactgcagaaatttgaccagaccttcccatgtttttgtatgaattccatatttgagcatgaaacaaaactagaaagactagcaaatatttaagatgatagaatctgggacaaatgctcttaacaggctggatccaggagttgaatgttaaaaaaaatcacactgatagtaataaagggaaagtcctacatttacattatcaaagccaaccaaccaaccagccaaccaaccgatcaacaaatgatatgagcatggagtgtggaggagtggcttaacagaatttcttttggaaaggatttagaaaggaaaggatttaattcactcattcattcagccaatacttattcaccacttcctatgtgtcagacactattctagaggtgcattctccaataagggagtcactgtcgaacatttgaaatgctatagaacatttaaaatgtggctagttcaaattgtaggtgctataagtataaaatacatattgcatttctgaggcttgatatgaagagaacatagaatatatcattttttaataattacatgttgaatatattggctataataaaatagtgaaatatatttaatgtttctctttttctttaatgtgcctactaggaaatttaaaattgcatatgtaactcacattctatttctattgagcagtgctcctctagactctgagtacacgtaattgaataaaacagacaagatttctgtcttctttcattcattcagctaatatttactgagcacctattatgtgccaggcaccattcttttagggtgatatattccaacaggaggaagataaatcataaaaagtagccaaataaataaaaaagatcttttcatttagtatgcagtgaagtgataaaaatacaacagagtggttgtggggagggacagtcatttatattgtgaggttggggaaagcctcactgttaaaggtgccatttcagccgagacctgagtcaccaaggagccacacattaagaaaactggggtgagagccttacactcacaggaaacaccaagtacaaaggtcctaaggtaggaacagtgacagggccagtagtatgggggcattacaagctgtatcaaggagtttggcttttattttaaggcaatgtgaagtcactggaggctataaatcaggtgagtgacaggatcaaatgtaaatttttataagattattctgtttaaagcggaaaaagtaaaagcaagggtgccagtaatttaggcaagaagtgatggtgacctggagtaggatgacattaatgaagttggaaagaacccagggactcagtgttttgggagataggggcactgagctttattgaaggtttgatttggtgtgcggggaatgaaggaatcaggtgcaaatgcagcattcctcagagtgtggtgtcattgccagaaacaaagaaaagccacccaactccaaaggccaatgtgatctgatgctgttctggtagggttacccttccccagggttggggacttcatatcacacataggagcaatagctaaagaagacatattaaccaagggagtgcataccaaaggatgcatgtggggctctgcatttcatttttggtgagaacccaaaggaagaaggagtaggaaggcagatttggtctttttccctattgttcaaatatgattgggctgactcctgggttgagctctatgtcacaggaggcattcaaacaagaaccagattagaggccaccaactggaggtctgtgagctacatctggctcatcaattgttttctttgactttcacatttccccccctccttaattattcaacaaactgtcagcctttcaacaacttagcttaagaattccaggattcttttttctgttgagcaggagggaaggtctgatggcttcagaccacctttctgcactgtacccgttggtcaggtgtgagaagcgtccgtgccctgtcggggagaaaaaccttcttcggttttcctctgttcttgcctggtcccattcattctcttgaccctgtaggcattgagtttatgactcctagactttttaggaatgtcacagaggatattctaattgtctctgggaactggacaagaaagtcaggatttttattgctaaaattgagatttcttattttcttgaccgatactaccagaacggaagctttcatttactctaggatctttcctctaccagcctgttctggggtcatgcatgctatggtatggatggtggctttgaatgcagtctttgaagttagctttatcttagttccaatcccaacaccagacagttactatatgacctctgtgggccttgttattaccatctgtaaaattgatttaaacattttagtgcctcccccagagagttgctgtgattattaaatgaaataatgtatttaaaaaacctagctcataggcagggtagtggggatgagggtgtggggatggttaatgggtacaaaaaaatagaatgaacaagacctagtatttgctagcacaacagggtgactatagtcaaataatttttatattttatcttcaaaataattttatagtcaaaaataatttaattatacatttaaaagtaactaaaggagtacataattggattgtttataacacaatggatgaatgcttgaggggatgaatgccccatttaccctgatgtgattattacacattgcatgcctgtatcaaaatatctcatgtaacccataaatatatacacttactaggtacccacagaaattaaacatttttaaaaatcaaaaaataaaagacatagcccaaagcaaggctcataatgggtacccagcaaactctattattaaatacttcttgagcatctactagcttcaggctttttgcaaaattcttagagttgtcagactgtgaggtgatcattacaattctagtttaatcctctcattttacagctgaggaaactgaggccccaaatggtgaaatgttttgctcaaggctaccaagttaggatctgattgacagagacttggaatttgagcttctctgtcgacagttggattcactctattgtttgcccattcatttcctggtcaacttctccttcaacctctcttcccactggattcaacaagtttttattgagtatctaatacattattggagtcagatatagaacagtggttctcagttggagggtgagttatccaggagacagttggaaatgtctaatgacgtatttgtcacaactgggtgggtactaccagtatctaatgggtaggtgccagggatactgctaaacatcctataatgctcaagacagcccccagcaattatctggccctaaaagtcaatagtgctgaggctgagaaaccctgatatagaggatgtacagataagtgaaactttttttttttttgcttgcaaagagttcccattccagggcagcgggggaggaggtggtggaggattactcttgatacattgtgataagtgccccccaagaacatcagtacccctgatgaatgctctctgaatttttggacctaactactttcctttagacaacacttacaacaaatccacgtgggcagagtaattattaaataaagtggagggggccacagagccaaatgaagatacagagccctgtattgagcctcctttcctggaggctcaaactgggaagaaaacctctttattcattttaaaaacaaagccttcactccattattattattataatgttcattatgggaaatttggaaaaatatataaaagttgaaggcataaataattcttaatattttgctttatttcctttcaactttttttttcttcctatgcttggttttttactttgcatagttgtgatcatatagaatggataaacttgcagactgcctataaattggcattctttcattgtgtatgtgttactgccatggacatctttgtgcataaaactcctctttatttagggttaaaaaaataaattctcggaagtgaaataattagttttaaactataagtaatttaaagcttttgatatatactgaaaattgctttcgcaagagattatttcaattacattctcactgacaatgtatgaaattgccctcaaaagttaatcttaaaaatcatgagctgggtaatatgattttaagatagtcaatggtgagatcaagttatgtatttcttggaatagatgagatatataaaaagagaacatagtaattttttaataagctcttgctaatttaactttcaatattgttccttattgaattcagtgttcacagttcacatttgttacagaaagtttaaatatctgttttataatgttgaaaatacactcttctgcgtttatagtataaaatccttactgtattttaaatttagtttttttgtggctgtggcatttcatacatatatacagtggtattaatgtttgtgatatctctggttttgtgtggctattttattcttgtgtggagaactgtggatgagagttttatctctatttctttttctttcctttattcctttttttttaaaaaaaatttggaaactgccaagcaaacaaccatccctcaatgaatgagataaattaatttgccttttcctgttacaagttgaaacacaaaaatgttatagcaaagaaaaagtatccggttccaattttatggttaaatctctttgtctgaaggaccagaaaaagctcttccttgaagtcagtatagaaatatgttttcacaacttagcaatacactgaaattctttaagggagcttttatttttccctcctacttcaattataaaattggagatgtagcctcataaagagaggaaaaaatcaatgatagactgagttgaaaacatttgacaaggaaataatttaagactggttcaacaaagggcacagattgcagaagaagaaatgtaaatgactaatataatataaaaaggtcagcttcactaataatgacatgcagattgaaatgaagtacaatttccacctaccaaattggcaaaaataaagatattcttcaatgttgataaggatacagtgaaacacatttgcagacatcgctgtttgggatgtaaattcacatcagcattataaaaatcaatctagcaatatgtattaagaacttaaaaagagttcacatccttttttactcaataatttttcttttatggggctactgtaaattattcaaaaatctctacaaataggtatatccaaagatgttcattgcattgttatttataatagcaaactattgcaaagaacctaaatatccaacaataggaaattggttgagtacactatggtatagataccttgctacctggagtgtggttcaaagaccagccgcattgccccatccgagacataatgaataagaacctgcattttaacaagtctccctggtgattgctgtgcacattgaagtttgagaagacttgttcaggtataggagaaagcagttcccacctgatattcattataggggattttttctttttttttttttaaacagaaaacattctcagctggggcacacagactctctgatggtagaggcagattatctgtagttttaggaagctcacaggcaattctgatttacagccaaacatgagaacaacagatatataatgtgatgctactgttaaatctgctaacctctctttctactgccttccacagcacaagttaatttaatgaattacctgatgtcttacattgaacaatcataccaaagaccacatatagcatttgcaatacggaggccactgagggtactttgtagatattgcctaagagccagaatagcattacttcctctgagagcaatacctggcacgtgaagcttgttgaatattgttgaaggaatgagaaagtaggcaggaactcctatggcttgcacacctacactctgacattctgtttctatactgtttgttgttaggtaagaaatattttttaggttccctaaatccaggctttactggcttagaaatttgttgtcaggtatgattttgattgtattgatgaggatgctggcagaaaataaatggcaaagttaaattaggaattcaagttgagtttaataaaggcactatttacaaaggtgccaggcagagttaaaggaaaccaaccacagggaagaaacagtgggggtggctgccaccctgaggtcgaggtaaggggtaaaagcagggtggggagatgggtaatgtcccttggagagggctgtctcatataagctgaagcctagtaaagaaatgcaatgcattaagcaggcatttattttctgtattctgatgcattgacagcatgaggccttgttgaccctcgagagattccctctcccagggctagcaattcctggagttggcaagcaattcaacagggagtacatcttctctatgcaaaccaacccatccagagcccaaactccaaccaccccctttactgggcttttacactccaggccaccatccccctcacatgattactctagggccaggtaccagacaactaggaatggctcctatgccccagagcccactgaaattattcaaatgagcccattctaaacttgctcaccttgcctctcctgagccttccagtggaaaccacaatgaaaactcttgcccatgtgtccccagctctctctggctcctcagtgaccctggtgctttctcatataactctcctttatggcctgccacatctgtggtttctagggagctgtgagtataaacacttctgtcacaacaattatttccgtgcctgcatgccttaaccacacctgattaaaataaatcccgggtacctgattagaacacacagccaatccagaggcacgtggcaggaagaagtggaagagaataaccactttgctttccctctccacctcctgttagtgtctctgcaagccaagccaatcagaagctagtggggcagggagccccaagtgtagcccatgtacgtcaggctcttgtggcacagaggagggaggggaaaggtggcgagtgcatctggagccataagagacaaaacccagcgtagcagcaatggacccatgacagcgagaataacatggaagcagctcttgctttctggtcttcctagtctcaacacattggctaaatgtatgaatccagtttctggtaacatctttatctttgtctttgactcacaacacagacaaggagaagagagcaagcagcatttttccccccatgagtttcttgtcaaagcattaaggttttaggtggataatatctataaaagacaagaattacaaaccactttatcaaaggaaaaccacatatggagttttcacttgccaatggatatgttctgctgaaagctccaattggatgtggttgtctttttttggtcttttatacccagagacacaggcaacagacactaagaatgtagaacctcattttcctccttcatgagcgtattgcctttagaaatatcatagactcattcttgaacttctatctcttgctctttgaacataactctcaagtgttttgatgatgggtaggtcccttcatctccagcgtctacctctttcaatttgcagcaatagtagaaagaagttctgagtggaagaaagccacaagaagaataaaacggtttttacacaaatgacagaagctgaaatggaattgtcatttcatgcggggactagatttacccagggtaatcagaactacttggggaaaactcaagtcctttttggggggtggggtggggtggggtctcactctgttgcccaggctggagtacagtggtatgatcatggctcactgcagcttcaacctccctgaactcagtgatcctcccacctcagcctcctgggtagctgggaccacaggtgcacaccaccactcctggctagtgtttttgtattttttatgcagatggggttttgccatgttgcccaggctggtcttaaactcctagtcttaaggaatctgcctgcctcggccttccaaagtgctgagattacaggcatgagtccccgcatgaagcctaaggtcctttaaagatcacagtgtgatgcaatagtgttttcaagcaagtgggggccatcactgcagctaacagtaatctggatcttgacttagcctctgcatctcaggtgaccaacttaattcctgggctgtgtatagtggcttggaatgcagatacacaaaactacaagaagtttctaatgaagtggtgcttgaactctgccttacaggcacgtggggagtagtccattggcatgaaggtgagaacgcagaaataaaaagcgggatggaggccatttttatgtattttaacttccagtgcatcttgtgctttagatgactaatgccctctgtgaacttctgcgagtggaaccaaaactgtttaatgaataagtgacttttagtgctttatttttacctagagcttcatttgaaatagatcatcattagctttatggttttaattgtattggaatttcttattgtaacctattgctttattgcattagtccattaacctgggtgctacggagcatagttttagagcctgtatttatatctggactaattgcatggatgcttccttatagggtgagatatttttcagataatcacaggaaaaatcatctgaacccctttccaaacttcagggtctaggaaataaccaaaccaaatccaaaagaccctgaagattattctgaacttttcttactttgaaatacctaccactctatcaacaaggaattgcaaaatagtaattctcacaatatgtgttgctcccacatgtttttcatttggcagtgctgtgggacgctttggttggctggctccccaatcaaatccaggtggttaatggtcacaaactgggggaccatgaggggaactgtaccttgttcattagggcaaatggagatggagtgtccaggccactggctgagggcctagaatctcagacaaactaagaatgaccaaggcccagctctctcttcctttgctaataacctggaaggtggcacagctgttaacaccaagttgacccaaagcatttcttcccagggtgggaaagtgactgatggagactccagcatgttcagatcacacagggtgttttttacttctcctggaggaagaaacactgaagttagaattgggccctttgtaacctcgcatatgctcaacagcaggagtgtttataatgcccatcaaccaggctttccgctgcacctgttggtggaccagctgcagaaagcaggtgtatctggggacagagaggacgggtgactgtggagaatgctgagggctgccagatgtggtccacataaacactgggccaacagctgggagacaggaaagatgtggatttaattaaaaatgacgtgcaaatttgattattaatttcaagccactgtgtgaatgtaacatacatacatacatacatatatacacatatataatatgtatttcaaatgactgaatagaatgtgttaatggaagcatgagtttcacttttcactaattccatgcactttatattttgttcattggtccacatgattgttcatcatatttccatgtccattaaaaaaactttcccaggcaggaagctaaaattctagtttaattggaaatgccttgcaatcccaggaatacaaccttgtcaactgaaacagataaactgaatcaggtgacctctgacacttgcatttataactggactaacatgaatacattcattgtagcatgggagactttgaccacaactgtgtgctgtggactcttatgagattgagctaactccttagttttcatttgccatcttcaccagagctgagacatagcagtgcctcatgagaagggtggaactcacggggctattgacacggccttgctagactccgtagatggcccataggatatgtaggaagcctggggagaatttgctgtggttggctttggaagaccaggtgtgttgtaggtcttaccagtgatgagtctggaggcatgaggcatccatcattcattacttaaaagagctgagagtgaggataatctctaccttggaaacaacacctgattggacagtgttccgtggtatttaaacttaaaactggtactggccaaggaagacagtcaaaacgttttggcatcagagaggagggcaaaatcagaggtctgaaacatactgtctcttgaggttttcagggggttctccctcctaccttaatgtgtcacattctccatattcttttaggacattggttctcatctgagcgccccttgaaactgtaggcaaaatgttgtgtacacacacacacacacacacacacgtatatatatatatctacacacacacattgaattgcacatttttctcaatggtggttagtacgtaattttctttggattctcaaagttctcaaaagcttaagacctaaggagagcagtgtttctttttttttatttattatactttaagttctgggatacatgtgcagaatgtacaggtttgttacatatgtatacatgtgcctatgtgtatactatgtgtattgttgctgcacccatcaacccatcatctacattagatatttctcctaatgctatccctcccccagccccccagcccctgacaggccctgttgtgtgatgttcccctccctgtgcccatatgttctcattgttcaactcccacttatgaatgagaacatgcagtgtttggttttctgttcctgtgttactttgctgagaatgatggtttccagcttcatccatgtccctgcaaaggacgtgaacttatccttttttatgactgcatagtattccatggtgtatatgtaccacattttctttagtctatcattgatgggcatttgggttggttccaagtctttgctgttgtgaacagtgctgcaataaacgtatgtgtgcatgtgtctttctagtagaatgatttataatcctttgggtatatacccagtaatgggattgctgggtcaaatggtatttctagttctagatctttgaggaatcgccactctgtcttccacaatggttgaactaatttacactcccgccaacggtgtaaaagcattcctatttctccacatcctaggagagtggtgtttctaaggagagcaacttatttctcttgaggaaatgtcttcatggcaagaaataatgataacagcagtaacaacaatagtaagttaatacttatggcattcatgatgttccaggcatcatctgagcactttacagatgttagcttgtttaataaggcatctgtagttgtcaaaaagaaaacagagtattgtgccatactttataactactcttccttgaaggaattccatttctctagcatgattccaatgccttctctgctctgattttgaatgtcaacccttttcaatgtttatttacccaatgtattagttttctatgcagcataaaacattaccatgaatttagtggcttgaaaaaacacccctttattatgtcacagtttctgcgggctgggagtgcaggcaaggcttatctgggttttgtgttaggggctcaccagacgttaatacaggtgttggctggggccatggtctcatccaaggttttgttggggaaataactgcttacgtgctccatttaagattgtgggcagaattcatcttcttttcttgttgtgggcagaattcatcttcttttcttcttttctgttgcctggaggcagttccttgtgctacagcccttttataacatggcagcttacttcttcaaagccagcaaaggaacctctgtctcctgtctgataatcataggcatcagatgatcataggcatataggatgatcataggtataatagcctatgatagcctatcataggcataatagcctatgatagcctatcataggcataatagcctaaggcataggcttataggatgatcataggcataatagcctgagacttataatgtaacctaataaagggagtgacatcctgtcacctgtagcatattctgtggatcagaaacaagtcacaggttccactcaaacacaaggagagagaattttgcgggggtgtgactcattggaggtcaccttgggtgtgttgcccactattgagtgcacactatatgctcaaaaactgttgattgggtgcccactatgtgccagcatagctttagttgcttgcttgaaatatacatcagggagcatcattttcctttttcacttttccttctagtccagagggagcattatctgcttcccagatgtgctgtgtccacctgcattgctgagtctttgcttccagctgtgctcccagcttggggtgcccttctatgtcctctttctcagttataatccttgtcagactaaaaggctcagctcaatttctgtggctttcccgaaacctttcctgatccctaaatcattgtgggtggcatgggagcacttggttgtacctctcttgtagcaagcatttaattctgagttgtattgtagttacttgtgtaaatatctatttacttcaacaaagggatcatgttctacacgttgttgtcaattttttggcctcattttcacatgggaagtactaaataaatgtttgttgaatgaacttcccccagacagttgaccctacttttaatttttttcctttttccaggaataaaaataatcaacaatccatctttagcataggtttgagtttctgtctgtaaaatggggacagaaaggttgcctctagctcttttcttttctcttcccgttagccccagtgaactatagcaatggcccctgcagggcccacctaggacctgttagcttagcttgaaaagatccaaaggtgaaggctatggaacctcccaatttcgcagtgttctagttcttagtgaggtcttatgcccctcttgccctgcatttccttcctgtcattttgatgcctatagcagaacttactgctgaacaatcagtgctggtcctgctgaaaacgcatcgagactgggtggcagactggctttccagccactgaaacgagtttctggtggggcctgtcatcccagcagcagtttaggtgcttttgctcaatgtgaagttgcattttattttccctaattactgactggatgttagaaatggtttggcattcaattctttagctccgtgtaaggcaataaaccgcttcatcatacaatccatttaattaattacctttcattttgcgggtgctgttagtatgacgtcgataaaatataatccaaatgttttctgatgcagtgttgcctttctgtctccttaccctggggcttattacctcctggagcaagatttaaaaaaaattaaaaagcagaggaaagggaaattcaggtaaagcagcaagaaatattcctgacattggactctgcaaaggcaaagggtctagcattgatttcttacatttaatatgatactaaagtgaaccagatattgcaaagctggaaaagaaaataatctgcgttggcagaatggtcctttatggataatgtggatgtgatgtagttactgtccactgcaggcaggattactggctgtccttgcagttgctttcgctctccaccttccccaggtcatccatgtccctttctgaatctcccacaaatgaaagaaacacatatcaaaacagctgttcctataaggcaacatcaggaagacttgggatttgcagttcatccagtgaataattctttattgaggtggctctacagagacgggccatgctccaagagagccgaagaaagaactggtccatatctgagcttgactctttggccattcaaaagggtgtctagggatgggaaaggccgatgggtcatttggaaagctctcggcataagtgggaccatgaacaagttccaagctgggtctgtggtaaaccatttgttcaatattaagagagtgatgatggaagaccaaaggaacatgtagtctgtgaagttaaggactgttcagtgtcagggaacagatgatgatggagatttcctctagatatcttgcttgcatgtccctgcgacacattaattttttcttcttttttgagacagggtcttgctctattgctcaggctagagtgcagtggcatgatcatgactcactgcagccctgacctgctgggttcaagtgatcctcctccctcagcatcctgagtagctgggactataggcatttgccaccacatctggctaattaaaaatttttttttttgtagagatggggtcttaccatgttgtacaggctggtctcgtaactgctgggctcaagcagtcctctcatcttggcctcccgaagtgttgggattacaggtgtgagccactgccctcagccatgacacaatttttaaaagctcctggggctgatccagggataacagtaacatgggtttagtgggggagaagggaataaccttgactttaaggaatcatcatgagttttcatagttaattctcatttaaagaatttcccaaggtctctctgtgtgtgtttttgttagaatacccagttaaatagggagagtcttagtatttgaatagactgagacaaacagctgctttctgacatttgtgtgtgtgggtctcatcactctcccatcaacctccaaatatttatagaacattcagtacacacaggggcgaggtggacctcctttcctagaatgaccactccatcttttctgaccctagatagcaagatcaccccatctccacctctgaagtaaaggctatagtaacttgcaaacgactagaatgtctcagcacccctgagttatggttcacaatggggatattaatagttttggagattaaatgaagtaatagatattaagcccttagttatttttattaaagttattatttttatcattattggtaatgggccaactgcctacttggagctgaccttaaccatgtatctttcacaccttctctcttgccttcctgtagagcaaggctcattttttctagtgtaatcatgaatgatataatattttttctgtttaactatttctttaatatttttcaaaatataaataactttttttgcactatatttgaatattaaaatgatttgacccaaaagtttgaggttgagtatgtatttatgtcctaatggttagaagagaatataatcctgaaaataaataaggctggtagtcgtagggagtggttctctgggggtgattgcccctgtaaaccccacctcccagggggcacttggcaatgtctgggacatttttttgattgtcataaccagggggagggtgctactggcatctagcaagtagagtctatggatgcttctaaacactctacaatgcacaggagagccccgattcatttttaaacacaaggatgtctttaatgattgctgccataacaaattaccacacacttagtggcttacaacaaaacaggtttgttatcttctacttctattggtcagaagtctgacatggggctcaccaggctaaaatcaaggtgtcagcaagactccctttttttggaggctctaggggaggattcattcccttgccatttccagcttctagagactgcccgcgttccttgccttggggcccccgcccccatattcaaaaccagcaatcctgagtccagtccctttcgtgcttcaaatctctcctgcctcttccatgatcacatttctctgaccatctgttatgcctccttcttgcatgtctaagggccactgtgattacattgggccaacccaggtaatccaggataacttccctattttaaggattagcctccttagttccatctgcaaacttgaatttctttcgccatgtgatgtgacattcacagattccagggacaaatttgtgggggctactattctgtctaaacagcccaagataaaaaaatcattcagccccaaataccaagagtgccgaggttgagaaaccctgtcttaagagaaagctttctagtccttagagaaagctgggtcctttattcaatgtggataaaagaaaaaagctacctttaaactgactcacttttgaagtgttaacatcacagcacatttaataatttggacaatttgcattaaaagccactgctggccaagatatgatgataacttagtctacacagtgaggaagtgaaaaatctcctattaaataaatgaagcagcagcttctggtaacaaacatataacaaacaaacatatgaaacagaatattcatcttttcttcaatgggaataacacatgacaaaagtgaggctttcttcacattgtttgtttatagaaaattcatctccaccgaggccttatgttaaatttgctctctgatgttagcatttccaggatgcacagggccactggagtatgttcttatgatcttaccatttatttaccttgatacaaaactccaattactgtcagagatgcttcttgttaaatatggtaagatctccagcttctgagagtgtgaatatgtatttgattctctggggccaggctcagatggaagttaaggaatgagttctggggacgtgggtgcaaattaattaaatatctgaagataaccatggaggaagcttgggctttagagaaaaggctgaaactcagggagagaagattgtatatcaagagactgtgaggttggtttttttcttccactgacgctttctttcctggtcttgcatggtgtgtgtgtgtgtttgtgtgtgtgtgtgtgcgcacacatgcgcgtgcatgtgctggtgtctgtgtgcatgctcatgcacacatgcttgctcatttactctaagtgttactgtgcttttgtgttgctttcttgtatctttcaatgcctaaagcaactcttggattatccaaaatcgggaatcagaatataacatataatttccaaagacatcaggggagactgttctccagataaaatgttagaattctcctgatatattcaaactgtcatatttagttactggctttctttggcaatccaactctattttattcatgggctattctaaaaatgtaatcaaaggacacctactggctacaagcaactttgctcatgtctagtagggctgtgaagaatggtttgaatttagtgcagatgcaggaaaatatgtgctgtcatcaagagcctatcacactttcaacttataaaatatcttgactggagtctggccagagtgagtatggggtggaggctttagtgaggatgaatgtattgggtcagataaagtaaggaccgaagcgagtcttaagtagactataaattgaacagaatgggatactattatttttggctcaataagtagaaaaatggtactatgcttatcttttcttccattttttgacttgcatttagtctctattttagggttatatatattttttatttctggcagccacagagacctgctttggggaagcactggagttctgtggttctgaatgtgaaaaagaaatgatgcatcattgttgttgccatgctggggaattttctggggaaacatttccattccttcatagaaatctgttctgtgcttaggcctaggagaatgatcgtttcctaggtataaagcacatgcctgcagcagctcagttatactttataaccccatagcatataaacaatttgatttggaaagccagttaagttcttcctttgcattccatcttatcggcggcatcagttgttttgctatcctcctctggtatggagaagataaaagcaatgcatttttagttatagggataatatgttttcagccttatctgaagaaacgaccttttgcttgattgttattagcacacaggggttgtaatacgtcaaaaccccaaagacataccaagactcaaatgcaaagtgatagggaagatttcaaaaaccagcagaaccacggcatggtgtaggtagtttcaaatcgaagcatgcatcggactctcctagcatgcttgttaaagcacagattgcgggacctcatccccagagtttccgattcagtagatctagggtgtggccctagaatgtgcatttctaacaagttctcagggaatgctgctgctgctggcccaggactgcgctttgagaaccagtggcatagttggtacacataggcttaatgattttgcatctggcttccaccatttccagctgtttaacctttggcaagttccttaatcccttgctgcttaattccttggaccaatattacctgggaccttgaagtcctgggttggtgtcccattcatacctactgaatcaaaatttgcattttctttttttagacagagtctcgctctgtccctgaggctggagtgcagtggcacgatctctgctcactgcaacctccatctcccaggttcaagagattctcatgcctcagcctcctgaatagctgggattacaggcgtgtgctaccacctggctaatttttgtaattttagtagagatggggtttcatcatgttggccaggttggtctgaactcctaactcaagcaatctgctggcctaggcctccaaaagtgctgggattacaggtgtgagccactatgcccgacttcaaaatttgcattttatcaagatcctcagatcattcatttacacattacatttgataagcacgacttagtttcacttcttatttttattttctgtaaaatgggaacaatacttatttcttcccagggtgttgtcaagtgaaatgcatgtcaagggcttagcagtagtgcctggcacaaaacgtgccctcaatgaatgttaccacttaaaattattaagctgatttgggatggaagagccagcaagttctctcctatagtaatgtgtttgttaaaggtaaaatgtgtgtgtttctactttattttcactttcttcctcccccttttgcccttaagctcatcttttatgggtttctagtttcttcgggcccacaaatgttgagtgactgttttgggtttgagggcaataggtttcctattttacccactttatcatataagccttctactaaagcatcttcaattatcttgaggcagtgtggggaaattctgaaagcaaaattagtaataaattgaaagatgtgtctcagtctgttgtgctcccataaaggaatgcccgaggctgggtaatttataaagaaaaaaggttgatttgactcacaattctgctggctggaaggttcaagattgggcatctggtgaggccctcaggctgcttccactcctgcaggaagacaaaggggagcctgtgtgtgcagagaccacagggaaagagaggaagcaggcaggggccagtggcaggctctctcaacaaccagttctcatggaagcggtgagtgataactcactcactcctgagagaagggcactgcaacattcatggggaatccacccccagtcccaaacacctcctaccaggctccacctccaacactgagatcggatttcaccatgagacttggtggagccaaacaaaccctattcaaaccatagcagcacatctgtccagcactttggaaagcactatgggagaaggtcttaaagccaggcagacttcaatagggtgtagacaccaaaaaaagttgggaattgccattagactctctccccttcccctttcccattctttcccattcaattctaaaattgttttcagaattatgttaaattattttgcccaactatgacctagaaaagattgatgtgccttaagaagttttctttgcgatgaagcatttcaaggtttcttggggaggctcagtactctaacttctgaagacctggtctggctcagggtgggcctccgaatcctctttgtttgctcctgggatctggctctaaacagcagatgctctagcttagagtgaagggtgtcacctctggcactgtaattagtgggcctggtgtctggtctgggactaacataccttgggcagattcctcatctatgctgaatcccagtttcctcatctttaaaggggaatcctcatatttttcctacctctattccaaggttgtagtaaatacaatatggagagatgccttgaatatcagcaacattgttttatcattgtcagttttatcattgtccgttgggcagacccctgggatacaagagtagagctggcttcagagaacattggagtgtactggtgtcagaggtctgctccctaaactcagattggtgaggttttattgagaatggttgtgaaaacattggctcataaaggctgggagtacacacacgaagaaggtctgggctgtttccaatttctgcagtttggggactggcaacctcctttcaatgtccagcaggtgagacactgctgagagaagcctgaggaagtgacagctgcagctgacattgcagagagcagaagccaactttttcactggatgagcaagccactttgtcctcagtttccctttgatggaacctctgccacctgccaagccctgtctgtttcctgaatgccatagcaggttgtcccatagggagggcaggttgtaaagggttaaagaagatgccatgacttgaattaacaagtctatggctaggggttcagttaagaccacctcttgtttgaccaccaaccaacgttccctgcttcagctttggctccttaaaggatgtgagggatcaaactaggaagcttttatatgcccatttagattaacaaacaaacaaacacatgatatttgactgctagtaagcctttcctcttagggagaaattacagttgttgactctatcacataccctccatgcctgattcctggcttcttatgaaaattcccatccttgattttccccccttgggctagcccaccttcttggataagaacaggttttcttctttcttgcatattatccttgttcctgactctcccttgctgtgttgctgattcagatttccagtattgactccaaccttcccatctgtgatctcatcattctaacctcttgtgctacagatgctggaaaacaaaaagctacttgaaaaaactcccttagagttcagtttctgtgtactatgttggtcctacctatgtacaagactaggtttcagagctgagcaggatggagtgagaggcagagtatgaggcattcactttttggtgtaaatcaggggtaccatgttctacactcacaccttcctgctggctgcagtggtgatattttcctccattgtggcaggacattgggaattattcctggaagctctgcatgggtgtttgaagctacctaatgcctagtaatgaatcactttgtgctgaaattagctagagtggtttctgttggctgaggctgaatctaactgatatactgactggatacttgccattttccccaatataattcaccagctttcacacctgtattcttgggccagcgagccaatcttaccactagaaccacagcacctgttattttggtctgacaggggtcttccccccttacttccaggtacatttcctggcatgaactttgctgctaccactgccaatcaagccatgtcctggggcttgaaccatcaaaaagtggtactgaacagaagttgcttaaattcaggatgtgaacggatgagttatctgtgagtttacttagtttcctggcctaatcctgttctgatgtttcaaatgcattggtgtggtggaagctgatcagaaattctccacctttctttcttattagatatcccaaactttcaagacatctgcaattatttactcattcatttatcatattttaaaaacattatctttttaaacaaatgagaagggcactatgttagtctgttctcacgctgctaataaagacatactgagactgtgtaatttatgaagaaaagaggtttaattgactcacagttccacgtggttggggaggcctcataatcatggcagaaagagaatgaggaggaaagtcacatcttacatggtggcaagtaagagagcttgtgtaggggaactcccatttataaaaccatcagatcttatgagacttattcactaccacaagaacagtatgcaggaaactgcccccatggttcaattatctccacctggccccacccttgacatgtggggattattacaattcaaggtgagatttgggtggggacacagccaaaccatatcaggcacttttcatttcaaaaatggctgcatatgcaattttctaggtatattaaatagtatccccaagagaatcttttctgaagaatggaacatatgtgtacaggagtaaataaagtaaaatttgaggaatcaggcatatcaaggaacatccagagtcacactgaagactctgacttgaactttggagttgtggatttttcaggtgagctctgttccactggtgcaaacaaaaaatctcaaaaaagttcagagcctgtccatcaaagcctgttggaagagggtgcctggtgatatgttttgattagagaggggttctacatacgcaaaacacacacacacacacgtgcacatacacacttgagttgttcctttcaagggcacaattaatctttgcctttcatcacaatccattcctggaaattgtgttgtaaagcagtcacattttcccataagaacaatataataattgggcattgcaatcctgaccaaagacttgccattaaataaaccatagatgtggtaaaaatatgtcgtaaaagcaaagatgtgacagctgtaaacctttgtaataattttagagaataaaattaagctctgtcatataaatgggctcaaatatactatacacattgattatataagaaatttcgatgaactataaagtctatataacataaaaagtacaaatctagtgcatcataaatttgacctaaaactattattctagctataataaacattaaacatttaattaagaatcatttttctttccttcttggaagtgaggaagacatttactactgtatgattcaaatggcctaggtttctcaacaagagccaaccatatgccttcttatctcagtgaacttcccttaacaagtagagacattacagaaagcctcccaatgacctttacaccatagcccatggaaacatttattgccactagacagcaggtttcaaactactgaatgggggaaatgtgggtgttataaaggatggtatagttttgttctaaggagtactgaatgaatggatagttacattggaaaaagtgaggtctgagggctgcattggtatagttttgagacttgagcttgctataaactctagagttttccgttaacaacacatttcatgtttattcaatgctttagtgcttaatgacttagaaagaacatctacaccttcagtagccatatggtgctcttcagcttctctttagaagagcaagttcaagagatgtcaacagctctgccactattttcttaataaagcaaaattgaaaaatcactaaaaataacacattagctcatttctgttaaatataacctttgagtatgtgttgtaatgccgtgctttctggttcatagcttctagtacctggaatagtgcctggcttgtgattggtgctcaatagatatttgttgaaacaaagaaaaaaagacagaaagagaaagagagagagagggaatgaggaataaaaaatttctcaaatatgagctttaactactacagggctcccaggacaaaccttagagtatgcttacagagaggatgccttgaggaagtcagaaaaactggactcccaggagtggttcagggtggtccaaccagcagaagaataaccagccaattcaaattcaaattcagcaaggtgaatatacaggaaatcagttgagtagaatccagggtcaggcagtttaagaaccaatatgattcaagaaattaggtgagatatacatcatctgccccgtctttctcatttagtctccccagatcttcttgtccaatccacttcttctcatccacttcaacttgcacctataatccaataatccttaaacccatctttcgagcccaacatctcatctcagccctagagccttatatatgaatatctactggatatatctgtttgactctcctgaagatacctcaaattcaccttattcagtactaaatttgttttatcttttctcactccaaatatgaatatctttctacttttactttcttggtgacaggctaaaaccttccttcatcggactttcttgagttaaagaggggtgtgtctgaacaagtttgaattcttttcactgctgtcatcctgtcttagttttcaggtgaaaggcactcagtatccagggtcttggctagcaggttctgttgtgttgatctgtgtgctggaaacaatttcttcagagctgtacatattgggaatcataccattttggaaaaagcctcttgcaatgtgtatcaatgttgctttcaacacattttaagaatagacttatggtattaaaatggattaactctggggagagtggctgaaggaagatttaggaaaagcctgggacggaggcgtttcctgcgatacagaatgttcagtgttaaaaccaggacaggcttgggcaagctggggtggctggtcatcctatgaaggaatgttttccttactttaagaataggaagacagtcaataaaagtgatgtgtagaaaatcgttggttgatataaagtctttttggccatatcaacacataagaatgacaaaactatttttatattaacttgtttagataatgagactcaatagatttgtaatgctgtaccatttaatagaattttcactgatagaagatatagatttgtgatagtatttactgttgaattaatgagctgcttgcctatatccagataattaatacagagaataaaaaggaatatttgaaaatattaacattccaaaaatatattcaggcaaatattccattcactacaatgggcattttgaattacttaaaaatagttggcttttatggtcaattggctatagctatgttactggtaataaaccataaatcttaatgcatcaccttttgagaccaacagggatgatattttaaggtaaagagaatatggaagaatttatacagcatgccaatttcattgtaattcttattaataaattagcaaggaagaggtagcaaaacgatgaattgctggaattcattaatttgagaataactctctttgtgcttgagccaattatttctaagatagagtgcttggaggaggcagtaatatccagagctaagatatcataaaaatgggggagaaatcactagtgggatatcatagcagtgactgttgtctaggaattataatcctagttaaaggctaactgaaaatgaacttgaccaatttcccagaaagctcactttgtattttagtggttaagtgtgaagattgcctgggttctcattatttgtgaaaccttgtgcattttagctgtactcttcaagccttgattcttccatctgtaaaattagagtagttacctcttgagctgttgggttgagacaatgaatataaaattgttaacagagtgcctgaaagagtgttagttgattttatttcgcattatacattattatatattaagtataatacaatgtataacataactgttatgtaatatatttataatgtatttgagctgctataacagaatactatagacagggtggcttaaacaacaggcatttatttctccagttctggaggcttggaagtccaagatcaaggtgccagcagttttggttcttggtgaaggctctcttcctggctgtattctcacatagcagaaagagagaaggctctggtgtctctttctctttctataagggcataatcctaccatggggcccctaccttcatgatctcatctaaatctacctcccaaggtccccatatcctaatattatcacactggggattagggcttcaacatgaattttagaagggataaaaattagtcctggttgtatgaaatatatttacataacaaaaaataacaaaactaatttatgttcgttattattattaaataaattttgggattatcagtgctgagatctgcaattgaatgaaatgacatcttgtgttacattaggatagttggcaatgtcttcttttttttaaaccgttatttttcctttactttaagcatgccctgaatttggtggtttgaaggatcacacattaccaaaaatgggttaaatgtatacgtagtgattagaaagacaaaacttagacaaacatcttttgggggaaaataaaatctcatagtaaatgcattcattgagttctggacagtaagccttgtgaaagtttaccgttccttagcttaaaagattttatgtcgtctttgagagctatcaaatgggaaactctggggtagccttgcactgtgtttgaaaatgcaagatctttgcaatttgcatcctcttggtgaaatgtcagcagttcttcaaaagatttaatgacaggaataaattaaagagacctcatttcaaatcagtagctgattgccattaacaatggatgcctaaacatgactctgggccactaatttaccagtggtctctttacaggggcacacaagcattagtcaaagattaagagtggattgtaagaagtgataagctgaatgactgataaatataggcaatccttatgccagaagggcttggttatatatttcacaacagagaagaagaatgaatacatttgatgaagtttgacccaggttggtgagatgatctgtttcaagaattgaagaaaggaaaggagtcatgtctgctctcaatggtgggtgtttgttgaatgaatgcatgaatggtgaccggtgcaatgggggttctcccaggggaatacctagatttacacggatgctctttctcagtagtagcctttggatgaggaaaggaaattgagttgggagacaccccaaatcgaggtgttttagcctgaaagggtggagggagcaagggagcacatgaagcacgtgaacttggcctcttcacaagggtcttcacaatagtcggtaatcacaagctccatttcctgattggtggttcctgtgggagggcgagagggggcttcattccctgctgataaagtttaatgtcaagtgtagactgatttgcttcacctccaggcccttttttctcaacttagggatggcggctgtttttctgtcagacacaagcttcacttaatgactgtgtagtttattacccagtaggtcatatcctgtatattttaagaacaaacacctcggagactgtgacttggtagaaggagatgacatgtgtcactgctgttattttcactagagcctggtggaaaaactaattacctttgcatctgggcaaattcagaggtcagtttaccactactatatcactacatgacagggaacatgggtaattaggtgggatgtgtaacctggatattccatggatctcattacatcttatttagaaaggctataatttgattggtggaaaattaaggcatcttctcatgggtcattttatctttctgcaataataattcttggcttgattaaaaattgatccagtgtcttcaagtgaatttattattgctgcaatctatcaatcacccccagacagataatctagttcccatctttatctgatttgaaaaatctgtcacttattatgtgttgtttttttcaatcatttaaattgatagcattctaggaaggcatttgcaaccacaggtttcttggagaagagcttgcagacagtgtgggtacatccttttatggtaaaggattggataacctgtcaattttaataaatcgattttgaattggtctatggcaacattttcgttattaaaaatgatcaaaccccattttggggagtgtgaacaattgaaggatagtggaaaggcagatttgcttcccccttcctccatgtctctcatagcttcttttgttgaatcagaagactttagttcatttatagattctgagactgtaaaacttacactgaactctggagagtcaaccaaaatatgtttaatgagccttgagaaattgcacaatatcagtccatatgcaagaaaaacattttgagttgattcaggcattcaaagagacgtgataaatttaattattcacatttttataggttctttcagctcatagtacaactccaaataaaagatacaaaactctcaaacatcaaatgtatttttaaaccttaccttaataataatagcatcttttattaagtgtttactgcatgttggtaagaatataagtactttatgtgggttagtttatttaggtatcatagcaactctatgggtggggtttaggcatacagaggttaagtaatttcctgaggtcacacaggtggtaagtaagcagtgacaccaagatttgaaacttggtagtctgattccagagtgtgttgagtttcattactttgctgtctcctgccttagaattctctctctgaggccagatagaaggaagggtaaagccaacaatttcaatagaccaattaatagatatttattgaaggttgctataaatggggcaccattcctgggtacttgagagatacaagattttcactgatataaataatacaaataagaaaagataaccatgcgacaatctcctataagtgacatttatcccaaactgacaacaggattggagctatagagattcagagaatcaacaattgtatgtccagcaattctggaatgcttcaccgaggaggaggggtttgcattgtgtcttgacaaaaattctttgcttgaccaaacattagtgaggctcttaaatcttctttccctaagtccatctgtacacttccttgtaaaatcaagttgaacaaaaactctgctaaattggtttagccaaaaccccccaccctccatatctaatccccttccatatctgattgggttcctttaccatccccaggtaatgtctgatcaccctggcatctatcttcagcaagagtcttgtttagccagagtctcccttacccttgatgtctcctcttagtcattttccatccaccaacccccaccctgctcctcggctataaattctgagttgcccacactgtgttcagaattgagcccagctctatactgagctatcttttccctatagtaatagtcttgaatgaattcttttaatcactttaactctgatttttctttgacagtcttgaggaacacatggaatctagtgaggcatagagaaggtaaatggctttccagacgggagggatggtgtaaacaagcatgggaatgggaaggggtcagatgatttggaggatggatgcctggagcagaagacatggtactccgtaggatgaaatgccgataggtcatcaggggccagatgtgtaaaccccgagcactcaggtgaggggaatggaatttgtataagaggctggggcaagacattggaagctttggcacaaaagtggaatgtaagcaaagtagaccctaagagggtgagttgaacatagaacagactgtagggcagacccatgatgtcggagggctgctggctgaccacctgcaaaaggcagacaatttttagccttggggaaaggtggagcgaaggtcttcaaaagcgtcagactgaggctgatacaatttggccttacaccatggcctgggaaactggtaccctctgttctgcctcagttccccacaactgctcaaccccaccttctgtccatcacctcccattctgatttctccctcagctcggatgtgcctggttatctcctcacccagcctgatctcagcctcatgacttggcattcctttcctcggccacttccttggctggcttcagcctcgaccagaacctgcctccatctgttactcaggtttattgagactcatggctcacaagcctggctgcctcccctggctgcgtgcctcatcaagcccagcaggagccagggagaccagcgaggaggtaatggccttaaaaataaatcatgagagtgttgtgaggggccttcaatagatcttgatagtggggctttagaggaaggaacagttgccataagtatgtaagaagttatttattaaaaaatttaaggccaggcacagtggctcatggctgttatcctagcactttgggaggctgaggtgggtggatcacttgagctcaggagtttgagaccagcctgggtaacatggtgaaaccccatctctacaaaacatacacaaattagctggacgtggtggtgtgtgcctataattccagctacttggcaggttgaggcaggaggattgcttgagcccaggaggttgagactgctgtgagcccagattgcgccactgcactccagcctgggtgacaaaatgagaccctgtctcaaacaaacaaacaaatgtacatcactattaggatcctaggtagatagagctctctctgattaatgtatactttcatctgatttatagttttttttttttttttttttgagacagagtctcgctctgtagcccaggctggagtgtagtggtgcaatctcagctcactgcaacctccgcctcccgggttcaagcgattctcctgcctcagcctcctgagtagctgggactacaggtgtgtgccaccatgcctggctaactttttgtatttttaatatagacggtgtttcaccgtgttagccaggatggtctcgatctcctgacctcatgatctgcccaccttggcctcccaaagtgctgggattacaggcgtgagccaccatgcacagcctatagcttttatttaagaaaaaaaggaaataaaagttacatgcattcacacgattatttaacaaattattattgagagcctagattccaataataggaattctacatctttacttctggacgactgaaaaaacaaaaccttaagttttatagcatcttgtactttacatagcgttttcaaatatattcactcgacgctgaggacatctctgttggtaggtgctgttatttcatttttttcaagggaagaaaataaaatttgaaacagtttccactcagaatgccacccactaacgaacggtggggtctgaaacctgggcttccgacttgctgagcagcgctctccaccgtaatacggctgcctgcggaaccggctgaccggaagtgtggctgtgggtggtttaccgccagactgtgatggtggcggggcacggctgcgtgactggtgagttggtgaggacggggcagtggactgggagcaaggcaggccctgccagggggactgacaggctccaaggtgatcttcctaggaatgtccacagagtgtgggacctggccttggctgggttgggtccattgtgtggctgcaatataatcaagtggaggacagctgtgatgagactgggggatgctgctgttgggggagtgtgcccagaccccagggcagcaaggccagctctagtcacacggattaatcaggcaaggcccctcatctgctgttgaacatgggcgcgtggaagcaccggcttaggaacaggctggcgccgagacggatgcttgaacgcttctatggaggctggagggctgggctggggacggcaagggcccgggtgctgagctgagcactgacaggctttgcttccctttgtgttttctcacttctgtgcgcgttaggcggggtccgggcatttaccttgttttggtttggtgataattccctctcacaatctgcagcgactgttttctgtttcatgggcttccgggtaagttgcttggtggatgacctggtgtatttaatttactgggctctgactctgcagagggcgctaaatgctatgggctacggtgttcagaactgggttctggagcccccaggaatcccagcaagtgtgttgctaccagaattccttctcttcctgttctttttgtttctgattcctaagccccttcaagtcacatagaggaggctatttgccaaattgtgtgagcccattagtatgtcaatcatgataccttccaagtgcttgccgctttgtacattccaaaacactttcatgcaaagcaacccttggaatggttttagaattcctgttatatagattggaagatatttttatttccatttcatacattgggaaactgaggctcaaaggccataacacaggagaggcatagaaaaagtctcgctccaggcctcttgacatgtgagcaagtgccctgccggacatatgtgcttcctccctggattttcattaatttttttggaaacttggtattgtcattgagtgagctgaggtggtgagggaggcttactcttgtcctttaacattagcttttcaataatgctgaagatgatgatgataatgacaaatcgcctataagatatgcccattcagaagtctcttgtgtagttcccagcatttcaaggaattcattaaaaactgacatgaaccccaggtgacctcaggtctcctaatgtgccaatcattcatctaaggaaacagaactaaattacttgtacctgaaagaaagccttttgcaaaacaagagtatatacgcactctcaccggagcccagcagttacattcaacggtggcagttattataaatggctatattcctacggcaaccctggagaaagaaagaaaattgtgcaaccaatttaatgaggtgtgtgtgtaagagggatggttagcaatttgtctttaacaatcttgttatacagcaagaggctctaaggggaaagagagaaagagagagaccgggagtcaatgctctattttctaacaattctcaagagagaggagataaagaccaagagaattcactgagcaaatgttttctttgtggcaacaaatgcaggcttcgtgcttgcagaaccactaggcactatgtaacgagaagggttataaatctggatgtaacgaaggtttcaccccagtggtaatagagttagagggtgaaaggttgcatcttgttcaaccttctctggaatcgttttctataatgctggcaagtaattttgtggcatttctggatgcttaactgaataaaaagaaatacttatttggtactggaaccactattagcaaggtgggcagttgagaatctacctaagtatccagtaatgttaaaatgaaatggcagaaaaccattttaattgcatcatctagtgcctctagacatgtgggcacttgtgttcccggtggtgacacacaatatggagagatatttaattgggcacttttgaaaagagagcccctctcaacagggactacatcttgggcttgtgcttagaagacattcagctcaagagctgccctggtgcacatttcctctgcccctttggttgcctttaggttcatcaagttctaattagttattctttagttaattcagaaatgaaacctttattgagcaattactatgtttctggccttattctagattcaatgatgtttagaaagatttttacaacacagtttgctgttagtctagactttttgctccctagtgaaagggaacttttggcagcatcaagaggtaattcagtaggattctatctcttcaacttcataatctccattgtttcccaaaaccaattctaatattaaaaacaatacaatgttttatcaacgttaagatgccctctattgttaaaaaaaactgttattttatgtaccacttgcataaagaaaaaatatctaagatgggaggtctaataggagacctcttcataggcaggacaccaaagagctacgcactcggtgaaaggggtaaggaaaattctccagcagggccagcaaggaaacttgcatgtctcagccttgggcctctgcagagggaagaaaatacaagtctctgtgagaatctgagccataatctaatacagatggagcatccttaatctgaaaattcaaaatcctaaattctccaaaatccaaaacttcttgagctccaacatgataccacacgaggcaaattctacaccggacgtcacacaataggctccagtcaaaatgttatcaaaactgttttgtgtacaaaactattaaaaataatgcagaaaattaccttcacactgtgtgtctaaggtgtataggaaatgaattttatgtttagatttgagtcccactcccaagagatctcattatgtatgtacaaatattccagaatctgaaaaaatctgcaaagcaaaacactcctggtcccaagcattttggaaaagggacactcaacctgccaacctgtagtcacacaggtctaaagtctgaatttacaccattggtggggtccaataattctcaagcagagaaatcaatttccagtgggcttaagtaagtttggcagaaacaaatgcagaatcctttctggaagaattcgacttcatttcaagcccacagattataaaaacgtattgattacgtgatacactctgattttagggattatgaaaatgtgagaataatgtgcatctaagaattgatgaacagtgatagtaataataatgcttttcatgactagtatattaatataattttatgtaattattattctttccatttgctatggacagtgaaatttttctgaatcttctgtaaactgtgaataaaagcattttaagaattttcttggctgggtatggtggctcacacctgttatcccagcattttgggaggctgaggtgggaggattgcttgagctcaggagttcaagaccagcctgggcaacatagcaagacctcctctctacaaaaaacaaaacacaataaaacaaagccccccaatcccccaaactttcctatgtttattgatctgtaatcaacaagcttgctattcatattcagttctaagaaagtcccatagtctctccccaaattagattgccctccaaagaccttcctataaagaaatgagggtaccccagctgaaacccagttctaaccgacttaaacaaaaaaaggaaatatatggttcatgtatccacataagtccaggggttagatatggctggatccagacactcaagtgttctcatccagaccttgtaattgctcatctcttttttctgctttctccggtgctgtgctggattcagagcttggctctacatgaggctttcagcacccttgggcctaaatcttcatccctgtttgcagtctcaggagaaagcaaggttctcttttccacttccatcaaagacctcagaattgagtctcattgtttggttggatcatgtgtccatctctggtacaggaagatcatgagttggatcctgtgtccatttctggcatatgaagaaggttttgggtacccccaagtcatagggactgagagtggagaggagtgatcctcaccaggggtgcaataatcagaacaaggggacttggatgctaatcaagatggaagtcatgagttgtatgctggaaacagtggatgtcctctacatgtcctccttgtcctggaggaggtacagttcacttgtgggcatacccacaatgaggtaaaatgacaactcaagatgtcaactgaaattaaagatatctctgtgagagatgtgacaaggttctatgtaacagatgccacaagaagtaccactgtaagagctaaaagaggaagaagtgcctggactagggtaactgggaacaccttgtggaagaatttgacaggaggagaggatgtggtgaaggatgagggagaaccagaaggaaaagagtaagaacaatggtgtgcggagggataagcaagatcatggtatcctaactctggaaaattggttgactttgtgtgtgcctagtgttctgtggactcctcagcttgtgctcaacccctgcttctattcctggacagaggacatactctccagtgaacagaagaactccctcagtctggagaagtccactgggatgaaaagattcctagatctaattctgatcctgtctcaaactagccgtgtgactggagcaaggcatttaatttcttttggcttctgctaccttattggaaaatagtaatgatttacctgtcacatttgtctcacagggttgttgtgagaacccagagtagtgtttgtgaaggtgatttgaaacataaagttctgacgcaaatgtaaagcattgtctatggcacacagactagtgttggtctaattgaaagcttgtactctgcttgtttcaccttttatttttgttagggactttctatagattgtgaaaataagcaataaatttatgtgggttactagaattatgaaaatggaatttctgatcctgaattaaccagctttcccctgagccagtttatctacggcaggtagggtatctctatgctgtaataaaatttccttccttccttccttccttccttccttccttccttccttccttccttccttccttccattcatccaatatttgttgagttgggcacattacttagcatatacgtagaatggaattaagacaattaacttagaatcgctttgcatattattgctttatttgttttcaaagtctgagaacaatcaaaagcacagtacattatcttattgttacaactaaaaagagtcttgtagggcttgaagatcaccatcatgggcagtaattattgttgcactaccagtgcactaccaatgtagtgcaataataatatgctagttatcagagagttgtgattggtgaactgcaagaaaattacctttccttgttaaaaaaaaaacccaaaaccaaaccctcgtatcagaaaattggttttcctgaatctaagaatcttgctttgggctccccatttgattgggcacaagctttcagagatttagtttctcctccttcttccttaagacatagtctttgaagaaaggataaatttttaaaatgcctatttagaaagatcatccatgcctagaaccttgatggcataatagcaaggtaatttttttttttttttttttttgagacggagtctcgctctgtcacccaggctggagtgcagtggtgcgatctcggctcactgcaagctcacctcccaggttcatgccattctcctgcctcagcctcccagctgggactacaggcacccaccaccacgcccggctaatgttttgtattttttagtagagatggagtttcactgtgttagcaaggtcatatttaccaagcttgtcatgactgaggaaattcttggcagaacaagtctccatagaaattgtctaaatatggcaaactcctaaggaaatgtctcccgttggggaaaaggagtgtctaactggtcccacatgttttccaggggatctctttccccctctgtcactttctccaggcagttcttatcttttgcgatgtaaaggaaagaaacatgattttagggagggcctaaatattaagcatcctttcccctgattcattctaatgcaattgtatgcagatatgaggggatttttttgggttatatctgtcacttggaatttctccattaatggagtctctgaagacattttaggaatgaataatatcttttatctcattggaatatgcatgggattcccatcaagtctgtccttgtgtgactctgagtagacagccagtaagatttcctctttcaagtctctgtcaggaataaatactcagttcttcagtagtgcccagatgaaaacctgatagtggaggctttgctctgaaagcagactgtggcccagctgttctgtggtttatgaattttttagcaaggctgaggctggtcgctgaacaagcattggctgagttcaggcatacgctgggggtctgatgacttcaagtaggggttagaaaaatctggctgtgtattctgggtttcccctctgaggttcggaggtttgttcaactttggttcaaagtcaagctcagaaaatggggaatgggggaagccactggcccagcaacttgcagtgactctcctgcaagcagtgtggaaaaggagccacactgaggtcaggtcaatgcccatttggagagggatgctgctgactgggccactctgaaaatcctctctccagtggaaaaacaagtacctggggctctgcctccagcaaaggctggctttctgtgtcaaatctcacttcagctgtgctaaaggaaggagtggggagaatcagagtttgggccaatggggagagaataaggacctaaccgttaagagaaggtggcacttcgaagacccaaacttacccagaaattgaataacttttcttctctgtattttaccttcttgacaaggcatctgagggttgaaggtcatattttttataccttgcctcaatttctttaagcagttgtaacatcattgggccaaagggaaatactcattggctagatgtcattaccatttagtggccattgggaagacaggctgggagccaggaattaagatacattcttcctaccagcgagttctgacatttgagtctgtggaaaacaaagtgaagtgagaataacctcttccaatgagaacacatggacacagggaggggaacaacacacactggggcctgtcgggggtcggggaaggaaggagagcatcaggataaatagctaatgcatgctgggcttaatacctaggtgatgggttgataggtgcagcaaaccactatggcacacgtttacctgtgtaacaaacctgcacgtcctgcacaggtttcccagaacttaaaatgaaattttaaaaaataacgtattcctcaatctagtgatgattggggaaataattgacctatctgattatgtggatactcaaaataaaccatccctatcaaatgacccctcaggcctggctgagtctgtttgactcacagcattcaagcttctcccctctgatctcggggagatttaatatgctcatgctagcagcctaattcaagcagaccaggtgaattaggatctcagtgggtggggcctagacagtgacgtcaaagctccccaggtgaatccagtgagcagccagtgctaataatcattcatctactgtatcccaatcagcaaggtattgtggctgccacatcatcattttgtgtagggaggccagggtgctgatgcagggatgaaagttgctcttttttcttggattgtcaggaaaggcctggctgctcaagtaacatttgaacacggacatgaaggaagtgagcaaggggtggaggaaaggggtggaggaaaggggtggaggaggagggaagaggattccaggcagcgttacacccaccccacaacagaaggctagtttctgaaggtgtgtgggtgggagacaggggaggcataatggtatttatcttgctaccatcacactggttcagatagaatcagacaggcgccttgaatgcctcatcaatgtggaaaaaatctgatggttagaaataacccttcggttaaaaataacctgaatcctatggtaattattaaataatatgaaagcacaactacagttccgtttagtttaaacagagtgaggtttcacagaatctagcatcataggtgcatttaaaaagacaaggaaagaaaatacgtgagtgtacaaaaaacagggttgctagtagggaaagaataacgtactcgcttatttgtttggctttgatctgcgtatggtagaagcctggggaaggagcccatgggcaggtcacggttatgcttttgaaggtgaccagtggtactgacatgacccaagtgtgactgcttcatcgtcctgggcctaattaggtaagcaaggggttcacagtgcagattatttcatttattaggttcgaatgaaacctgtgggaattggtaagatgtgatcttaaattaacatacttcctgcagcacctgcgatgtggtattatcagaattaattaaacagtctgaaatcgcaggcgcggtgtcaggctgggataaccagatgcctgagagcctgcatgtctgggctgggtctccaaacgcttgagcagtgtctttctctccctctccccacatcctgacgggtctcgctgtggagcctttgaagcttctgtagacgtggtgggggattctatggggatgcatataaacaagtaaaccagtgttgctcaaattttaatacttttctcggtattgcccgggatgccaatgattttctgaaggggtagatggaaagcctcagagagctggctttgtttttctctcctctgaggcttcgatcagttttatttggtggaacaataggaatccatcttttaaagtctctttctcccccatctgcttgcaaaaggcgctgttacccagatgaaatgcatgtgtagaagcatacagtaaaatgctgtgtctctgtgtgtgtgtgtatgagcttgtgtgctgttcttttctggtggttgtgccaattagtaacatgtagatttcaatagaccaacagaatttgtcactagagttcttttgatctgtaagccagtttccatggaacatggacagtggcccagttgtggcctggcttagtggctaaaatgcaacttacattgtgtgtaggcatttgccatgaaaaaagtcccctctatacttaattaatgaatccgatgcatttcagcagcaaggaaagggctgggtcaaggatcaaatgccttcagacaatagtgtgcagagaggggctggtttagaggccccagtgcggttagttttctcaaggcatccaggagcagagggaagtctgttgcacccagtcagttgtagaagcatcataggcagaagggtgaggtctagaaggcaactaaaataacgatgactcataccatattgacatattcacctgtaccttcattgaaaagttgctaatttttcaagacccaaaattttaaacagtctctctccaggtaagttcacttgtttccccttctctgcccttgaacacaatccacactgctacaacagctgtcttctctttgcattgcgattagtttcctcttcattggattataatctccttggacacagtgtcttattcaagtttgtaattctagcattgaatctgggacagtcttttgaacatgtgcttactgatggttaagttgtgtttttcaaaaagaaagtagttgaaggagggatgagagggcaggaatgaaaaaggcaacttatacaaggttactacctagccaggagtgggacagagaggcacaccaaggtcattaggctcttttcactccatcacattgccaagaaataattagaaccttagcatactgaaaactttttatttatttattttttttagacaagatcttgctgtgtcacttgaccacggcttgtaatggttaatattgggtgtcaacttgactggattgaaggatacaaagtgttgttcctgggtgtgtctatgagggtgttgccaaaggagattaacatttgagtcagtggactgggaaaggcagatccaccttcaatcttggtgggcgccatctaatcagctgccagcatggccagaataaaagcaggcagaagaacgtggaaagactagactggctaagcctcctggtctgcatctttctcccatgctggatgcttcctgcccttgaacatgggactccaagttctactcttggtccttcaactacagactgaaggctgcactgtaggcttccctacttttgagattttgggactctgaccggcttctgtgcccctcagcttgcagatggcctattgtgggacctcaccttgtgatcatgtgagtcaacactccttaataaactcccctttatatatacatctatcctattagttctgtcacactagagatccctggctaatacacagcttcttgcaactttgaactcctgggcttaagtgatcctcccacctcagcctctccagtagctgccatgcccagctgattttgaattttttgtagagatagtgtctatgttgcccaggctggtctcatacaactacctcaagtgatcctctggccctggtctcctataaaaacttttatgggagtgctatcttcctattcagttggctcgtacactttacaagtcactttacttgtgaaagattgagcaaaaaatgattttgcttacattaatgatgaaaaaggcattgattttttttctatgtagttttgtctgctgaaggaaatggagattatacatttgcctattgtattttcttttttatgttgttcttcatagagccactcatcagagaccccatacacttagctagtatctctaggcaaggccttatgccttatataattcctccttttccctttccttcaaaatggatgagtcctgggtgcccgtctctgagcaccctgccctctgctggtgaaccttccatgccttcttgttccacagatgcatgtttatgttctcaggctgctctcttgagtgttatggggttggatgggggacctcaggctccagaactcttttggaactttctgagtacaatttttaggtccagtaattactagcagagactctgagctgtcagtggttagagtccaatcattttgacagaagaaattgtaagtcagagtcgttctgtgagattataatagaattgtagagctagaaggtagcttagaaatggtccaatcttttctttcatggttatagaaattgacgctatagaaagttacacaacacgggacagagacaggtctagaatcgggctttctgattgctagctcattactttctctactacatgcaccaaaggcaagttttcactcctttgttgctattttctgtcttagttcctgatggggtcccttaactcctcacttctttgggaaagaaattcaccccccaattaaaaaaaagacaacatataaaagtaaatattcattttataaatatgcatatcaattaaatatacatttattttaaatacatgtgttaattatgttacatcagatcacaattaacagcaagtgatgatttgcatataatcaagcttgtatattaatcagttgtcaatctcaaatgccatttttcttcatagagcaccttccatggaggcatatcagggccagggatttgaagcaagtgatccccctacatatttgagagtgtgctgctctgtagctctgtgctacttatcttctgtctttggccccctggaatcccatttttagtccttcagttaggtctggttgttctcagccttccctcctagaatctttttgaaggaggagagaagtttctgtttgtctggttgctcttgctctgttctaaaggattttctagaccatggaggctgtttactaggttacaggtgtcccactgagagggacaggaaagaagagaactagtaagtgtttcaactggaaagaaacttataaatactaacacaaatccttcacttagtagataagtaagctaaggcccacagatgttaagtatcttccataggaagtctaaccaaagtcttttgaatctctaacctcttcctgaagtcatcagcatccattttgctcctgcagacctccgcctcccttacttgcctgtagcacttattaagatgcaacttacgtggcatgcttgtcacgtgtaacttgctcctctcaagagatggttttctaactcttctgtaaccaccaaagtatacagtaagtgcacctggtatgcagtaagtgctcaatacatatagccataaagagtttgttgattggaagggtgtgaattcatttgggaaataaatggaaatgtctcttctttatggatatcatggtttaaagcacctaagtgcatttttctttcagaaaaccagtgaatcgtttcttgggagggcagaggggacaaagagtggacctgtcgctttatcactaggctctcctctttccttatgctgggcctggttccaaaagtaattaatcaacaaggacaacttctttgtcccccttgccctttggtctgcggtatgaaaaatgttatttcagctagaggaattgtgatcacttagcatttcctctacatttggtccctgatctcattgtaagacagcaggaaaaggtttttcatttgatttcttgactaattacagttagacatttcccacttttacattattctagtgaaaatattccacttcagcatgcccatctctgctctcagacgaaacatttttccttaagaagcattcatttaaaaaaatagtttataaggaagaaccaacatgttataaaacaacggagaagatggtgatattaatcctttagagcaacactgcatatacctggggtgtcactaccttttgccatatgaaaaatccacaggagaaacgtgtggccctttgaatatttatggcctatttaccatttgcagggtaataaactaggcaatgtgatagattagacatagtttttgtccctaagagtttgtagtatactagaaaaactgaaacatggtgcctgaaggcatttctgtctttttaggaaaatgatttgtattcatttatatattcagcacacttttatttggcacctattatgaaagatacagtactggaattagccagctaggggccctgcccttgtgatgtatactttgtggtaagttgtaaacgtgagggtgggtccacaggccaagacttcagaggaagtctatgctttgacctaccttcataacaattatgtgtatacacataataactgtatataaactataaaggacaaaaccgaaaagacatagcgaatcccagaaacaagacaagtaatagagcagctacctaaggtggtgagcagagctaaatgaaacccaggcctggttagccccaggttgaggagcaaatagtgttggctgagaattaggctccaaccgggactaaaaacacttactgggaggaagggaggttggatctaggcttactgcttgaaaccaaaggcaaggctgtgggtctctctactccaacacctagttgtaaaagaagaatagaaaaaaacataccacttgctgctgttagggctatagcttaaaaggatctgcaaacttagggaagattggggtctaagacagagccttgtgatcctgaaccaaatcaagctgctctttgggtgatttgggggtatctgtcatcatcaaggggcaatgacctcaaactgctttgatcaaaccaggttctggacagtggctataggaggccagatgcaggaaaacacagagatgggtaaagtcagagaaggggcgtgaagacaaagcaatcacaaaaattctctcacttaaataagcctcaaaagctaaatttcaaaccatatgaagaaactaaaggctaaggaagatagccaacaaaaccaacaatcagaaaattaactaattcaaataaaattaactttttattatagctggtactgtttatataagtattttgggaaggcttacacgttaattagggggaaaataatagccatcaaaatttaagatattttacaagaagaataggcagaaacaaaaccatttgaatatgaaaaagaatcagttccaaaattagaaataaatcttaaaagtaaaaatattatcatcagaataagacactcactagttgagataaactctagataaaacaggtgatggaatgcttagtgtattgaaagtcaacacagagctggtcacctagaatgtagcaaagagaaataaaaagttagtattaaaataaagcaaaaatggcaaacaggcatatggaaagatgctcaacatcattaattatcagagaaatgcaaatcaaaatacaatgagatattgtctcaccccagttacaatggcttatatccaaaagacaggcaataacaaatgctggcaaggatgtggagaaaagggagccctcatacaatgttggtgagaatgtaaattagtacaaccactatggtgaacagtttggaggttcctcaaaaaactaaaaataggtatgatccagcaatctcaatgttgggtagataccccaaagaaaggaaatcactatatggaagagatagctgcactgccatgtttgttgcagcactgttcacaataggtaagatttggaagcaacctaagtgttcatcgacagatgaatggataaagaaaatgtggtacatatacacaatggaatactattcagccataaaaaagaatgaggtcctgtcatttgcaacaacatggatggaaatgaagatcattatgttaagtgaaataacccaggcacagaaagacaaacactgtatgttcttatttgcgggatctaaaaatcaaaacaatcaaactcatggagatagagagttgaaggatggttaccagaggatgggaagggtagcagaggtctgcggggaggaagtggggatggctaatgagtacaaaaattacttagaatgaatgaataagacctatcacttgatagcacaacagggtgattaataacttaattgtacatttaaaagtaactgaaagagtataattgattgtttgtaacacgatggataagtgcttgaggagatagataccccattctctatggtgtgcttatttcacattgcatacctgtgtcaaaacagctcatgtactccataaatatatacacctactatatacccacaaaaattaaaaataaaaaattaaataaagcagtgaagagacagccatgaaaaatggctggagatgtattagttaatacatctaataagacttcccaaagaagagaatggaaggaatagcggagaagcaacatttgaatagataatagctgataatttccagtattgaaaaaagacaaaaattctcagatcaaaatatactctgagaatgaaactatataaataaatataaacccacatctagacacatcctgttcaatctgcagaacattaaggatttaaagaaggttttagaactgaaaacattattaaatttaatggaagtataatcaagctaaaggaacatttctcaacagaaaaattaggtgccggaatacacattatatccaaagtgcttggtgaaaatatctgtccttctataattttatatacagctaaaatatcactcaaagtgaaaacaaaacaaaacattttcagatatacaaaggctcaggaaatttgatacatggagacctactcaaggttgtactttagtatagtcaaaagcaaacaaaaactgaaccagaggaaagacatagcttggaagacacagtaattgtgttagacataggatgaaagaaacattgatataatatactggtaaatttacttatctgttggttaaaatactcattttatgcacatgtgtttaaaacaagtcaaagtagaataacagacagtaattaaatatgagggtgtttcaatgggtagttcagcaagctaaggtccgtgtgtttgcgaagcagttaaaaattggttagaaagtaatagatgagcttggaataaaaaccaactgaaacaaaaccaatatccagatgttagaaacccaaagtaaaagccaaacagaaatgttgaaaacagagagatgggaaaaagtatatattaagcaaatactaactaaaagaaatcttatatagcaatattaataacagacaatgtagaatttcaggatacattaataagtgtaatcatggacactgaataataatagaagaaacaatctaccaagaagtcatgatcatcataaatccgtattgcctaacaatatagtctcaaaatatatgaagcaaagtcttttttaaagaacatcaaagaactcttttatttttaaagagtcaacctaaagaaagtagagtaaataatataataaggataagagcataagttgataaaattggaaataagatcatcagcaaaataaaattatttggagggtgaacccaagctcaatggtacctataaccttctttgaagacacctctaaaaaaagaaagattaaaaagtataaatacatagtaaaaagaattgttactacagatagagtagaagtttaaataagagaatactgtgaataactttatggtagtgaattacagacttagacaaacaattttctagaaaaatgtaaataatattttatttaaaaagtgataataagccccaataaaccaataaccattatgagtatctcttcttcttttttaaaaacaaagatgcattttattgcttttctgagcaactgggaactttctcatagagagacatcactgtgtagtgatgtaccactttgtgaataaaatgagacctgcaggtaaaagaaggtaacttttatgcacattggactaaatgtagctgggattaatagcccagataaagcaaaaccaaaagggaacaatgcagtttgataaaaaattgctgggcatatgtctcaggaatactgtgtagcattttgactcccgtcttctttagagataagatgtccacttttataagaaatacctggatttttctccactccaccaaacacattttgttaatatgagttgaattttgaggcaatgggtttgggtcttaatgagatcaagaatacatcacggggttaagaaagcatagcaaactgcctgttgttactaaaatatttatatagatgtcatgtgtccactctaaaatattataaggaaattttctattcctctccccttttacccatttcctcttttggctccttccttctcctctcctagattttgagtatctcttcttaataagtacaaggcgtaaacagttccagaggtggatatttacatgcacttaaggactggataatctttaccttacacatagatttcagaggataataaatgaaggaatgctgttgaatgcatttggagctcattgttagcagcaatggacaagggcataacaagggaaataattgtggaattttagagcattttagaataggaatatagaagcatttctccaaatggaacttaagagtctttaaaaaatgatgattatgattaggtaaggtttatatttgatatgaaaatgagttaatcatcagaatattaatgtaatatattctaagacaaaaggataaaggcatttaatctgctccatggatacagaaaaattattcagttaattcaatgctcatttatggtaagaattctaagataattagcaaaagagggatcctccttaacctcataaagactatgtttataaaactcacagcacacctaatatataatggaaaaactttagaagtagctttatcaacaacgttaacaagaagtcaatgatatccactctcttgcttctatcaacattgtacttaagtcatagccaatgcaataaagcaagaaaatttaaaaaagataaaagaactgtaaaggaagaaataaaactagcttgtttccaggcaacatgaccgcctacatcaaaaactcaagaaatatgcagacaattttcagaaataatactagagttaagcaaagttgttgaatcacagatcgatacacaaaatcagtagaatggaatttcagaagtacacacacgtatgtacagatatacatgtatacatacatatataatgttatatatgtattaaattaataagtacttattcatgatatgtgctttctatttataatatgtgcttttcctaaattccattctttccttatcttagagctaagatattatggcttcatttaaaggcaatgcagaagaaatgtaagtgctataaaactaaacaagtactatgatagacagttctggagtgaagatcaaaagtcaaactattagaagaggccattgcagagatcattacacagtagttttgtgatcactaatcacaaaatataataggaaaaagctcccagttacaaaagcagcatgaatgagttaggaacgtatataacaacaaaaaaagacttctatgaagaattttactaaacattatttaaggacataagagacctgaataaatgtagaattataccatgttcctgaatgagaaggttaagtaccatagagatagtactttactccaagttaatctataaattcaatgctagtacaataaaaatttcgtctggattttgtatggaacttgacaatctgatttcaaaatttataaggaatagtgaattggcaaagacaactggcaaagaaaatttaaaaagaataaagtgggaagtcatggcctattggatgtcaagaacaaatagatcagtggaatagaatgaggaactcagaacagattcacatgtatagttacttgatgtttaatagacatggtattttaaatcactggggaaagatactcagataatgatgcaaaggcaagtggtcatccatattgtaaaaagtaaaattaaatctctatatcatatatttaaaaatgtgaaagacgaatctgcaaatattttaaaagaaaatacttgacaatatatttttggctttgaggtttggaagtgtcacttatactggacagaaagcacatatcataaataagtacttactaatttaatacatgtataacattatgtgtgtatacatgtaaatatttacgtgtgtgtattcttttaaataaggacatatacaatgaatatattgataaggtaagttgcagactggaagaatatatttgcaatgcataagctttgaagaatttgcatcctttgaaacagatgcagaaaactatgatactctggatctggattcctgggtctgaatcttggctctatcacttattaacagtgtgtgaccttaggcatgttatttaacctctcttaacctcaatttattttcactttaaaaaatgtggataacaaccttgactgtgttgtagggttgttttgaggattaaatcagttaatgtgcatgaaactggagggtagtgtcttgcatttagtgaacacctccaaaatcttagccattattaataatattatccagaatatataaaaattacttaaattggccaggcgcggtggcttacgcctgtaatcccagtactttgggaggccgaggtgggcggatcacgaggtcaggagatcgagaccatcatggctgacatggtgaaaccccatctctactaaaaatacaaaaaattagccgggcatggtggtgggcgcctgtagtcccagctacttgggaggctgaggcaggataatggtgtgaacccgggaggcggaggttgcattgagccgagattgggccactgcactccagcccgggtgacagagcaagactccgtctcaaaaaaaaaaaaaaaaattacttaaattaataagactaacagtccaatagaaaaggagtaataggtatgaattaataatagaggaatttgatatggctaataaacatataaaagatgcccaatgtccctggtaattacacaaatgcaaactaaaacaatggtaaagtgtaaatttatacccatgaggtgaaaaaatctagaagtgtgaccttgcaaaggtgtgggaccacgtgaactctcacacactattggtctgagtgtaaattttcaaaatgggtgccactaattaagagagtaatttggtgatgtctagtaaatctgaaaatacacataccttacaactcagagcttccattgctgagaatgtactatagagaatttcttgtaaatatacataaggatatgtgtaagaatacttactgaagttttgtgtgtaacagcgaagaactcgaagcaacttaaatgcccatcaagaggggactagataaataaattgtgtattcatgaaataaaacacagaattcttcactaaaatgaagtagtgctacatttgtctcatgaataaatctcaaaactttaagatagattttttaaaaaagtaaattaagctgggcttggtggctcattcctgtaatcccagcactttgggtgagcaaggtgagaagatcacttgagtccaggagtctgagaccagtctgagcaacagtgagacctcatttctacagaaaataaaaaaacttacctgggcatggtggtgtccatttgtagttccagttactagggaagttgaggtgggaggatcgcttgaggccaggaggttgaggctgaagtgaaccatgatcacacccatgcactccagccagggaaagagagtgagaccctgtctctgaaaacaaacaaacaaacaaacaaacaaaaaacgagaaaaaccaagataaagaaagacatagacagttttgatacatttgtatataattttaaagcatgcaaaacaatattatatagtatttatggatacataaataagcagtaaaagtaaggaagaatttgtgagaatgataaacatcaaattcaagatactggttttctcttaggagggcaggaaaggaatgtgtggatatgggtacccaggtggtttgaaatacatctataattttttattcatttgaaataaaatgaaaaattctgaaacaaatatggcagagtacaaatgtttattcaagctgtggggagggagtgagaactgtgccattgttctctacattttcctgtgtgtttaaaatatttcataaaatgaaaataaaggaaaaaatattggaaattcacacaaatatatatgtatacatgcacatttgtttttaaagattcttctcctttaaaacttatagcatactcactaaaggctaaatggtacaaacagatatgtttgagtttggtatctttacactcacataatgttaagctcatatagaatttcagttgattaagaataaaactaacagctgtttaagcatttttttcttactttgagtcattattcctttaaaaataattagccaatctcactaatcaggttgatcacaaacgaaaagaaaatgtatttattttgtgatggtcttcaggacccaggaactgagccatgagctcatgatgttgtctttcaaggcgatcaaattgaatgaagaataatacatcttcagcatttaatatttccatgttgaaacagggaaagaattatgaagagagctggggtaagagagaaggggccccagtaacctgggatggggtgaaatgacaagaacactgtcccggcaccagtaggtaccaggtcccaaatctgttcttcccagtgtgtcccacttctcttttccaaatggagggttagctgtgtgatctcagtagtccctcaaggctctcgaattctgtgattttgccaacctaacgtgttcttttctgtgccattttcaaagggagacataatttgatacaattatatgcctacctttagttgtatgtttaatttcagtgtatttaccttactgcttaaggttctcctcactcctcacttctgtctgctgttcattttgaactcagcccgggacacatatgtgacacattaaactaaatacatatgtgatttgtccttggctaaccttggtgttctcataaccctccattttcctatggagtgaataagagttggtgtgatcttaaaaaaatggctgccaagtgcacctgcattagctctctaactacttggttcttagtgagttaggatgtaaattatgtgcatttttgagaacttagctctataaatagaccccaacctattttacaaccaaaggtattttaggataaatgaagtacatctctgaaattgttaaagaggctcctcctctataataaaaactaaaaataaaatccatctaatctaatattagggttacattagaaatgggccaacatgcctaaaattatatatataaatgcatattgatgatggtgatgatgacccttttgttctgagctattagaagtaaatggcatataaagtaattaaaataacagaattctgggaagtggtggaatgagaaattaaaaactgatataattttacatccttgtggaaatccattgatcataattagcacataagctaaatcagaataaatgggtagattctaaagtacgagcataatatcataggttatggataatgtattttctttttatttaatggatatatgattggttctcaaatgctgttcaactggtaatggaaatgggtttcccttaaaagccttttttctaagctttcatagcaccaagacattatggttttcttcaaatgtgatgtagaccccatgtacatgctgtcaacttaaacaggtactagaatagacagctctggggtgaagggcaagggtcaaacaatcagaggtggccatctattgcagagatcatcaaacaggcatggcatcaatggattcaggcaagaatgttagaaattaatcagctcagctctcagtgtttagccaggctgattatatatgccctggaatgtgagcatgcgatgacaggcctgagaaactaaagtaataagagtccattcccaacaaaggccgggaagacggatcaatttgcaatattcttttctgcacccatgcaacaaagcagaaacatgaaagcagaacactaagggatgctccctatgaactggacaaatcaataaacatcagtggtaaagaaaaaaagtttctcattctcttgggtaccctgagggcttttccatctcaggaaagtgatgagtggtggtggcctctgtcatgttcccttcacctacacggtgtcgtctcctgccgtctcaaggtgaacactgctaagcatcggcagaaggaggattttgtgggagtgtttaaggaaatgactgcctcttgttagagatgcgctatgctggccaggaggtggatggacaactctgtctgtggcctcggggggatacattgaagggagggtcaaatgaagtaagatagtgggtctccctagccccccaaccatactaaatgaaccaggtgagtcttttctactgtcagtgtttgaaaggctgcataatattgagggtcctctttattttcctggacttaagtcatcaatggagagcaagaaaaatagtcagcagacaaagaatagccaggaagcaatttagagatagaagaatatgcttaggtctaagacagactattaacagcttgattccaattctggcataatgtggcagagacccagatctcaatgcatgtgtgagcatgcgcaagtacttgtgtacatctgtgcaagaatgtgtgtgtgtgcatgtacatatatagggatgagaagaaaggggctgtcagggtaagcactctctgaaacttatgagactgtcagactgattcttttctcttctaaatcatttcccataaaacaaggagatgattatctgactgctagaggaaagcggggtattatatttcatttggggggaatgtagatttatggcagatggaatggtttttctttttttaaaaccaacagcccagcaatggcagagtttgtagcatgagttaaagcactcacctatgttttgcattttaagctgatgggatttacagacatttgtggtggttttgggggctgtgccattgaagggactctcaaggagtgtaaggaaggagaaagaggccatcttgtacctattcaacaaagacagtgtttttccaatacttgcccacggtattctacaattagagacatctgtgtgtcaggacaatggttaaaaggggttttgcaaaggtggaggaaatgaatttattgactagtagtgacaaagcatctaccttcaggcaacttacagtcagtggtgaaggtgggtaaggaccaaactcgtccactataaggtggtatttcccagtagaggtccataccaggccccataacagcacagaggaggaagggctaagcccccctggatggccagcgtgagacagtgtggaaagagcaggaggccgaggagggtgatgtgcatctgaggatctgtgagtggcttagatagattgactggtgggtgtacattgatgaagggtggagtatggaaaacagataagtcccacagcaagggaggggaagaattcagtttttgaaatttggaattttaatggagttggaaatgtgccacaagagaggggagacagagagagagagagagagagagagagagagagagagagagagagagagagaattactttggttggggaaattaagctttctgactaaaagaaaaggtatccatcccccatcttttttttaaactagaggaaaaaagtgccttttaatgacaactcagtccccgagatgagcatcataaaaacgtgatgcctgctgcaggtgagtagcccttctttcctcaacagttcttcataatgaaagagcgaggtttcagccttccccccgtcttagcctatgccctgtggcactgacctggtttatcagagttctgctgtaggtgccacacagagcaccagcacattcccaacgtgtggtgtgattgtcccaggatgcaggggacacacatgctactttacttgcacactctggattactcgcctgttaatagtcacattgcactgcttgctgatcttaaacctgcaggaattcaaacctcctggccttttacatgtcaatggcaagaagccatttttctgtctttctctacaatagacatatttgtttatttatttttaaattttagattctgggggtacaagtacaggtttgttacatggatatgttttgtaatgatgaagtttgggcttctagtgaacccgtcacctaaatagtgaacatttaggtaatttttaacactcccctcctaccttcctgcattttggagtctccagtgtctatcatttccagctttctgtgtccctaaaactgacattttggacttgacagataagaggttaccttttatgtctttatcacttttttggtctttttgtatactaattatggctaccacaactatgagaagccatattgcatttaaaagtgtttataacaaaatactttcattttaataagattggaagtaacaatttaaaaaataaaaaatacaactttctggctgggcgtggtagctcatgcctttaatcctagcactttgggaggccaaagtgggcagatcacttgatgtcaggagttcaagaccagcctggccaacatgacaaaaccttgtctctattaaaagtataaaaattagtcgggtgttgtggtgggcacctgtaatcccagctactcaagaagctgagacaggagaattgcttcaacacaggaggcagaggttgcagtgagccgagatcgtgccactgcactccagcctgggcaacagaataagactccgtttcagaaaaaaaaacaaaaaccaaccaaacaaacaaacaataaaaacaaaaacaaaaaacaaaaacaacacacacaaaaaacaactttcctaacaatcttaatgttactgttatttcatttgtcttgttcacatacagaaaaaatctgtacagctttgcaatcctaaaatagacaaaatcttgctttctggttttgaagtaacatgccttaaacctttttcaggttacaacaatcttcaaaatgaaaatgtaaaatggttgcataatattctgtaatgtgtctatgccatattatatggacatattccactgttggacaatcaggctgttttctatacattaaccatatagaaagagcaacaaccttttttacatattttccattttttcttttatattattttcctggggtaaattataggggccaaattatgaggtcaaagataagcagtgtttttatggttgttgaaatgcaatgccaattgctttctaaaacccagtgccacctcttccagaaatgtgacaaactttctaggatttcatcctcattagtgatggcagagccaagactagttattggttattgaccaacaattacaaattcaactcaatgggatgccattctgccttcattttttccgtttggtgctacaaataggagagcatctgtgagatatttaaaggccagaatcttgcttgctgccgtatttccagcttctcatgcacagcaaaggctcaacaaatatagttgaatgaataaaatgccttctgaattctataacttttttttttctgacataacattcattaacctcatgagaaactggctttgaagggaggatgctgtcattctgtaagatcagcttctggccaacatctcatgacctatcctaggctgtgaagattttttaagcactcagctctattgtgggtcctgggtccagtgttccaagtgatatagttctactgttggaccctggaagaagattgcagctgcagagttcaggagcagggaggtgtgtgggaggccaaagtgtggggaatctgctttccctggttctccagagacatcccccatttgctcaggatggatccatatttaccatcatgcttggccggcctctctacagagatcgccctggaaggcaactactttgttgaaatctttttcctgaagtccttctcctttctctttttggatgtatttattcacatacatgctttgattgacatggctggctcctgctagatctgagtaccttggtagtaccagaagccaagtgcttcactgttagttgagtaacaactggttatgaactagaggatctgtttatatcttaatatatcagtttatactaacaaatgaaacaactgctatttttcccctccatcccgctatcagttgagtgtttataatgtgccagacacagtgctagatgccttacatatattttctctaatctttacaacaaccctgtgaggtaggtatccatattactgtcatctactgtatcagtaggctcccagcagaaaacagatggcccactcaaattaggataatttgcaaaaagttcagtaaagggactctttacaaaagtgtgcttaggatgcagaaaatctcaaacatagtgtgcttggggctagtactagtggtagagcccctttgttataagcctaagattgaaaagggcagaaagggagtgggtatggggtctggggaggctgtttggggatgctgccaataggagttgaatctttctgctgagggataatgttggtccacagcaatcttgcaacccagtggagcaaggggaataaatatcccaaggttatccttctacctgtctccactcatccattgggaagccagagggccagggagcttgctcaggtgttccatactgtgcaaggtggaaaatggtaatggcggggtggggggaatgaaaagtatccagtacgatcaccaagctcagtgatggctctagtatttatctcattgttgtccttttcctctcctagtcctatctcaattcttggtgatggtgaattcaatattcaggtatttgatccatgaacactgaggcctttcagttattttacctcttcacatccaaaatctttacctcctccaatatctttgcccactcacatggtcacactcatgactttgtcatcaccactaacctacattcattgagacctccagaccaggggtaattccttcttttcactatctgtttctgtcttcgtgttctcactttctgcctttcccaggtaggattcccaggttaatcattagtgtcacctcccctgcaggctgggttacacccctgactcctttgctcctctctgactctgtggtccttttgataaaacccagctctggttaacaccatcacctgtctccttcatgtattcacttgagtcaaccctgttggagaaaatgtacgattgggctaactgatctcattaaagttaggaccaaaatctcaaacaagctctcattcaaccagcccacctactgcatttccctagaggaactgctctctctcccttcaagttattatttaacattcctctcctcaaatcttgtatgctttctcctcctggctcactcccagatgagcttttctttattacctaacccctactccccaccacccaaatccaccaagctatctgtatctattaatatgctgataccttacctcttccctcctgtcagggacatgttctgtgcatatttaaatccaacctatccacttgtgttctaggtcctgtctgcatcctttctcaaggactttgtgctgcagatttctccttttctgtatcacccttcctgtaaactggatgattcccatgggcatctaaacatgttctaatagtttccatcatagcataaactcacttgttccgcattccatttgtgtttctggctcatttctctgctcatcttcacagcagattgtcttgatgttgttgtctgtagatactctccctgcttcttgacctcacattctctcctagttgactcctgattctacttttccaccaaaatggtccttgtcaaggtcaccaatgacttttgggttttcaaatctaatggtcagtattttgtcttcatcttcctggccctctcagcagtgttggatatggctgaccaccctccttcttgaaacaatttttcttatcttttccatggcagctgctttctggttttgctccgacctcactggcagcccagacttagtttcctttgctggctccttatcctctgcttgacctctgaatgagggcatgagtcaggcctttcctttctcccgctctacactactgctaggtaatctcatcatctatgcagtgactgtgctgaaatttttatctctagttcagaccactcccttgcatattcaaatgctgcttgacttctccattggatgactaataggtatctgtaggagacactgctgggaggtcctgcaaactcaaatcctcttcctgaatgggtacctaggctgcatacttcagcctctcataccaataagtgtggccttgtgacagatttctagccatggtatgagaacagaagtatgtgcaccacttctaggtttagcccatcaaaaccccccacaagagatctcccttattccttgtctttcgtagactgatgcatatgagctcagtgacttttaaagccaaatgttgaagatggaggggccaccacatggaagaaacccgggtccctgcattgctatttggaggagagctgcccactaaggaaggaacctgggtccctgcattgccatttggaggagagctgcccactaatcaggaataactgacttggatttcaccagagcaagaaataaaatcttattgtattaagctattggattttgtttttgtctgtaagagcaactgaaattacctaaattaatacagcatcttaaccttaaccagcatctgtccctgcagctcttttgagtctctttatcccaaaactgcctgtgtcctggtcttgctcgtatcagcaaatggtgccatcattcattggcttctcagcagtagaagagtgcctagcacacattaggtgctcatcaatgcttgctgaatcactacatctgacccttgattcatttattcctctctcagtcatctgatccatcagtaagtcctgtaaggtctatttcacaatatccacctgcttctctccacctctactaaaaccatcttagctcacatttctgctgcctgtaactggcattattgcagtgacctttaactagactcccccctgtgctctttcacccttcaatccaatctcctcatagcagctagactgatcttttgaaaatataagtcagctcctatcattctcatggttcaagtcctccagtggtttcccattacattttgaataaattctcagtcctaatgatggtctaaagggctctctgtggcctggctgctgcttccctctctgagctcatactgttccactcactctttgctcataaagctctggccacactggccttttttccgcccaggaacacctcaggcttactcctgccattggacttttactgtagctgttccttctgtctgaaatgctcttccgtgctttccccacggccagcttcttctcgtcatttcagttatcagcttagtgctatctgcagagaggtcttctctggtctaaagaagccctacactcactccctttcacagtaccttgttttatctttatcaccacacttacaactatttgacattttcctaagagtgtattttatggtcttccctctgccccgacaagggactttgcttaccttgttcgacactgtgttgccatcactagtaacagtatctggcttttagtgtatgcctaatacgtggctcaggaaaattaagaaatttacttaagcttctacaagttcaaacacaatggtgcttctttgatttattcagggctcatacatgacttggtcaggcttgttgccaagatgagtactgtgaattattgttattatttttttaaagtttttaaattttacaaaagtaatgtttttattgaagaaaatttagaaaatgtaaacaagcaaaaaaaataaataattaaaaggtagctgtaatacagcatccctgtgctaaccaccatcaatattttggtatgtttgtttgtttatttccttccttccttccttctttcctttctttctttcctttgtttcttctcttttctaattctttgtacacatgttaaacaaaagtggcatcattttctcacagtggaatattggacaaatctcttcatataatattagttttgctcaataagcatcttcttagagagcactttaactcaatgccaagtttagtggtaggtgtgtctgtgaaaagttttattgggtctgccacatggatgcagcctctggtcatggtattgtacctctgcaggcattggatgatgcctatttatcactgccgctgtcctgcgggtggtggtgaaagtcaagtaatgctatgctctctgtggttaatttttttgttcttaaagctaaaaagtgagagacctattgcagaattctgtgacccagctggttcagtggtgacaggctaacgtctcccagagtgactgtagcagcttgcagattggcagtaatgaagctgacctctattacatgtaataaaaataggactcttaatataaacctaaacaagagaggggcacagtaagggctgcattctttttgccttaggtcctggcaaattatcatgtagttactgaagtcctaaaaggcaagacattcagtgatagtttagttacaatttacttttaaaatgctgtacattaatagaataattatactaatataagacatactaatataacagacaaagggcaaatgatgtcaaacttaatatcttggaggtacaaaaaaatttggctttttaatggtgtatttggtggattggtctagagctatattttgacactgattttggtcaaaggataaccattgtgtgtgaataattgaagtgaatcagtctctcagctcatgttgctatgtactcagatgctatagataaatcttaacaatagacctcttctgtagttctacaaggggattttctataagatgtggtgtggcaggctgagttatgtccctccaaagatattcacatcctaatccctggaacctgtgaatatgttatcttacaggggaagaaagactacagatatgattaaattaaggatcttgcagtagggagattatgctggatgattaggataagcccaatataatcgccaaggtccttatgaaaggaaggcagtaagatcagtgtctgagagagaagatacaaggataaaagtagaaatcagagaggagtgaagatgttattctccacccggttttgaagagaaagaagaggccacaagccaaggaatgcaggtggcctctagaaggtgaagttaagcaaacaatttctttcctaatgcctccagatggaatgaagccctgtggacccattttagattcttcacctccagaactgagagataataaatttctattgttttaagccacaaagatcatggtaatttgctacagcagccatgggaaattaatacatatggtcaatttataattcatgagagactctaggccagaatgcatgtcaactctgatcaataggtatgtgatgcctagggctctgggttaagaatgattctgaggctgagtctgttcagtgagagcattaccacaatcaatcagcaatgactgctaagggttcaggatgcacttctctgcctcagacctaagtgtttttggggtgggtaggagagcataacctgcagagcctaacaacaggccattgcatgcagcgctgaaagatgagctctacactgggccctgatagaaacggagattgcctaggtatgtgggtttcagtgaatgatgcagctgagctttcttgaaaggggaaagttgttggctttacccaaatatctggatatcctagaggccttggttccacttatgtctggtgatcccactaacttataattttgggtcatttgatatcctgttattccagtttactaaaaacaaactaagcaaaatctattttggggtaaagtatgaaaaattacccattttaaaaatcacggaagttagtacatcttgcttgtaaaaatcgagccacagaatggttaataaaacctgggatatattattttttttaaaactctcttttcatttgcttttaactttacccgcttttccctatacctcccttttgggacatgaatacacaacacccacgttcatggaatcagagtcttctgggaacagttgtacaaacttgaagatgaatcatgacttgagttttgaggactgtcttggtgagttagaaccaagacctgctgtttgttattaacagcctggatgctattatctatcctcttctttctatggtacaactacaatctgtgaactcacagaggacccccttggcagctgcaggacataattaccacattccagaataccttttaggcgtttggatctatggctacctctttggattgctcccctgctaactaatatgttactggcttgacacaattgacagccggctgtgccggtggcaaaaggactgcctctggggttgtctcaaaatgaggttaatgatgggctagatgagctctctgggttttttagacatcatctacctgggagtggaatgtgtgtgaggctctggtatgatgacagcgggggctctcaccacacagtgagatgtaccaaatgggccaattattcttctaggtggatcatggaaattgttttgctaattttgaatgtaattaaaacaaagcaaagcaaaacaaagctagaccattcttgcatccacaaaaggccaggagtgatgagttgcagaagccagtgaagttgcattttctcctgggtgatggggggatgggtttcttcagcttgttcttccgtgttcccgcatatgactgggacaagccacagggtaatgaggtttgggctgaagtttcagtctctgactgaaaggagactttgtcattattctgatcaattcacacatattacagatatggaagcaaaggcctgtatggggaaaatgctttctcagggatacttagtttgttagcagaggagtcaaaaccagaatttatttctcccaaattctagctggggagggagaaatcctgaggttctgctgactacccattggattgaaagattctcatccaaatattgaacatcttctgggcaggaattatgattgctcatgtctatacccctaacacctgctacctggacagtaggaggtgctcagtgaatgtttgttgaatgaatgaataaatgtatgtaccacagatagttcagggaggtgggagagttgaaagtttcatccactcttagaaaccagaataggccttctgaagcaggggattggctttatctttattgtcttgtttttttcttaactttcattaatcttgcaattatattaaagatatctcatggagtccaaatgtctaaaaatctaattacctctatagagctgtgccatccaatgtagttgccaatagccattaagcatttgaaatgtggctagtttgaattgagatttgctataagtatggaatacacactcaatttcaaaaactacaaaaagggaatataaaatatttcagtaatttaaaaaatattgattatatgttggaaggataatgttttggatatattgagttaaacatcttattaaaactagtttctctattacttttttttccaatttggctactggaaaatgtacaattacacaggtggctcacatttgtggtttgcattgttttctattggagagcattgccatagagcactcgtttttgtgtttgctggccaagtgggttggatggattaagaagttatttatttgatgaagtatcaattagttagtgacttttatgtaaatatccagaggattactactacgtaccatttggtgaagacatgccttcttagatcagttccattagtagatctcaccatgtgtgagtgagagaccaaatctcagagaggttaagtgccgtggagcaggattagaagatggacttgtaggacttcagatttgtgctctgagcctcagctttttcaaacatggtccctagatgatggcgtggtatgttcaggactgagggatgccactaacactttattactcatattagttaaaggatcaaagtttgtgattgcttttacttataaattagagcaaattcaaggctatctctgtgcattcctttcttacttattcctcttacttacttgaattctgacatatttccttctaaagggggagcaggcagggaattgggtacactcataataggttaatggacacagtctcaccctataccactctctctcgatgactatgtactaggcaacaagtcaagtgtcttttgatatctgaccccaccaaattcttcccaacctcagggcttttgcacttgctctttcctctccttgaatgtaagtggaagttaatgcccccaattttagcactgtgagtcttttctcatccttttggtctcagcttaaatgttatctccttggagaggccttcactgggttccgagtcattcctacctggtagaagctatttttgaccttctttgtcttttcatgtcacttttcctaatctgcaattatttttattcacttttgtatgaatatcagcttcacaggaggagagacaggttgctcttgtttacctctgtatcccagtcacctacctgcttttccctatacctcccttgtgtaggacctggtagagacctggtagagaatagagggtccatacctattcgttgaataaatgcatgaatgaatgaaacaattggcatacctaggaacatagcagctgaaattatatttcatctccagaattggccactgtttcacacaggcagtggtcacccctggggagtgaatctgtttctagattgcattcatgtaaggcatgtttggagaaggaatacagaaggcaatggtgtaagtccttgaaggtctgaggtcacatctggaaaagaatggctggactgggctgggtgagaaaatgtggttggatgcagcaaaatttttttctacatacaaagcagaatcatcactttaaaacccctgggtctactacttctttaaagctaagcaggtccttagtaaatcaggtggcctcaatatttttgtcctatatccaatatattaatagtatcacttactattttgaaggacacactattagtaatcctttgtttaatcttagcataatttactctccattttctcctaaatttggtgcagaaaactttcaaaaatgatgagaaatggaatgagttttgtcttgagaattttatctaaaaactttcaatatacttcagataagggaagccaccttgcagctttgcaaattcgagattgggaaacagcagagtaaggcagggaatgtttctgggtaacctggggttggtgtggggacatcccacataggcttttttttttttttttttttgcaagtgatgacttttacaaagaaacagatgggccctttgaggttgctgttcctgcctgagttcagggaggttccagggtaggatttagtagcagagggcatggagccatctcaatgtgttcagctctaggttgcttgactggctgccatcactttttgcctcctgctgacgtcacacacacatatcttccctgttgctcctggctggcaggagagctaagggcagctgcttccaggtgtgaccactgttgagccaagctcctgtcacagcccttattgccatgtagaagcagcttctactgaagttaagcccaaggtaacacagatcagccctctgtattacttctccagggttgccagctcattttaacccagactggtcaaaaattaatatcccatcatttcagcttgcaaagccattcaacactaggtcaatgtgaattcaatagaatttcatatcacttacaataaagactctggcttttttgaaagtgcatacagaaaaaaaaaaagatgaagagagatgaagctgcagatccctgggccagttgtcaaagggaaaaagcctttatgccagcgacaggagctaagcccatcctttttggttcttttaaagtgaaggtgggtttgagcagagaaaatcctattgtgttgaatgattctgtcgggagagaggtagagactttggaatataaatgagtgctagcgagttggagaattaaaactctccgtcatccgtgtattatgggcttcatgtgtgataaacatgcgtgtttccagattaaccccagcctgccagggcctgtttaatggtattattgttaatagcatctttgatcccagtgtgtgtttaccatacttgtctgggagacatctgtgctgagtgatggtggggcctggcttgagcacatgtaggatcttgggagggaagtaggtgactttcagtccacagagacttaggataccttatcatgggggtggggtgggagatgaggtagggaaacttggggtgtgaagaaggagaaagtctacagaggaattcgcaattcttaagattactctaggtccaggttcagtgcttggtttagaaaaagcaactaattttggaaattgggtatgaagggaagtaaatgtggggagaggaaagagggtagtagacacaagaagaaatatttgagagagtgagagagagagagcgtgcgagaaagaaaggtttggtagggggaacactggttggtagaagggaaggtcgtgtggtgaaaggagggtagctatcaactcttctgcccatggtctcccccaggccctgtccctgcctatgttctcagtggcttatgcagaaaaaaagggggacaggaacgggaaaagtctgtaaggcactgagaagcattcttctccctttatcttctcctctcctttatctttctttctctttttgtatcttttcttccttcctttacttgcaagttcaaacattttggtgaagtttagcctgagtgttggaactacctgttcatctttgggcaagtcttttaatgcccctcgttctgagattctccatctgcatggtagaaatgaattgcttgtacatcagagactttgttcttcacaatgtgcacaccagtcagaggtaactgaaggtacacattatttatgttgttaaataatgtatgtgtgtgtgtgaataatatttgaaaaatggagctacaagaagtgaaatgtatcttaaaatgtgcaatacaatagcaaatgtcccatgacagtttttcttctttcctggtcactttgtgaggattattcaactaatgtcttggaagtgcggtgttctgggcatgcaggaaaagaggtctaacccccttgcatcatgcagggctcaaggaggattttatttttcccaagaaaagatgccaattgcagttattctgagtaacaaacaaaacattacatcttacgactcaacattgctttacgtctgaaataataaatcctgatataccattctttgaggaatcatctattcttgtggctttttcccatggaaggccttgacatctggttacaaggatggaaaagaaggtgagtttaattgaccaattgaccaaccaaccaaacatcaaccaaaataaaggaatatggagatttcaaatgcactttgaagtatatctagtgttaggtcaattgtgaagggttccagttgttacattttcactcctttcatggctgggacataggcatatgatcaacccaggcactacagaagttccaggtggtggagaagttgacaagatttccccatgcacttagacaagggcaaggtgtccctttgcttactggagcagatggctttgtacaagctctttaggatagcccatgtcctggtttcagctcagatcattgaactggaaacatgcgtgtccatagagacactcaccttggacagtagtcatctgtcttttttgccttttacatctctccccttttctgatgttttgcccttgaatgaagcttctgagtggcctggttgttgaagcagatggtctggtcattgcctggactctccaaacagtaggccttctgctttaaaacaatttttttaaataaccagctttagctgtaaaatgactgtcaacttgtaaccttactgtttacaccacaatgtgcaataaagatggcagaggctgtgagaatacctgcctggcaattgtacttttgtgtgtcaggccaagaagtgctaaaagctttcagaaatttcaacatttctgactgtgggaaccatttttacaagaatctttttacaacggagaagacgttatttcagagagaagtcagggataaggaagcaatgctcattttgagcatgaagatgcctcatgtacatgaaaaagcagttgaaattcttgcttcttttcctccctccctccttcctacctgcagtccctgactgcaaatccccttgtaattatcctcatcactaaagtctggaaggctcaccttccacaacaggggatattagaagggctaaatgtctcccaccgcacagggagaaatattcctttgtttgaagaggaagttttctcatccaaagattatgtccccctgtgactgtgccatgatcggaagagagagagattttcacgtcccctgtgactgactgttgtggaaaacacagtaatatcagggtttaaggtggggaggtgggagtttcagaagattttgagggggtctctttgccattgaaaggtagtataaccattttccgggattagtgaagatagggggaggaagacacgctgcctaggggatgctgctgtgttaggtgccatcattctcgtgtttggaaatccttctctgtctgttttggacatgtgttctgtgaaagccagtccctgggggagaaaaatggtactagtaccatagttcgttccaaatcggtgtccagttttgacattcagctgataaagtgatgtttttcaggcctatccgttagggacatcagagttagggtagaaaacacctattggttctgcttcattaggtatttatataacctgaaagaagttcttttaacttgaggcttttaaaaatacaatgaaatgattggtggaaaatgactaaatatacactttgatgcagattaaaaacggtttacatgtaagtaatttaatagtaaataaatcattggtaaattacaaatatgttattaccacagtgtagttttgttgtcaactactaaactcgcctcactggggttttgataaagtgttagccaagagtgatttggggctggatccaacctgtaggcagtccagggcctgtgggtttaccttgggtcctctgagggtcttgggtctttgtacaccctcctgtatgccagggcagacagatctcattgactttgactcacactgaaccaagtgtgattttgggatggatccatttcttaggcagtacaggatccagggatttgctcctaagtccatgatggtcttgagtcagacctaggggtgatagattaatagtaagagtgtcccttctccttgtccccagccatggcagacagatctaattgattaaggcctagttagccttgagtctagatgcagcttcaccattcccaggcagcctcaagagttgagctgggagatgcagcccattggttatccataatgcaccacgccctgatgtttgaattgatgtcctcatctcagggcttcttagaaatcctattttcaatggcttgaagttcagtccttaaagtaaagacccttactggtccacacagggttggtgtagtttttattccttattgctattcaacaaatccatgtgatataaacatgaacatcacatggtagagaagagagaattgtgttgtcttatctgagcttggatcctggttgttccacctactagtggtgtgatgttaggcaattatctctttgagcattgggcatttatcccaatgctcaaagatataattgtgtaagatttgcctcgcacggtcatcgtaagagtaagagatgatataaataacctcgcctatttcctgatacgctttaagcacaaataaatggtggccattattagcactaccacaggaaaaagagactagtgcagtgtgttgtggacattcacgaaatgctactctctctttatcctgtttatttcctttgtaggcgttatcacagactatatttatttgtgtatgtgtgtttatttatttttcaggtcatctccactagcaagttagctccatgaggagcttattgatttctttccacaacatagctcaatgcttgatgtgtagtcgtcactcaatagatatttgctaaaacaccaaatttgctttatttttcttaataaaataataatctgcaagaatgcataatgcagctctcctctatgatcccccctccccaccccacagaggcttgcaggagattgtatgaaagtgctgtcttcttggcattgtagggagtggaggggttaataggcttctggggctttatatcaggaatgggagtctctgcagggctggaggctgcctggaaacctttctctcacttccaatagctgtggtgtggatctcactgcaacagtcctgactgcaaaggagctgtctgccccaaggttggacttggcagggctttcctgttgaaatatttcaggcagacactgtaaggctgtgctgtcaataagtagccacatgtggctgtggagcccttgaaatgggatagtccaaactgagatgggctgaaagcgtgaaatacacaagggattttgaagactatgtaggaaaaaaatgtaaaatatttcattaataattcttaatatcgattacatgttgaaatgatgatattttggatatattaggttaaataatatctatgattaaaaccaggtttatttttttcttcttgctttttaaaatgtggccactagaaaatttaaagtgacatatgtggctcacatttgtgctgaccttatatttctctctgccagccctagaatgggacacactctcagggcaaaatagaggaaagagctgtgggccaagtgtccagagctagtctcagtcctgcttctacaagaattcgatatgtgatcttgaataagccacccaaacattctgcaccttaggtctttctggaaaagtctattcagaggctttgatacttaagaaagaaacaatagcgttaaactacactacagttacaagatgctattgtcttatttccattattaaagccacttcggaaaatgtctgtggtgcaggcagccaaactttcctgattctgggaagaatgtatggaggccttgttccatctgcaccaggcagactctttgagggaagaacccaaggcaggaatctctaccttttggagctgactgaatgataactgagactttccaatcatgtggaaattccctacaaaaccccaacttttatgaaacagattgataaactgtaaaagtctcatccttaacacctttgctccccttatgaagtcaatgttatttgtaactactggagactcattcaggataaaacccaggtcagtacctggacatagttggtgcccagtaaaatgtaacaaaatgacctattgacctgggaaatgaggacctttccatgtattagaatctcttgaaaagcttcctcttccacaatccctgctgagaaggaatcagaactctgttgatattgtttatctaatttagactgtgtctatttaatttagcttgtgtctttctaatttatattgtgagccctctcgactgaaattgagtctctcttaatgttctgtatggtgtctactgtgttttctatgctcagataatatgaacaataagaaacattttaggttcttgatgtgcttttttgttaatgtcaaattctttggaggagaacctccttcagaagtttgggatttttagattgtgtctgtatgtctctcaaacatatgggaaaaaagtggaaaattcccagacctagtatttataaatattcgaatataatttataaatagatggaggaatcttcttattttaaaaatccagttatttgacattatgtagacatagtcttgtgctctgatatttctttcacctacctatataattacaaagtagtatacattgagtgtatctgtcttctggtagataaaactcaggtccctactgtcagttgcttgcaattccattccctgtgggtgcacagaagaacctgcatgttgcatttcaatgtatcatttaactcccctttattccttcctccagtgtggagtgagagagcaggaatgggctctggaatctacctgtactagaatctgtgctttctcaacttggtggccttgggcaaattatttatctatttaagccttagtttctgtaagtcgctttagggtaaattatatcgagctagcttagttgtttgaggataaaatttgatcacctctatataatgtgtggaactcagtgataggctttctcataaaaagctaggtcaaaaggacacatttgactttttaaaaattcatagatatgcaagactgcatctactcagtacttctcccccacccaaaggatacctgttttgcaatgaattaatatctctgcaaaatattactcacatgtttataattttccatgcctactttgcaaatggagaaatggagttacttgaagatagagcccaattgctctcagtttaggctgtcatgttcttttgtcagagtaactcaagtatgaaaatactgacctctcctccacagtgaagaacccactcaacaccatctactttactttaatatcctccaggagaatgggaagtcccaatgcacaggtcaacccctgaacaattaatgagcaccagtgtatgccaggcattgggaaggtttcaaagaaaaccaagagggtccctgtcctcaaaaaacttgacatctgacgggtgagtcagagcacataaatgcacatgaaaacagtaacaaggcaaggcaaagcaagtcaacatatttgttgaatccccactatatgtgaaggcatatattaatgtcttgttcctggcacagcaataaggggtataggcttccggcaagggagggtttgctgagtgggggaggagtcagggaaggtttctgggggctaatctaaggctgtggttctgaaccttactgagcatcaggttacctgagccctgcctcccgagatcagcaatcagcgggtctggggcaggggctgggattctgcgtttctaacaagctttcgggtgatgctgctgctgctgttcctcggaccacatttgagttgtgaggctaaaggatgagttgtgcctagctctgggagcagaattgtgggggcacccccattgtgcatttctggccttttccttccttatgtcctttacaggggtatgcctttgttgcgcttggcccgtgccacgaggtttcacccaatgacggagcaatgggctgcatctgctctttattcacaaagaggaaattcctactttgctgccatggccttgttgctctgccttctctttctcaaaatatttgtatttgaacacgaactctgcctctcatctcaccccgtcccacctccactcaacctcaactcttattttggcagcagtgaagttgctgcgcttcccatttgaaataactttaaagaggaataatcccacaaattacaattactggtatttatccaagtaaaacccagtatcctgttgctttgttgacagcagggcccagccaactgttgggttagcgggggctgaggaagttaaaaggagggcctggttgagttgcctcaccatgggaggagagaggcatgtacaatcagatatttaacactcctcagcaattatgggagtttttattctctccctggcaaagaacatagccctttactgcagtgtttcaagtttgcctacaaggctgtctgatagaagtgcttttatcccctgaagatacagtataaaatacaaatcatcattggttttatctcagctggagctgctgcttctccaaatacatttactctgttcaactgcccatcagacccattttcatccttcaccccactccttgacgatagctgggtttaaggcctttcttctgttctttgttcctttagctcagcgaagtaaacagcaggattgatcttacactgcattttggtattgttccaagtactcatctatagacacggctgggaatgcactgactggaaaggaagggcagatggaaatgcacttcttgttctttgtgccttttagtgtgcagcggaatgtccctaatctgagggctgctacactggctgccgatcgacatgcaaattcatcatcaaatgatgagtcccatattagttctaagggaagtctttaaagataccagggaggaagagggagagagggagggagggagagagaaaggaagagagagagagagaaagggagagagagagagagagagagagagagagagagagagatatttagagaaagggggcttttcttcattgcctcttacatccaggtcattacagtgtcttgggaaagaagaagggggataaatagctgttacgttgttgtgtttctctttgcattgcaactgttcacaggtgcacgaagacgtaaaatgctgtgcttggaaagtgtttattttaaaagcaaggtattttaagttagagatgacttaaaatcagagatggtggcctaaatgagaaaaagtattgcaaaggatggttgttttctttttgctttgtcatttttctcctcagttatttggaaagcatatcttaactgggctattttctgtattattttttaattaaaagaaaccaacagtattttgacttgtagctttaaaaaagaaaccaatgtgtggcttagttaaattggaggcttaaagatgctgcttttatgggtaacacattagtcagttatattggaagatgataaaagtgaattggctaaatgaacctttggatttgttttgttgaagttccaccagttattataatgcctttaggtatttttgagaggtaacaggctggaggaagagtttatagaattatcttgtcttgtatactccttaacagcaggacacattccactgcctatcagatgatgggtgtggagatagcctgagcttacattgattatgtggaaaacatctctgctttgcaagaggtctgcaattttaaggggcaattaggcaatcttataccctccctacctcagctttaagaaagtatagtttctgtttcatttccattaatagtcatatcatgacagttacttctgtgaagttttccctcaacacccacctttccctacagtatcctacctaattctaccttcctgtgacactggtcattccctccttcgttctggaaatatacttagtacatgttttatcatacacatgtagtctgtttttggttatctaggtttgcattgaccagtttgtggattgtgttttttaatatacttataaaaatgttatagttaccaagactgtgtagacttctcttgtttagaactataaggtagtaaggtattcactgtaacatagccatagcccccaccccaaatctttccaattaaaagtgcaagtacatcattggcagtcatttgtataaaatttaatagtgcggtgttagtgaatagttatatgtttaaatacaatgaggttacccaataactaagacatagaaatggaaaaaaaaaccctacacaatactttacacactacaaaaactttgaaaaatgtgtaaaagggtagaatataaaaccaaaaccaaacaaattaaattatacatatacaaatgtaagtggtttaaggtaaaaacaaagagatgaattaatttattttgcattctcagtgaattggtgaagctgactgataaaaaaaggcaaaaccagtaaatagatcctcttataacaaccttgataaggcagtgctagtttagtgccattggcaatgggcaaacaaaaccgtgtctggattgatctgtggtggacaaggaaaatatttctttggcactgttggaacagatggtatctttgattcatattttggagattaaacaatatcaaacggggcaggggattcagaaactggcatttgagacccttagcaatggtgacatagtgggtggtatgggagataccttctgccatgaggaggggctagctaaaaagcaagatcacactggcacattcggatcgactgttggctaacctccttaagagatgtgcaagggtttttctgcaaataagtttgcttatgtaaatgagttcacatttagtttaaacatcagtttacattaaaaccattttaaactatatttcaactagttatttttaaattcacattttgagcttgatgtgaccttcctcccctgattttcttaaatattgaaggtctctgggaagtaactgtttatgagtttgcctgtgagcatctgaaggaaaaagatccttttattaattcaactctgttttcctagtccatagcccagagtaagtgctcataaatgtttattaaatgaatgtttgaatgaataaataaatagatgaattaagatgtcttagcttagatgaccttggtcaaaggtatttattatagaacgagaaaagagctcaagaatccagccctttgcctctaacttgtcctgaaaatttcaggcatctgtattgtcctccaaacactgggacagtgtgcttgttttgggattcctggttcacccttagcctgctttcccagggaactgcttgtgctcctaatttttgttaaaaggaactgagaattggggtattgagaggccaagttcattgacagatggacaaaacccaatggcattcctgtaggagtcacctagttaggtaaatagtgaacagtagaatgaaggtccaggtgtatctgctaatgagggccccagaaccaccctgaatctagaagcactcactgagcccagttcctactgggtgtaccacccacagctactccatgttctgccctcagatttcaggagatctcattttcaaatatctgctccctagccaccaaagcctacaactttagttgagttaatttaaatgtttcttgccataaaattgtatttccatttataaagaaaacttctgggccatctcaaaaacctaatctgaaaatcctgctttgtaagggggttcccccatagagatgctgtgttcaagtgaaagaaatctgtgttctcctgagttgctctcttctactttcctctttgtctaaggagaaatagtttttgtgaagctacagcctagaaaagaacttttcttctgtagtaggaaacaagatgtgagcagagtatcagctaagaaactcaagaagcattaaattttagagttgaaaagcaatagacagacaggtttccacttattagggtctctaaggcctcatgttctggctcctggaatgtcagctcctctcattcagtgccactaactggcttggttcctctggtcagaagggtctgttgttagtggccatgtagcatgagcaacgtcaagtcatgtggaaactgtgaatatgtggcagtggccaagggagaatataggtaggttgttaactcaaagtccagacttgggcaaatctttcttccactgatagcactacttccacaaacctggccaagagcatgctcatttaggccagttaattttgctggttttaaaggcgacagtattattatccctcctgtattgcttagggtgcagactaagctgctgtatcaaacagactccaacggattaaccatgatagaagtttatttctctgtaacacaacaattagaggcccaggacttggtagggtgccactgccaccctcaacatgtatcttccatgtctggattcaaagtgcatgttctagctcatgccatgtccagtccgtgagaggtggggagagtggagcaggaagggccagaagagtgcatgcccatgatctaccctggaataagatgtatcatttccactcaactttcattaggagaacatagtcacatggccacactcagttgcaagaatgtccagctgaatgcaagtttagctggagagccatggacccagcaaaaacttcagttttattattcaataaaaacccggagatggatgttgatggataattagcagtgtctgccacattcctcaaactcatgccttttcctcaccctacacaccccaaatccactcagcaggaaaatgtgaaccctttcttagaagggtgcaggagaaatgagctatagatctggccagtcagtagaaagctatagaaatcccaagaaataatttgaaatgtgcttgtgaaaaattatttgtgtgtcaatctaccagccacagactggggtgagcagccagggctctcactagctgatatgtgaacattctctaggacttctcagaaaagctatcaccgcacctgtgctcgaatccctattctaaggtttagtctgtgcttctaagcataaaaagatttacactgtaaaaataattgtgaaaacaaaggtaagacaatccttttttacaaggctatttgccactcccatcatactccagaaacaagaagagagaacgagaacatggaaatcgtttactctcttttgtatatcataagaattggaacataacatatagaacattggattatacataaaattgttgtacaaggcatatgctgagatgtaaagcctttaaaaatatctggaagtttgagtggaaaaatcttcactcaaaatggattttatccatttttaataaaactgtcttagattctttagaaaactcttgtgtatttaaaatttacaattttaggccaggcgcagtggctcacgcctgtaatcctagcactttgggaggccaaggcgggtggatcacttgatatcaggagttcgagaccagctggccaacatggtgaaaccccgtctctactaaaagtacaaaaattagcctggcatggtggcaggcgccacctgtaatcctagctactccagaggctgaggcaggagaattgcttgaaatctagaggcagaggttgcagtgagccatcgtttcattgcactccagcctgggtgacagagctagactctgtctcaaaataaataaaataaaatttacaattttaaaaggacctatgagtttctcatattgtgatttcttatacttcctggtttcccttgtattttacctatgcagcacaagtgattttttattttaaggtatagtgtagttttcttgaaatgtatatcttatttcttctatttgattacatctccttgaggagaatatccacttatgcttcttctgtgtgcccctcagcaaccaaacaccatctcttcagtacgacaggcacataataaatacttttttggatggaggaatgaagtaaacaggcagagatttaggctcaattcaggttgctactcaaacatcacctcctcagggaggcctcccctgcccaccctagctagaatagtatgtggatcccctcaacctacattaattttcttcatagtactttctttttaaaaattgaataaaaattgtatatatttatcatttacaatatgttgttttgaaatatgtatacattgtggaatggctacattgagctatttaacatatggattaccctatatacttattttttgtggtaagaacactgaaaatcttttctcttagcaattttcaggaataaaatacatagttattaactatagtcaccacatcatacaatagatctcttgaacatatttcttctatttaattgaaacgttgtattctttgaccaacgtctccatcccaccccacccccaacctcctggtgaccgcccctctactctctgcttcttcttcatagtacttcccactgctcagtgtgacctcatctacgggtttattgtcaatgtctgtctccctccctagagactacactccatgaggtcaaagagtttctcttttattcactgctggaccctagcctttagaacagtgactggctcaacgcatacttactgaaaaaaaagtgaacgaatgcttataaatcaaacaaagtgatttatatgaaatgtccacacacacacacccacacacacccacacacacaccccaaagatttttttttttttttttttttttttttttgagacggagtctcgctctgtcgcccaggctggagtgcagtggcgcgatctcggctcactgcaagctccgcctcccgggttcacgccattctcctgcctcagcctcccaagtagctgggactacaggcgcctgccaccacgcctggctaattttttgtatttttagtagagacggggtttcaccgttttagccgggatggtctcgatcttctgacctcgtgatccgcccgcctcggcctcccaaagtgctgggattacaggcgtgagccaccgcgcccggccaccccaaagattttttaaaaagacatttatcagtcactgggatggacttgagacactgaagaaccttctcaaatagttgagctgccttctaaagaagcaattctatttgctgaagggttcagtatttgccaatagggtgagtaatgcaagttcgaggttatgaggtggtcataggtggctttttctgaatagcaagaaggggaggaacttgaaactcttgaaagtaatctgaaaggaaaagggactaatggggtgctggctactgagtcagagacgaggagaaagagagaagccctcttaggatgtaactaaggagggatttgaggagaataaatggcctaatgtagagtttaatagaatgccatgtgcaaacctctgtagtactcccagtgaagtcttcctgaccttcagaaaaaataaaacctacaaaaatctcccaattacagttattgcatttttcttggaaactggtaagggaactgagtcctgcatctggatatgtgtggagctgagacagttagtactcctggataaggggatggggagacatctggcagtagtctggattacagggaacatattctaaagggagatagctcatcaggtaggtgtcctgctttccctattatactgtgaatttctagagtcagagcatgcctcttcaactttttttgaagcccctcccaccaaagggagtaacatacagtgttctggaaataatgaatacttagtgatactaactgtatgagtcagctactgctgcataacaaacaaccaccaaatctcaggggcattcgcagtatgcattcatttcttacacatctgcagattgtcttgaaaggcaataatctaggctgagcttgtatgggtaactctgcttccagttgtaggttcatttgggctgagcattgtagcaggggctctggtctgctccatgtgtatttattttggggttcactctgaaggggcagcatctgcttgagtggaagcttttaaaattgtgataacagaattaaaagagaacaaacagagcataagatgcctctataagattaggctgggaactgggaactgtagacatttttgtccacattctgatggctaaagtatcaaaagtcaagtctgaagtctagggatggcctctgccttgtgtaggaggcacagcagaggttgtggatatgggaggggtaaagaattaggaccgatacttcaatccatcacattaactgaccaactgactagttgactgagatgattctgagaagctgggccagagagtgagttcattcccgcaggtgttagtgtggctgtggtttgaaggcctttgagagagttcttttatttttcttctttgtgaaagtggccattaaagttaaaaacctcatttttgtaatagaatgcacacaacagtacacatattgacttatgtttttagtcaatatcaagatttattgtctccagagttaaataaatcgtgatattgaccccatcataagccaatatctgcctaatgcgttttttaaaagtattttgtattcatttatattaataggacacaagcaatcactcagtgttactttgttttccctttttgctctttctcctttgttattttctcatcagtcatagtaattagcccagggttaatgtaagagttattgaaataggatgcagtgcaggaaagacagccatagtgggcccttccccattgtagagaggggtatttgtttccatagagaacgatgcctttctgattccagatggtgccagtgaattttgttttcttcagaagttgtttttccctgaacttcctctcctctgtgatgttcctgtatacaattcctttgggccagtagggaaatgggaggaggtgggggtgggcaagcaggaagggacaataaggtaggggaatcgtcaattgtccaggaattgtttttttctgacttttttttttttttttttttttgctgttctagtcttgatttcattgtcctttttctttctttccattttgtagctggcatttacattttctggaggagtggaaaaaatatatttctttaatactgaatttcatttatctccataaattggttagggtatatgatctaaaggactcagctgtttttaaaataggtttattcctttccttgaagattatttccacacagtatagacgagttagaaggagactcattttgtagaccttggtgagagctccgcatttgcagggcatcatttcagatgtggagtttttgaacaaagaaattaaatttatatgtatcacctaaattatttcaaattcatggttcagcaaagagttcagactctaatcaaatatgtagtttgcatgggagctacccgccttctcaataataacgtggcagttctatttacagtgttgactagaccagggggtggtgcaggggagatggcttttgtgggaatttaccttggttgtttgcagttgggcctgtgttaaacgtgcagttttaccacattaaaaattttccagaaaggtagttgagagaagagcttttcaaactgttctcactccttataaacaacagaaggactcccctaccaataatctttaaaagcaaataacctctacaagctccttgttgtctttctttttatctatcaaaatgccaccattgtgcaaggcccccacagacgccccctccaaccccaggaacctcctccagctctcctgccggcccctcctagtttggacccctatagaacatatgatctctatcacatcatcagcctctgacttggagttggcttcattttcgtgttgtttttggtgtcaaccttgtctttacagcagattgtgaactataggacaccaagaacagtttttcacttttttgaaaatagaatatgggcaacgatgatgatgattgcctctaacatttcttacggctcactaggtgccagggatttttctaaatcctttaaatagattaactcattgaatccctacaacaactctagcagttattatccctgccttacatatgaagaaactaggcacagagaagtgaagccacttgccgaaggtaagaggtagatcagcattcaataatgggttatcaggttctgaaggtcatgctcctaaccacaatgacagtcttgttgatggttattggaataagccttgaatgtcttgcttgaacatgaaggagactaagattgagcctgcatttttggtcgattttggaagtgggctgggttgcagaataaaagtcttgacctgagggtatttaatgaaatttcttctagtgccatcctttccagacttacgtataatgctcagaagtgacagctcaggattttataagtggtaaagcttgagaggtatgaacagtttttaactccagacagctgcccctgtgcaggaatgctgcatccccatttctgttgtggaacttcctagctcacaaggcagaatgctttgctaataaagaaaacgcaccctttttcagcctggtgcctacccatgtggcattggctctgtattcgagacggtggagaatatactctaacctgtgccattgtgaaccttgtctgtgctgggggtggccgctctccagacagaagaatggggagctctggggaccaccactcagtgcacacgttttcaacctatgtcacatttccacacagatttatgccacaactggttcatttcttttctttctttcacaaaattaagataataccctttggtcatgtcgtcatttgggctggacacacacctcctatttggttttctcatggctaaaaacctggaatgtatccattttataggttaacttatgagaataggggcatggagtggggaagaggaaaaaagaggtagaaatatccacaggccataatgagcccttaaagaaactttcctgactccacgttccagtaagtgctcctctcccttctttctcttcctcccccttttggaaagtgctcctctctccttcccttccctcctcacctgtctactccccttcccacccatctactccccttcccacctctcccctacttcctgctccagtagttcgggcagttgggcttctgatgtctgtagataaatcatctggttcatggtcacagctggcaagcagatgtttccctgtctatgagttctataaccagcaggctagaaagattgacttagggacactctccactcccctcaccccaaatggcaaattattcctcatttgaaacataccagatcgagactgtcaccattgttttctatgatactaagctacaattattaaagtgggtagtgggaggcatggaaatgtgctctgttgttcggccattggtctttggtttaagtttagcatctgggtgaaatgaaacctcttgattcaggcatgttctggttttctttagttttgtttcttggttggggtgtgagagtgtaaagaccttggtaagaaggggctgggcaaagcactctctcagtccctctggcaatggtttaaaatggagcaacttcccatctcctcattggaatggcttcatctgcttttaattcacatttagtctaaatttcttgggtttcagttggggcttttgagccgtttacccccccagctgctttaggaatgaaattgttttcttaagtcacttatttctaatgatctcttttcaccccctaaaaaatgatgtacattttactaattcagatacataatgattctagaattcaatttttaaggttaacctcaggaccaaatttagttctcctgggctgctgctctgctgttatttaaccataaaatgcctttaatggtgacttttgggagaggaaaaagcaggttgcctgaaaagagagggggggacagcggaaattagagagggctggcaatgtcccatagctccctgccgttatgctgggctgaggcacatgggcatgttttgctgttttactacatgagctttggggaggtggaggcacatgggcactgtgaggcgtttcagaggaaacctgcaacagagatgagtgcaacagagatgaatgcaacagagttggctggattgactcttgcttgaaatattgccatctttttccccctctcagaggctgtttctacaaaaaaacttgataaatggaataaaagtttactgaactctactgtgtgtgtttatcataagcattgtgctgggtccagggagagacagaacaaatattagattgaactgcatggaattgctgctattggactgttttaatctacaacaatgtcagattcatataattcatcctaatataaagaagctccacttattcaatgagtatttgttaaagaaaatagggcatgcaaattgcctactgccctgcctggtacataattatgactcaataaatggtagctatgtttatcaatgtgtacttaccatgggcagtggctgtgggttggacagagtctgatgacaattcagtcagttttcatcaaggcctaaaggtgatctttctattttaattggtagatcaagtgatttaagaactcatttttattcactgccttgcctgagatcgtcccatgacgtgatggagggaagcaagtcctcaggctggcttggcagtggggatcgtgtctgtctcactgctccaccacatttcagtggaacagccagtactgcgtgtcaacatctgggataaactccagtgttttctcaggtctgcttgcaatcgaaccttttgaggaatattaaccttgtccgtaatttgtgaaatcttcatttcactctgagttttaattcataaatgttttcatataaactgcaacatcgagaattataagccaaatttgatggagatgacaaatcacagttttggatgattatatctgatataacagctggaaaaagaaagctagaaagacgagagaggccaataaaaagctttctttggcatgaagtagcatattgtcgtaatgttccccccaaattgaattgccttaaaaaaactgtaggaatatttgaagaaacacaaatattttttaaaaagttaaaataagccctttttttctaagagaatgttttcagtactgtcagttttcagccttcagaaattttcagagagtagttcattcactaagggggcaaaaaaactttcagggttctaagaagcaatttgcaaaaatacaccatagacttcccactcctttcctaggcatttttctgttcagaatcaaattcagaagcaaggggatttatgaactacctgatataaatgataaatcatagcactttgagtcaatatcctccctgtgttttgaagtccccaggattttcaagcaaaaagaataagaggttctcaaggaattctgagcttgtgagatggtggtggttataatggcagtggtaaaaacacacacatccattctacccatcagtgtggtcaacggtggtttctccaagatagttacctttgagcagaattggacagagtctttgaacctgagaaagaaatgagctgtgttatgtttgagaacagaaaaaggccgagtggttagagcttagggagcaagggaaggagagtgttatgaggcgacatgagaaggcagacagggtagagctaggtcttttagagggtagagctaggtcttggagctcttaggaaaggaaatggtttgggcttcatcttggctgctgcactactaatagtgtgaccttattatggaaaaaagtggggatataatcatacctactttggagagctgttttagattaaataatttggtatgtgcaaagtgcttagacctgtgccttctacttaattaagtgctcaataaattagaaatattattattattaataatgttattggaaggtatgggaaaattttagcaggagagtgatatgatttgcacttcagaaaaggtcactctggttgttgtgtggacactgtagggataaggggataggagaggggaggcagggagaccagttaggaggctgtttagctagagtcgtgctgagagatgatgacatggacagggtaggaataggaggaaagagatggtcagagttaagatatttataaggggtgtaatcaacagatcttactgatagattgaacagtgggtgtaaggagacagaaggctcaagatagtgctttgcttttagcaggagcaactgggtggacattggtacaatttacccagccagagaacactttgggcaagaagtggtgaaattatcctatttgatgccaaaataactgactacttttcccaagcacaattggttaaatgaaaagcaagtgaacaaatacgtctggagcatctggtctgtttctgatgctgctcttggtgccctgaactgggtgcttcatttgctcctcacaagatcctgtacatgaaggtcctacttgtccagaggaagaacttgagtaagggatggaaattgatggcctaggtcccctggcaaataagtggccgagccaggagaagagcccaatgcccatccaccatgccacaagtcctcttagatcaagtcattcagagggtgagtgcatgaatgggaagggggcaacaaatgtgcttgtaacagaaaataagtaaataaataatcattggcctagtttctcactttttaggcacagttacacaaccttggttagactagggcatgatatctaatgaagttggattttttttttttttgagaaggagtctcactctgttgcccaggctagagtgcagtggtgtgatctcagctcactgcagcctccgtggttcaagtgattctcctgcctcagcctcccgagtagctgggagtacaggcacgtgccaccacgcccagctagtttttgtatttttagtagagatggggtttcaccatgttggccaggctggtcttgaactcctgacctcaagtgatctgcccgcctcagccttccaaattgctgggagtacaggcatgagccactgtgcctggccaggtgcttttttttttttttttttttgatagagccttgctttgttgctcaggcaggagtgcagtggtgcgatttcagctcactgcagcctccacctccctggttctagcgattctcctgcctcagcctcctgagaagctgggaccacaggaatgtaccaccatgcccggctaatttttgtattttcagtagagatgggttttaccatgttggccaggttggtctcgaactcctcacttcaagtgatccacccaccctggcctcccaaagtgctgggattacaggtgtgagccactgtgcccagccattggatgctttttgacttgcctgcaaggctgtctgctcaatatttcataggattgcatctatatctttgagcatttaaaaaaaatggtataaaactatatgaacatttgaatgcttttcagaaggtcaggcagtttcctctttgaggaaagtattaggcatctctggtttggggatgacttcagggcagacccacatggagacagagtgatgtctatgatgacctgtcatgagaatctccttttggttatgatgtatatagtgaaacagtttgaaaattaaaggtgaattagtgtgatgtgatttgggactcattggtactgcatccaaatcatagagctacagtgtaaagtcctgacataagtagtttctgcaaatggatttgaattacagaccttggagattctaggcctggtagtggctccttgaataacatcttcttgttcaacgtcatttccttctaacactgatgagaaacaattgactcctagctgaggtcactgtgtggagtttgcacattccctcccatgtctgcatgggttttctctgggaactccagtttcctcccacatcccagaactgttcccttttaggtgactctgtgtgtctacatgatcccagtgtgagtgagggtgagtacacccgacagtggcatgccatcttgtccaggactggttcctgacttgcaccttgagctgctgagacaggctttatctacccccaaccctgaactggaaaaatcttacttgtttttattaatgatgtttcttaatgtatatataactcacgttcatttcaatgtttactactagaagtgttttggtctttatagagaagtttggtgatgtttttatgaccagaaatatgctgtaggagcttatctcttgtttatatcaatgagtctattataaaactggtttcattataccttgtttcccttacaactgcagtttccaagaacctattgaggacattaaatgaggacttactgtacctgtcagtctagtctctggtcctctgtggtttaggtctttgcaaaatcactttccctgagtcatgttttaatgttaagctcttagcatttagcaatggtatataatctgaactgcttaggtggtatttgtaatacaactcaaattagcctgagcacaaaggtgactgaatcagctcaggtaactggaaattcagggataactctttcagatatggctgtacctagatgctttgcagcacatcagaaatctgaccttttctatctttcttcctcctggttgacttcaatcttaggaatactccccattctccctgaccaatgcagcagcaaagtgaccaccagcaacccaggatttcattctattaattttgtaaccccagtgacaaaagaaggcctcttttaaagtaatttctcaataggtcacatcagcctagaggaagcatctttatctaacttgtccgctcagagaggtgcttttttctaattcttatgaagctacttctggccctgatgaggttggaaaagggtaaaaatagaagcagtcagatcatttgcagtcaccaggtaagagaggatggtggtacatggattcatgggtagtgaagatggagagaagtgggtaaacttaggatatgtcttcaattgaattaaggggatttattcaacagacccaataagtgcctactctgagccagtcccatgtgctaaggcaagagatacagtgatggataagacatgcccccactctagaatttttcatggtctatgggttaggtagatgtgtgaatgggagagttccatgccacaaagtaagtggtttaatagaaatgtgaacaaagtgctataagagtccagaggagagagcagttaagtctctaaagaagagacaggaaacttaaggcaggtagcagtgtttgggttggaccttgaagtacaggtaggaatattccaggtgaagaaaaatgcaaagtgaacttcaatggaaacagcatgtgcaagagcatgaagacaatgagatgtgttgaggcaagtgggtagatggggttagattaagaagtacctttaatgcctctttagggagtaggtttcaatgtaggaattctgaatctgagctgtggtatattaatccgcgggtacaaatacatcaaatggaataagtttaagtgtttcttggcacatttgaatttcaaatgttagtgtgcaaaagaattactgtactacgtttactgcatagtatcttttgttttttttctcatagtaaattttgctctttgtgatttttctcatgtcatgacgttaaactgtaaattatcttgacttaagatgcaacactatttactgagtggacactagtgacttagtgctagatgttgcctactacattcttcaagtgctctagaaaattcagggtgccagttagaattcttttactttcaagaaaaagaaaactcagcttaagtgggcctaaacaatacagagataaattgctgcacattcttagaagtacagcttcagtatatggctcaggcagggctctgactttctttgtctaaggtttcctccactctctttttttgtgtgaggattgggtatcattctcagttcattttcaggtggttcctatcttgacagcaaaagagtagagagccatgactggagccacctgcttccttgtctaaatctgggaaaggggaaagtcccctcctaggagactcaaacaggattcctgagcttcaccttgattagtctctgagccccaggctggctggtttagtcttaggttgactgaatttcaagagaaataagcttaccatgccagcctgaaacaaattcctggagctggaggtctggtcagtccacccaaccttcatggggagtatggaacagatgttatggaggtgatcacagggtccctcatggtcatatgaaaaaatgaaacccaaaacaacaaaatacaaagccttgaattatttaggtaattggagaaaatgtcatggcatgtattatgtaatgaaaattttagtgaacagttgagtatgtggatggtgttgggagaaaagtgcattaagcatttttgtctgaattgaataggggttgaaatgaagataacttttgaactagttatgaggaaaaggtttcctaaattaataaataagaatacagaaagggttgagtttatgagagcaaattctttgcaaatgatcttaaaagatgtatttatacgtaagtgtcatatgttgtacacaaagtacaatgagaacacttggacacagggtggggaacatcacacaccggggcctgttgtggggttgggggaggggggagggatagcattaggagatacacccaatgtaaatgacgagttaatgggtgcagcacaccaacatggcacatgtatacatatgtaacaaacctacacgttgtgcacatgtgcactagaacttaaaagtataataataaaaaaaaccagaaaaaaagtaccattaaccgtgcattatggcaccaacgtcttctacttgacaacatgtggttaacctagttccaaatatagtcttaccagaaaaatattaagaactgaattttacttcaaatgctgtgttaagtagaacttttgtccattcagaggtcctctcttcagtagctgaaatcagtaaacttcctatggaaaacttgggctgtggtctattcctgcttaccagatgccgaggaatgacggtagtgatgttgcagtcatccacacttgggttcagtttcctgctctgcctcttgctagctgtgtgaccctgggcaatttatttggcctcgctgcagttcagcttcctcatttggaaggtgatgataacgatcacctacaatagatgtagttgtgaggatgaaatgtggcagtgcttgtaaaatgctagcacaaaagggtgctcaataaaaagttagcaaatattaatattgaaaactcatttatgagagtcttcagcccagattctcttctcttggttgttccaggcacaatttatccatctgccatgagcaatgaaatgaacaaagagctcactcctgatttgccaattctagagctgaatttttggtcgaaagatgggtgttagataaaatggtgttgtgggtgggtaggtgatggtggagctcccatctgtggattcaggtctcatgcttttgcctccctagctatggagaatgaagggagcaaatggatatacatgttttgttctctctcactctccctcaaatgtcatttttctgtgttcctttggtttttgaaaggaaacctgagaccttttggggttgttataggtctgatgcccagatgctcagattctgggtttcctagtctgatggtggaggcagagttccccatatttgagccctacccctccacaccaaagcctgcctcagccaaaagcggtgggtggtcttaccattctctcagtgttttgggaaccgccccacctaggcacacggagagagtcagagacgctgttaaattctccccttccctgggtatatgtgcttaagctgttgccagaaacttaatgttgttttaacacatttttgtgtgtatgtgagaatccattttccaggactgctgatggagggcatgtacccctctatgactgaaagccagctgaagactcaaatacaaggtttattctggaatatgcaatggtggtttcttctctctcatcctccttcacttgggcatcagttcttttatctttggcttgagaaaagaaaactaatatactctagatgtttttcaaaactagggacacttcaaaacaagtttaaatataaatgaaatcagtttccaaatgtcttgttaaaaaaaaaacacagatgttttatatttattttatcatttttgttttatcaccttgcaaaattttacagcatggaattttattcaatgcagtggcattttgaacagcaatattagacagatgtatttgcaccatatttggggacttttttttctctttggcaggatattaaaagtgaaactaatgtaacctggtgttttgggaaatgtggacgaggcattttgcttattggtaattgaaaacaacaaccttctcctctccaaatgtacccctcaaaaaaataagctttattgcttggataagtgattaaacgtttttagaatgccagaagttcaaatgaagccactttaaggaagacttggctcctcaaatgcagggactgtgtcttttgacttttgctggatggtgccagacaggacctaaccaatcatcctgttgatttgttgcttttgttgttttaggattttgtaaggacatatggcacagatacagatcacaatacagctaagaaatggaattattttcaggcatagtataaataagccaaatctcacttttttccttctactttgtaccccttagctccacccccacctccttttaatttgctttttcaggataatccattagtagccttaatgagggaatgggctggatattcacaactgaataaaatgccagcttttttttttttccccacaaaattttccttctacaggcacagacaggtttctagctctttcctaaccaagccacagactctctgttggttcgcccaccctccaggtcacaacaaaatcccctattaattaaactaaaattatgtctgaaataaatcactcagtaaaagaaacccactatggcatttttttttcctgaagatgtttgcaataattaatgaaacatttggtggctggtgacatttttgataactcttaaagtgccagaaaatgttgacatatatgtaatctccatggactcgagaccaagaaatcagatgattaaacaagggctgaataataatttttatttttttctaaagatcatgttgcttttgggggagatgtagaggaaagggtggtggaagatatcttttgaagagaaatccaatttttcatctccatggtatagtctttctcctatctaaagtatttccagtccatccaaagttataagcttagatactaataggttcacccagtgagtctcagcctggtgggaggttgtgtggtacagagttactgcaatggtttgtgaatctataacggccccaggcattgcagagatgcaaaaaataaatatacttcccatacattctttcattcaatacatgtatcttgaggctcagcccactatatgccaagctctgtcctcagcactgaggattcagtgggggaataaaacatgccaagttcctgtccttcatggggcaaaaaagctagtgtagggacaaacaatagaaacaaaaatacagaatataatgtcgggcagtgttgagagccacaaaaaaaccactgccaggcgaagggatagagaggttgcagacatgtagaagggtcaaggaagacctttctcagaggtgacattcgagcagagacccaggtgaagtgaggaagagaattttgccaacagtgagggaagagcatttctagcagagggattggccacaacagaggccaaacgtgggccagtcaagtgttgggtgcatccaggaatgccagggctatgtgcctggctgccccagggaaaggttacgaagatgacaggtattcaaattgggtgccatgaggtggagcatggctgctgaaagtcccttcccacatccaagcccttagcatctaactggagaaggcaggaccactttgcacatcttacagaggggagactgcagtaagccactctaagcaactgagtgacagatgtggcctaggtcatacagctgagactggagcccaaagccctggcttccacaaggtgctttttttcaaaatggatttctacttcctgttaaggagtcagtccaaaggcagaatgtgataaaaatgctccactcccccttgagtactggctggacttagtgtcttgctttgaaagaatagagggaaaaatcataagtttgcacaggaggaaagtggtagaaactgccttaaccaagtgatggggggaacatcttcagtgatgctgtgtggatctctatcatgtacctcctgaggcaatgggaggagagggcacacacctctgtgatattcttcccccaaaccccagtctaatcacaaggaaacctaaagtgagggccattctataaaacacctgaccagtactcaaaagtaacaagatcatggaaagccaggaaactcagataacttatgcaagaggagacaaaggagacaactcagtgcagtcaattatcctggattggatcttggaacagaaaaaggacattaggctgggtgcggtgactcatgcttgtaatcccagcattttgggaggccaaggaaggtgactcgcttgagtccaggtgtttgagaccagcctgggcaatgtggtgaaatcctgtctctacaaattatacaaaaaaaaaaaattagccgggtgtggtggttcattttgtaggcccaactattctggaggctgaggatcacctgagcctgagaggaagaggttgcagtgagccaagattatgccagtgcatgccagcctgggtgacagagtgagaccctgtgtcaaaaaaaaaaaaaaagatgttaatgaagaactagtgaaatccaaataagcaatagtaaaaaaaaaaaaaaaatggatcacgttatttaacactttttttttttttttgagacaggctctcacactgtcacccaggctggagtgcagtgacaggatcttggctcactgcagcctcgacctcctgggctcaagcaatcctcccatctcaacctcccaagtagctaaaactgcaggcccgcaccaccacacctggctaattttttgtttattttttgtagagatgaggtctcactatgttgcctaggctggtctcaaactcctgagctcaagtgaagcactaacctcagcctcccaaagtgttgagattataggcgtgagccactgcacttggcccaaaataatgaatcatgttatttaataaatgtttcttctgttcaatagtggggaaaaaaaatccaccagccatggtggtttggaggttaccttagaaccacagataaacttgtggtatccctttagactgctgtgggctccaatccatctctgttgccatggtctgatccccaagagaggggccttcgaaggtgggtgaggtgctgggcaccttgaaggtgctttttaaaatcctgatggattgatttcaatgtctgtcgtgtagcatacaataggacttctcttcttcttgcccagcagtcttctgcttccagaacaattggagagtgcaggtaaaaagggcctaattaatgtacagggactgagggaattaaatatccttaagactttttagcagaaatgattgacagaagcaaccctaaattacgcccatccatcttgctagtctgctatgcctcacacagtggacccaggtttccaagggaggctggtggagatgtgagggggcaagaggcactgctgggagaggggcttcccaagcctggaccccagcaaccagggtttagaaacagattttccctaccctacttcaccataaaggctggtgtttgttgtagatgtttgaaaatcacagtgagtagtaggaagcaggctttttatgggaacaaaagaagggtttttcttttctttctgagacagggtcttgctctgttacccagtctggagtgcagtggtgtgattatagctcactgcagcctcaaactcctgggctcaagcgatcctcctgcctctgtctcccaggtagctgggactacgagggtaagccatcacgccaggctgattttcagtttttttgtagtgacagggtcttgctatgttgcccaggctggtcttgaactcctgggcccaagcaatcctcctgctttggcctccctaaatgttgagattacaggcttgagccactgtgctcagccagagttattgttattattttttttaaaccatcagtgtcttgtgtgtgattctgctgggtgaacagtttgctcttcaaagggactgaatgaaggcagttagctgatggacaggtggctttcccccaaggggaaactcagggaccattcccggtcactctcctcccatccatcttcatttcctgaaagaaaggatctaagagggccattcagcaggtagaggctaccccaggagaccagaaacttggcctgtagtttctgtgtgtgcagctctgcagccctaattgtcagctttctaaggagcttctctggggacagagaactgtgtcttttccagatggcccctgaagctagagtgttgtggagacacatagtcctactggtcaacctcactctgtctaccccattggagtgggaagttccaaacagcagtgatggaaagatagtacatcttgcctgatcatgtggcctggagcatcaggaatgatacccagaggaagtctcaggtttccctccagtgcaatctgcccttcttcttctggctttcccacctcagagcagtgagctgactatattcattctctgctcattctcccaccctccctccttctagaatcagcagtggggctttggacccagatacttgagatccaatcctggcttttctactttcctactaggtcactgaagaaattacttaatcttttcaacctttatctgcaaaatgaggatgagaaaacctatttcataacttctgtgaagttttcaatggtataaggcaggtttctcagcactatttacatttttggtcaagtaattctttgttgtgtagggggctgtcctgtgccccgtggaatgttcagcagcatccctggcctcttcccattaagtgccagcggtaaccctatcctcatttatgacaaccacaaatggatccaggcattgccaaatgttctggtggaggatgagggggcaaattgtcccacaatgagaaacactggcctaaaaaattgaatgcaggttgcatggcttgtagcacttagaggttggttgaggctaactgcttaccttctcctagatgccatggggcttggggaggaggtgcattgcagagtttctgctttcttgacattttagagtcaaagtgggaaaagggacaatgtcagatgaatagatacagaatgcagattacggttaggatactggttccttgaaaccatggcattgaatgccaagattgttggatggtaggaggagaatttagaaataacctaacaatgggagagatacttcaagaaaattggaagtaaagaccagggggaaaatagagccacaggaagagtgattctgctgtggtaataacttggctgttcatgatcctgaacatatctggctcctgatttaagggacaggctcagccacaaattcaagggcaggcctagattcaatgacttctaaccagatattctatgctcctgaaaaaaagatcactttcattagagaaaaatatcttttgataaaagactaaaacattgaaaaataacattgcatttgcatattatgggttccccacctgcagatttgacaatgaagagttatttttattgaatctttcccaactctttcctctttataaccaatagggaaaataatactgatgtttgcctctaatgactactgtggcttttctataaaaatatttccatggataccaaggtagaattaaaaaatgatgcagaagaaagaaaatatataactgtggactttagaattggtgtggacttagtgatcatctttaactcttttgttttaatgatgaagaaaccaagctttaagaggtgttgtaacttggccaaggtcactcagcttagtagggtcagaatcttcagtgactcagtctatctctcatgcttcaaatctttcttttctgatctgctttcagtattttaaggaagagctttaggctcttgatttaaaaaattttttgtattgcttttaaaaaaaatccctgaagcaaaaccccatgaaatactaaataaactctgttcccattcaataactcatcactaccccttccccagtccccactttctgtctccaggaatctgacagttcttggtacctcctgtaagtgggatcttaatacttgtccttttcagtttttgattttaagttctttggtgtgttggttctgacttttaagtttccgttctaaacttcgtggttgtaaaggagtcttcgagtatttccaactgtgactgttgataattttttcctcattgttactcttgtctctctcacaggatccttttgcagggtaaaagagtagccagcagcaagcaaaagcaaagaaggggacttgctgtctctgaatgggagggcaagggaccctccctctgctttccggatccctgagaggacccacggggtgactgtgctcacctagacactgtagaatgaaccaggccctttttggttttccagtaaccaccacagtctaagtaaatcccttcctgccagaagaaaatatgagttaaattgaatgatgagtttagatactgcttagtgttcttaatttttttttaaattgtggttttctatcatttcatgtacactctcagaggccgctctatgacggaagtgtcttaaatattaaaagcaaataaataaatagaggattatcttttgagcacctggcagttttgtttagatttaaggaatctaagtagttaaaatttctagttttcctagatcctgtaaatgcaaatgtcaaacagctgccaaagtcatcaagctagctaaggatttaaccagttaggtttgtcacattcattcagggttagcctgaatctaactttgtacattctgacaggttaatctttactctcagagacctgaatggcaagcatttcctccctctggccttcccaggatccctctgggcaggttttgcatgggctgccttcactaaaccatgggggaaggcagtccttgtgctggtgctcatggttgaccttgtgccttgtggcatatgcatgtcctggcaccagacaggagtgtttgccagtcactggtggtcatcctgtgggaacatctggctgcatgcagtatattctgtatcttggaaatggactactttgccagctggaaaagccaccaggcacattgtttcagccaaagctgtgtctgctcatctatgggccataaatgctccaaactctcacatctcaaagtggagcttccagattcccattgctctccgggtgacccatatgaaggctttgccatgtgtcaagatgcaggccttgtagctggccatttattgtttcaaatatcatgcattagcctcgagactcaacatcagtgagtctcaaccctggtagcacactggaatcatgtaaagagctttaaacaataccacctgggagattctgatctaattggtccagggttggggaatctggggcagctgattttaatatgtagccaggtttgaaaaccactgtttgaaattcttgcaacctattttcagagcaaggcatgcctgcttcttgtctgtgctggtgattacaatgatgacaatgatgaagttgatcagagctaacatttattgaaacttactatgtgccagatcctattatgaacacttttacatgcctcatttcagattacctttgccacaatattataaagtggatgctattattgtccttattccaggcatgtggaaactgaggcacagaggaggtaagtcactctcctaaggtcaccctgctagtatgtggctcagcctaggaagatcttatgcttatagccactgtacccatgaaggatgattaggctgttatctgggtacctctctctgaaaaccctcaaaggttcaggaacccccagtctccttggttacagcattgtatgctattgtctcttttccattgtggaactggatgtggacattgccagacacagagaatgggcacatcagagtgcagggcatagctccaaaggtctagagctttaccaggggcctatagtgtgtctgtgttggtagctcctgccagatggaaatacctgcagtgacttctgaacttaaatgaaatgctgttagaaggaaacattagggagtgattgaaggcaaggacaataatgctgaggtcttttcctggcattgcattaataagagaatgtgtaaactcagctggttccctttaactcttccttggctctcctgtggctgcttctaagggtatcaggctggactttgcaaacccgttctctttggggatcactgcacatctcatgttgttttgcaagctgttgggctgtccaaaatgccaagcatttttcctatggaaatgtgctctgtatggttctgattagtgccctctcttctgcttaatgccttcttgggctgcttttcatttcctgctgcttcctacagctctggttattggtccaggcctacctcctcttgtccacttagtattattctccaggtggggcccccgttttcctgctctgtcccatgatgctcccggtcccactgactcttacttacacactcctcctgcacacccactttgcctgtgaaatctgtgaaatacaacacaacttgccactactttcctccaaaccttagtcatgccaggagaaacaaagaaatcactaacgatacagtcagttcttcaccatcctcaggctaattcttatctggtggttttgtggagagttttcattgattaatttattcagtcatttgcttatctatttagggacctcacttgggtggggagaatgtattcttctttatgctgcctcaagaaccgtgacaccccatgctaaatcctaatcagtgtgaagccagtgatctttaagtaggggatctctacattcatgacatagaaatcagatgctaaggtctttaaaaacttggcattctcttatatcagagccaacccttcctcctgtggcttatggatttttccaagccattcttttcttctatcaatttcatttatcaaactgcttggtgtccataaggcagatgactgggggaagtgcagccctgattaatcaaatcagctgtttcacaactcttgctatgagaggtgatgtcagacaggaagttcagctctaggcacacttgggtttggaggtcaaatgggggtgtcatttatctatgccaaccccactgccctctgccctcccacaagtgctctttgccctcacccagtaacctaatttgcatttgaaaaagagcagcagttgcaacagtaccttgagttccagccttcagccagcctggagagtgcatcaagaatttgggtgggcatctgctgggattcagcagtgtgcagaagatggcaggaggtcagatctccttcccaagccaccgaaagtgtttctcaggaggtcagaagcaagaatgttggtgagaagggaaggcaaggaaagggtgaaaggaaacagagtagaagaaagcagactttcacaaaggaaagttgctgattctgtctgtgatcaatcacgcttaacaaaggggccagtgacacagccttgttccccccagaacatcgccattctaccatccaaagcctatcagaagatgctgacattaatttcaatgaatgtccctgttcttgctggcagcttttcccaacatggatggtgctgatgagctgacggcagtgattttttttttttatttccttgatgtggtcttgggtggtaggaaccacctttgcaagaggccacccattttcctacatacatccccaaaaatgtcagcctcaactataaagctgaaaaagacatttcacatacataaaatatgtaattaaaatgatgaattattgtaagatagaatattagccttgtgacattttaatctgaacgcaagagcgagggagaaagagagcacaatctgaagcgctcaattaaatttagaatttcccccctccattgttatgaataaatagaaaagattctgtagcagccggtggaattattaattgcaactagtgtagaaggtgcatgcaccatatcatgaaatggaatatcattgttagtgactatatttcttggtaattaaggcccagactaatgatgcaagttttctccagcatgattttcatctgattatgaggctgcttcattaagagcactcagcctaacgagctgtagctgtaataaagtaattttctgtcttgtgctctgattgataaagagtttctatagctaaaaggaattgaaaatataattataattagaaatggttgaataaagttattacaggattgctgaagggtagtgcaattgacaccataatgttttttttggaagtgcgcatcttaaaattagactttataaagcaacaaaactcctttgctaataactgggccgaatgttgctgcttccataaaatgaacatttagattaaaggaaaatgagactttcccacattgttctcgacaagaaaaacatatgcaagaagaatgccgtcgcctttcttcccagcattcttccctcgtgaagtaaagcttatgaacatactttttactccatttataataattttccttctgccatatgttggaaaaagatctttttgattaaactgatgtctttttaagcatacagtataattttggagtttctccttgccaatgtgcaaagagttatgctgtctttttatatatttatatttatgaagcagttggatttcatataatttttcaaattgtgtagagggtttttttttctgtctttgccattcattggttgaaatcaaaatgtaactggggaggatacaagattctgaccccctcccatgggaaatgctaatcaactttttatcctagaaaccttatttctttttatgatgttcacatttataaaccatgaaaactccgttagagcagtccttggtgtgtatgtcattagatatgtctgcaatattgacatataagtctatggcagtggttttatttagaattagctgataaactttgtgcttcaaattagtttcacatatttaatttagtctcttttgccttattttagctccctgcactgcatgaaaaacatgcatatactttaaagctatatggttatgtaaatctattttatgcaaacttacccagacattattaggtctgggctaaaaggaggagtggatattcctcgatccacacttttgatggattatttcaaagctccatttttacactgattctgacaattggaaagactttgagaatttttgagaatcatttccaacatatcatagggtaataaaagcatgttattggaataccattagtaagattagaaaggaaaaaaagagcagaattttattggttgttcattgaaaatgttagctgtgattagttacataatcctacattaacctgtaaattaaaattccttggtgcaatttgatggctgatttaattttgtctttctttgtttgccgcaggctaattccattatgaattctttatacagccttttccctcaatgattagcagcttctactcaagttctgattactattgtacacttagcactacataaagccggggattaatattcccctgaagaattgttgctatggatctgctctattccttctaagagatgtttctgcagcttcaattgtccataaattatgatctctagtgaattatcagtgggagtgaactgagcttaacaagctgaagagtgcactctagttcggagagaaaaaaggcaagggagaaagagaaaaagagatgctcaattattaattgtgaggttggatcattcagaagaagtgatattttttcccatctctatccttgcagacatgtacaaattagaatgaggttgtgggttaaaatagatgctttaaaatctttcaatatgtagtgattataacatgccagaaggtcttaattacctgtaaacaggaagagaaaatgctggttctgctacccagtaacatagcagggttatagggtgggttttattttgagaagtggcatagtcttaatttgcaaagtgtgatttctccatctatcagtttaggaatatgtatttgggtaccattgttttaaaacatcactgggaatagcagaatgctcaaatggagtcgatacaaggatttttcaaaatgagaaaagtttttctcaagaaggtggtatttccagataaagttgatctgtagcttgggaagggtcccaattttgctgggactaaaaatcagggtttagatcattcttgggtatgcttctccttgggaaggacatcacaggggggcgtgtgcagtgtgtgttttgaacctcagcttggataaacccagctatccgttgcttccactctatagcactgtttgctggatggtgcaacatggggcagaagcccttactggctcagacactgggactgagtttagccagagaaacccactggaatccggtggagaccaccaagcttgccgaattgcttgcttttacccacacgtgtcccgagccaagagaaataaacatttgaataatatatcatgtaaaatgattctcttttctttcttctctcttttcctctcaattaatttccttcttcctttttacttcctttctcttctaattttctctttcttccttctattccccatcctttctctactttagtcttcaatgttcttttttgggtttctctttttctttttttattcctcccccagccactcttccccaaagagctccaatactgaaaatatgctggcattttaaagttagagcaaaaaggtgaattatattactacttggaagccagctaagggcagattcctgagggaagtgagataaaataacggagtctgagaaatgcacttaacagaacagacacagtggaaagaatcttttccaggaattatcacttcccggttttccaactgcaaagcaacaaatcatataccaagtcaaggcaatgctgttattacggaagtggttccttcgaatcattctgaagtcagagtctcagattgtactgagtagttcctggaagaggaggtaatgcccactttatcaggagcctggtttctgcagcacaatttgtgacagtttgggtacattcacacaaaagtacaggtatgcacacactcacacacatatgcatacacacatgcaaatccatgcaacacttctgagcgtgaaaagatgttattagtatttaagccaggacaatagccatagacaagaccatgcttggcaaacaggtcaatggtcaccttagctttagtgaaggattgcagtcaaggtccctgaagatgaagactctcccacagtcctgtgttcccatgtttgcctttccttttggccactgggaatctgagcttccctttcatgtttgaggaattcggcacctgatggatcttgttaggagtcagggactgttccccactttttactgaaacccgtttgcttctagggtgcaaatatgtgaccgtggtttgcccagaagatacatctccgtgggacttgggcttggggactagtgatgccaagaaggggtctctgaggagctgcctatagtttctgggctcagcagggatggcagtcccacagcaggctcccgatcccagggttggggtgtgtggtccaggtggaccaggactgtgtgagatcttgaatgcagttcctaggcacatagtatcccggtcttctcttctcctactagagattctgtgaacattactctcttatcatcaaggagttgccatgagaattacatatgagaccatgtgggagtcagttacagcatactggtcaaagtacacttctgcattccacaaaccaggtacctggggacttgtattccaggtgcagggacctgggagccagtgaagagtggccagagagtggaggagaccacatcttctttattacataaaaattcagctactttactcagtactggaggtaggagtgggggaccaggggctagctagactgccctcctcagaaggtacaagatctctgggagcacttaatggtatgtttctcagcaagacatccaatggcattttagacagaaaatttctattttgtgcattcttgttcctggccccacccattacatgctaaatgccatttttgatctcccaatagttgtgactacccaaatccttctctccacccaattccagacatctctggagagcatcaaaccccagatagaatcattgaattactactgtattcttctgatcacatacaatagtctttccaaaaagtgttttgacaagcacatttttagccatttcataacatttttagcaacattctgtgttctggtgatactttaatacactttacaaatcagtccctgcagtctaccttctcttaatccacctctacttaaaatgggtttggagtagggtaccaaaggaggctgagtgatcacagagttcatctctacttgatttgacaaacaacccatcttgaagccaaatttcaaggaaaaaaccccactcaatgcttattttatttcatgtagtagcatttgcacttagtggaagtaagtgctattttgggagtgactcctcctcctagaacctttttccccagggacttgggcgcagtccccaggcaggaatctggtccactggaaacccccaaggcaatatctgctgagtgaggacaactctggccaccggaaagggtttgtttcgtattaaatgacacctagggtctcaacttacagcatgctggaaatccagagccttctcacccacgtgctcatgtgactgttttcccaagttatatggcaaattattcatacttggtaggcagagtgatagaagcttaaagatagaattacccggtttagctgcttttcttttccttaataagggaaagaagtcagaagtgttgaaatgacttatcagatcatcatcataatagcagctcacataatattctactctactcatcattatttcatttatatttggataaggctggtttccatgctggttttcttgtagtctgcctaacacgtttttataactaatgtattttctagttaaagcatagctcacaaattaaaattcttctagcttttcaccttgggggaaagaaatggccaggtgtggtggcttatgcctgcaatctcagcactttgggaggctgaagcttgaggactgctcgaggccaggagtttgagaacagtgtgggcgacatagtgagacccccactgctacaaaagatgaaatgacactgctctaacattaaccattctaagtattagctcatttgagcctcatgacagttttatcaggtagttattatcatcatcactgttttacagatgaggaaacggaggtacaaagagattaagaaattaaccaatataaatcatagaaatcgcaagtggaagaatcaggatgtgaactgtggaccttcagctccagtgcctccatggctctcggccattatgccattcatctcgggaggtggaaacagcatctgaatctgaagtttgtttgctgtgaggtgtaatagactcctctgcctttctctctctccctctttccttccttccccatcaattacttatctctctgtaactgaagctcctcgccactgagacagctccgcggtgcttcctgtccctgcttccttcacatcctcactttgacgtttacatatccactgcctctcagtttttactgctgcctttcttgccaaatacaaataatgactgttctttttactgctccttgtttctggtgcggcgggacaatgaggggagcatagatcaatgtttctcagagcatggctatggcgaaccttgaaaagagggagccctggtaacaggcccagaggtagaggcaatttccttgctccattgatgtctctcccaggggcgagattctcagtagaggagccagctctggattcagaagaaacagtgatggtttaaatggtgtgtgtgtgtgtgtgtgtgtgtgtgtgtgtgtgtgtgaataatactcattcagtgaggacacagaggtctcaagctaggtgatttcctgaatagcaagcgcaggggcaccaatgaaggcataattttaagacatgagttaaatattttcctgctctcatattggccagtgtgagggagtgaatgaaaaccccaaatgaaagggacccacattctatggatgccttctctggccttttatttcctctctattctagctacagctcaaatttgcgtttgagccaaggaggctgaataattttcctttgccgaaagactagctgtcaaattccatgcaagttgattctgctgatttgcatgagaggaaatataatctgatgaagatgtaaatgtacacaattgttttcttatctgtaggctttctgtttcttatttggagtctgatttaaatagtcccatttcaagtaacttagaaaggcttaatgcagtgccaaatgattacattttcagagacttgttgttggttaattctggctttccttctcctatatcaattcattttgtcatgcttaaaacaagaacttttgagcatttatattaaaaatattatgggagataggatgcaaaggtaaataagaaatgggcccaaccttctagagcttacagtgaaacacattttaaaatgcattttgaagtcatttgaaatttggtatgaatttgccatataagcaaggttctaacacattgcaattgtataacactttattgtttacaaaatactatcataatcctaggcaagacaacaaaaacttctttaaccccttatgtagttgaaacaatacaagtgaagaccattttaagtattatttctcagttctgtgaaaacccagaactaccatgtgtgagatcttgagctgcttccacttcgttctgcagtggaattaccgaggcatcaggacatgagcctgaatgttgggcgaacagcatcagtgagtcccagcttttgcaatctctcacttctgcacattgtagttgatacccctaaactatcttttgtgggtcaaatttgggctttcttacaagagccaataggaactttcaaaattttgatgttgcctgccagcatcttaacagtttcaatctctagctgtaaatatgtttgtctatgcaattatttagatattttatctaatgttccccctgattagttaaaacaaatgtcaaaaacaggagaatgcaaatgtgtggcttttatcgagtgaatataaatgagatgggttgaagcacttttgccatgttgtaagtggagaccctactctctcattcggcctattacatcaggtaaatgagcgtgttcacctgtgaaagaaaagaagaaaatggtaagacacatggtgtgatagaattagattgttaaagattgtatatgcaagacaaagtagagttaggatctttgtaagattatttttagcttcctgagaacagaacctgtagccaagtttacggttttgtttgcttacctttgactctgagacatatttcaaagtcagtgtggatggaattaaagatttctatgactgcatgggtagaaggtattcactatttgaagacggcagatggtgatagtggtggctggagtatttggctacagagaaatagcagagtaaggaaggggacaaagaggaaggagggcagtgtggcctaggtcagcagcagtagtgtacggggagcttgagaggaaggggacagggagtgtccagctaagggaggcacttctataagcgggagacattaggaagtcatacagaatgctttacatcctattagtgacaaggaagcgatgagatcatgtttgatggtggatcaggaaggcttcagggtatgtatgacatttaagctgagcctagaagagtgcataagatatttttttccagccagaaatctgggggaatgatatgatgagggcaaatgggatgagatgaatgatgagaacaaaagtggagaggtggctgggcgtggtggctcacgcctgtaatcccagcactttgggaggctgaggcaggtggattacctgaggtcgggagttcgagacgagcctggtcaacatggtgaaaccccatctctactaaaaatgcaaaaattagccaggcgtggtggcaggcgcctctaaccgcagctactcaggaggctgaggcaggagaattgcttgaacccaggaggcggaggttgcagtaagccaagatcatgccactgcactccagcctgggcaacagagcaaaactctgtcttaaaaaaaaaaaagtagggaggcaggaaatgtaagcacctgtttggggaacagtgaactggtgggcagcagttataggtcggttccaggttcactgaggaaagaagagaatgattaagctagaaggctaagttttggccaggtcaaggaggttctggaattccaagctaaactgtgatttagatttaatttgttagctgcataatttggtggtggaatccctgagacttaggaggaaggggaagcagtgataaagctcttgtaatcgttcaagcagaagtttctaaggacctgattcactgaagtaaaaagaagaataggatgcagtgatggattcaagagttagaataggtgtgatttggcaaggacaggagaaggggaaggagtcaagaatgattgagtgaatgggagattggcagtattttaatagacacagttaagagaaagggtgagagggaggaacgagataaattttaaaagtgttgagtttgaggtggctatggaatatcctgatggaatcctctggagtatttggtggaattgtaggcacggaatatggaaacaacttctttggaagcaatggcaaaagtaatggggatagatgaggtttttcgatgaggacacagagagcagaggttcaaggactgtggttcagaattgtgggaatttacgcttttaggatttgaaggaggaaggtgaaccaatgaagagagaaacaggagaattaagtgcagtgtaaaggatgacaaggaaagagcaagcttcaagaaggaagtggtaagcaacaggacacagtgctgagaagctgttgaagtggctattaaaagtcaccagagacccttaagtgagtgggtccatttagagcgatgctgcgattgatgctttcatattaacttgaacgcctctgcagtacagggggcaatgccactgcttggagttaggttagggggttaaaaatggggctgtacatgcaagttcagaagagccaagtggggagattcatcagcagtgaggggccagtattgggaaacatcgttgaaactgaattcaattagcatggtttgagaacttttttctaaaaatgtttgttagattaaagtaaatggtgagtgtttcaagggtctggagagtggcaaggcagtttcagtgggcggtcaaagagtcgagggactctagggtgcttgcaagggaggaggcttcaatgcctggcattgggccccgctgggcagtagggcaaatgaaactgggaagtgtgtgaggcccttgtccagaagaaattaagatccaggagaaaggatgaatggttggctgtcatgataagggcaaggatatatttagcaggagtgagcatgcacacaagcaaggactatccaaaggagggaatttcagggttttggactttttagctggggttagtttacagtattgatttcccaggtactaaagtagaatagggatgaaatttctggggttccacaggtctgggaggttttaagtcagtgctgaaaggatcatcaatatgtatttcttttgacaaaaatattatttaagtccactcagtgtgaaatattatgcaaaatgggtaataatataccaatttacaaatgtggaattagttcctagaagtatttaatcaacttgtgtggaatcatccatgtagtgcatggtgaacacaaacttgggaatctgtcgtttttgaagcctctgttttttcctaccaaattacatttcctcaataagttgatgaattttccaaatttctaaaatttttccattagacctgctatagaaaataagtaactactttccacaatggattttaagttacaatataaacaccatatactctaattgacctaggatcaatgatcaatgtactttatttatggacattttctttcctgaaaatacaattaagatacttaatatttgtgataaagcagctatctgataataatcaatatggattctgaactcctcagagttaaatgcaaggggcagaaaaggaaggaaagaaactactatttactgagggcctactatatgccaggcagtgtgccacatttttttcatatctactctagcatttaatcctcataacattcctatattggtaggtaatactgcacccactttatatatgaagaagctgaaggcttgtaaagtggcccaaggtcttccagtgatgacctgccagaagcaagctatgaatccacgtctcaccccaaagctgcctgtgttcttttgtgagaagaacaacaagctaacagttcatgtgatcttttgggtctcctaggggtcagtacacaatggtgaccagaatagagatagtttgctataagtagggagagaaaatatgttgttaagtgggtgcattgggagagagatctgaaaatggaaacgtggaatcagaggtatactgacatctcacacaaagatattgggatgtgtgaaggggtgagttttgaggggctatcatgggaaattagaatccaattaaagggaaatagacatattggaatggtttaggctggtctcaagaggaggtttcaacttccttattgccttccacccaatacaaatatgacacttgttttcatcctctccatttctgctctcatgtttgccaggatcaatacccaaggatgggcacttctctaagagctgtgattgagcttggtaagtatttcaggagcaattcaaacagattcttttgaatcctgaaatgtgaagtgatagctcttgcatctctcagtggaaggcaagggtttagagttttgtagaaaactgacctaacacttaattctccatttcacattggcaggccaggtacaaggtaactttttttctttcttttttttttcaacttttattttagattcagggggtacacgtacagatttgttacctgggtatatcgtgtgatactgacatttgggatatgaatgatcccatcacccaggtactgagcatagtattcaatagtttgtttttcaactcttacccctcttcctccctccccttctagaagtccctagtttctattgttggccttgttgacacagtgggggctgaagataactgccctttgttattatttgtactattttaccttttagatttcctaactaagaaccacttgtcccccaagctgggcatatttatttatgaacccttaaaggggctgatgtgaaattctgaagattttctgttagtcttgacactatgaatggggttatttcctgggcatgaataagaagtggttgacatcagtgagtgattaaccggatccttgatgttatgttttctggtttccaaagggctgtttctatgaggctgacatctatagggaccagttaaggccagcttcggtcaaacattatgaaaaggggtttggctattattcagatagcactggatctgtgttagatcttttgttcttagtgaatttttccttatgcaacaaatgtataaacagtggattctactttaaaaaaaattgtcctctttcctcctagggagaaattccttcgattttatagttgttgaacttagaacttctggacacattaaaatcaattccacacactaagatgcattttaagagttattaagtagaatttttgatcatgtttcttttctacagatacattagtgttaaagggaaacatcatttctggctttgagtgggtgtcctactttgtttctggtgattcgctgggagataggccaccaagaagcattactttgtcctctcagctagatggtaaagatcagccaggtgtggaaagatccattcatctattcaggaaacaggtactgagcggttgctacttgccaggtgtgttctggagcctggaattacagtaggcaacaagccagacagaagtccttgcccatgaatttctggtggatgaggcagacaataaaataaccaactaagtatataaattatcatgaagtgttggggagttgtaagcagtatgaagaaaagcaggtaaaggtgatagagagggagaagagccataattttcacagagtggtcagggaagacctttttgaggagatgccatttgaactgagatcacagtgatagaaggctggagaaatttggcatgggatgctttgcatttgctttttgacacacagagtgctttgttgtggcattcagtcctcccacaaaccctgtgaagaagatattaatatctctattttcagatgatagaactgaaatggaggcagttaaatgactaggaagaatgtgtagggccggatctctcactggacttagcccacatggagtatctggccccacacctccaatctaaccttccagtaaacatgcaccaacgcattcaagacagtcaccggggcgggtgtaaattcacacagcagagtagctaagcgttcaggagcggggtgggagccagaaagaatgggccctcagaggtgcctgccttggggaaaagtgagtgcagctaggcactcatggtcctttctggtccagcatgctcagacaatgagtaaaggccttggacactgtccttgaagtgtcccaaataaccttatttgaagccatttaaaaaaaatctgaaaacttcctttaaaatgatatccaccaatccctccccaccaactcacaccccaggtatttaagaaatgctgtgaagtaactgacaataagcaaaatgcacaacgtgcctttttgttctttcttttccatttcagtcagagaattcaggctttctgtagctccctctggtaacaagacatctaaacatgttcaaaacagtgttgttatctttcactttacccttgagcaatgcaaagaaaacactgtgaactggcagacatcattttgctaacactctcacatacatgctagctgtgcttctcctaggaaacctccccttctttctctggaagaagattttctgcttcatactttggggtctgtttccaggaagcatgtggctcgacttgctcttttaatttcatcccagccctattcattgcatctttaaatgagcattgtttagcaaatccagaagcagaacttgtttctggcttcctggaagggattttacttggaatgtaaagaggttggagagctgggcttttgtttctggctttgcagagggagatatgtggcacacataccatcgctgtacattccgcgatccatggcagacatcaataatcactcctggcattttctcttgttacatttggacatggtccccagagttcttcacaatccatggcagtccttgctgactgccagagctgacttatggatataacttccttgtcatcttatcagaacagcttcctggtgacagctgactttactgtatccactataaacttacaaataattttaaatgctcttattttactcttagtattctcaggacaaatataacagaaatgtaatagaatatctatggtttctggcatgaaaggagggtttattgaaatctttgaaggggatatgtttaggcagtcagtctagacatgcacatttttaataagtttcttaggttttgctaatatttccacctctgtgttgagaaacattacagcacacatttctagtttttggcacaggcttttagctgccttcttaatagagcaggcactcctgggcgagcctggggaagggagatctggaaagcacctttagttgtgcaaaactctgagggccaatctgactgtggcaaaatcacgtcctcatcccagggaactgtaatggtggctgagtttcttgagaatagtgaggcaagtctctctcttaccacacaaagtgttggctgctggctttgccctttggagaaataacttcaggcctggaaagaagatggtctccctggtggaaaggagccagcttctcccttgcttgcctgccgcagagtggccagcgttcctgtcagcatgaagctggactggcccacctggtcagggcaagaggcggcttttcttacaaagactccatttgtagtttctaagaaagaacttcttagaatgttcaaaaccaagtcgtgaaaatatttttttggagtcacctcattagttttaacaataaatgctcataactggaagtaatgatttggcaattataagtcaaacttcaagtaggggtaggagacctatttctagagaaacaaatagggctgcctcccattgagctaaattgtgctttgaactttcctagagtttattttcccccaggacctttaagaactgagcaaatatcagttcatcaataaaacctgtgtttgtagatggtttatgctgaagtattttcgactcggcgtctgtatttgaatgtgggaactgagtcagagagacttgcccagatcatctctgtctaactctttgagtggtacgcagggtgggtgcaatgaggcagggtggggtagacagcactgtgacttctggtccccacaggtgatctaatgacctaggagtctgcctggtatgtgttgttatagcatgcatatcagtctcctgttctgtgctataattcatgcgcttgcttattcattgaattattcaacaaatgctaataattgcctatgatatcccaagccctaggctttgtgcttggaaactaagataagtaaaatattgtcctgccctcatataactctaagtctagtgaagaaaacagatccatgcatagatgttttgaagcagtgcagcaggccgtgatagagaaatgccctgagctttctggtgtgtaaggaaagttctctaatcctgatgggggagtgaagaaggatgtgtgtgggaagcttccttgtgaaggtgacaacctgaattttaatggaaatgcaataggaggcagttttcttttattcatttttcttctttccctaggtggggcctgacatgttccaaagttagacaaacagaaggagcgtttgatggtgaaacataaggcagaacagggattccttgggcacagaaatgtgcaggtggtatgctgagagggggtcagtggtggtctcatgaattgctcagttggcttgttcctaaagccagtggctctactctcaggttggaacagggtctgattctgtttctcgctttctttctctacccaataattgcagttcctctgaaagctctgtgccaaatcttccattctgtgagcagcatccctaacctttcagctctccatcctcatctagaccgctaatttatttgttcctaccactttttcacttttcacccactccctttctcttaattacttccttttttagcgcagattccaagattcaacatgaaaaacactcccttgtaaagcccttgacctcttggtctctctcttactctgtaacattcatctggcaaaaccccaaccatgcttaacaccgtctatctgtctactcaatacttgcacccaagcaactgagcaagcgagagaacaacacacagccatgccttagatgtacaaggacacgcctggaatgggtactcgacaccgccctgcaatctgccacactcccctagttgtatatacgggctcacactcgccaaccagttatttcacacattcattcatgatccatctggtgggcatttcctttatgtctggcacagtgacaagccctggggacagagcgggaaacatgacacacaagcaccatcatactgcttactgagagctatgcagggaatgttgggtgaattgacggacggcctggctgactgctttacatagattgctttgggaaaacctcactgaggacatattcaagcaagtatctcaataccaagaaggagccagcccatgaagatcagaggaaggagcattctaagcatttggaacaaatggagcaaagcccctgagatgggcttgtcttgttcaaggaacaggaaggccagtgtggccagaccatagtggtcaaagaagagagtatcatggaattaagagtagacatgcaagaatgtagaattgcaggtgtaggcaggttggagattcaggaagttgcactggatggctctggtttccttgcccaaggagcagctagtctcccttagaactcagggtgtgtggtaagtgttgtgcaggtggctcaggagagtgggggactttgtcacagtcactttggtaaatgggacagggagctgaccaagaattggagtaagaattggaggttggagatgtggcatctctgtaactggggtcagagtttatagtggctgtgatcatcctggctgtaaatgggagcaggggaggtagattcttgcattgatctggggatggtgtttttcagaatggatttgggaaaaaaggataaggtgttaaagaaatgagactgcaggtgggcaatagtttgaagatcaagtacagggttcaagctgttagaggaaagatgccaagatagctgttagagcccgggactaaaccgagatcaagaatcctttatgagattgaaaagcagctgtagaatgagttttaaatagtgtttaattatttatttattttgcagcccagcaatagcagcctgagttctagctcagagcctgcttttgatagcagattgagacatcagctttgcacctggcaggccaggagatattaaggagttctgtttgaatgagtttgccttgtctaggctaaggtatttgttaggagggccagaagcaaggatcttggagaaaagagagaagcaagaaaaggagtgaggggaaatgggccagaagaaagcaagctttcacaaaggaaagttgctgattctgtgtgtgatcaatcatgctaacaaagaggccagtgacacagccttgtcctcccagaacatcgtcattctaccaactgaagcccctttgggagatgccagtggtgatttataggaggtactcctgcatgctgtaggagcttactctactatgcacagggttctttgctgatagaacacttccttttaaaattcccttttgtgggcaagcaaatctcacatcttaatacaaagcaaacctttggaagataaacacttttaaatcttacattttaaaataaaaagtttccctagccttgcctgaggattgataggcataaaaacattccccagcaagtgtcattttaccaaatctaaattctcaaggcgatcttgtgtctttcactagaatctttcttagacactcttgaaagaacttaaagtttgcattgattttattaattttactttattgggtgaagaatactgctaatataatacatgttctattcatttgcagtcttatttctaattaggcatttgatgaggacttgttgatggattagttgcctggccttttacttttctgcccggggcaactgaggcaatgtactttaaggccagtactacaggatgttaattagcaaaaagccaaaaagaaaaaaaaattcagcagtcaaaaaggttagagatactctggaaaaaataatgtgaaacacattttttttgtaactgctgactttctgggaggttttaatatgctaaggaacattgagagtttccaagagggggataaagtatgcggtatgtctacatccttttgagcatagggtcttcttttgttggagtggtttatgggactgatattctacagaaaaccctttgaaacctataacattaagatttccaatagaggatgctgggggcagaaaaggaatgaaactcagaataatactctttatatacgagaaaccaaattctatattttcttttagttttactttagtaattgttttattcatttccatgttccatctacatgctatctgtctgtctatctatctatctatctatctatctatctatctatctatcatctatgtatgtatctatctaatctctctctctttctttctatcatctatctatcttcttacaataaaaccagtattcctccaaccaagaagggcttgtaactgcgccaactaaaagtttgggatgaaagtgatatgtgtgacttccagacttctaatattaggtcacaaaaaggttatagcttctctctttcttttctttttcttttctttttttttttttttttgagatggagtctcgctctgtcgcccaggctggagtacagtggctcaatcttggctcactgcaagctccgcctcccgggttcacgccattctcctgcctcagcctcctgagtagctgggactacaagcgcccaccaccacgcttggcgaactttttgtatttttagtagagacggggtttcatcatgttagccaggatggtcttgatctcctgaccttgtgatctgcccgcctcagtctcccaaagtgctgggattacaggcgtgagctaccgtgcctggccgatatagcttctctctctctctctctcgatatagatagatagatatagatatatggttatccctatgtcttttaatgctttctattggaactcagccactatactataaaggagtctgagctagaccatttggagaggcccttgtggcgagcaactgagacccgcagccaacaatgagaatcagcctgaagcatatcagtgactgggacttcagatgattccagatcttagctctcaaacttcaaggtcagccccagacactgtggagcagagacaagctgtgcctgctgtgccttgtctgaattcctacccacagaaaccgtgagcacaataaatggttgccttatggtaataaattttggagttatttgtaacacagacatcgtcgtttgaaaaaaagggtaaagctccagattattaacctgacattaatggcctctctccaatgtggtcccaaactattcttccaactattcatctccaattattccattatgaattcactgctgaaaatccagctgctttttgtgcccacaacaaaatcacactttccttcctccacatctttgcctattaaattgtgagttccttgaatagttctttcaaaaatattttctcaggacttaacaaagtgcttagaatgtaattgattctaagctattgatagatattggaataaaaatcaatgcataaacaaaggaggtcatcctcctagatagacatatgttttctattcttttccacatgtttaagtcctgttcatcctaaaatatcaagttcaaatatcattgcttgttgaagtgttctctagttgtccccaaattaagcaactttcctaccttgagtgccaatataaagcattgcttatactaattacatagcccttgatatttacaaccataatgctttggcgtctttccatgatcttatatataatttctccaactagttcttaaggtatttgagggcagtactgtaccttattattattttgcttcttatcttcctccttcttctcatttttaaattctccttaagacctatacagtgtgtgttaggtacacactgtgtattcataatctatttgttggttattatgagccaaaaataaaatgatagctctcaaaaccaaaaaaaatgcaaaatcttatcttaggcggtgtgacatctgtagtgcattcagatccagggtgatcactctgaactccgcaccatttatgttgtaagcattgtgcactattccaggaggatgtggtcatgagaggatagagctcagtttcccaccccaactcttcaagagcagttctaccatatcagaaggctattatatacaatttcatttggataaagttctttagctaggacaaaattaaaaggaacatggacaaagaaatgaggaattcagaaattataacgagcttttagaggcactgggggtgttcagggatatctgagaagacatgatgcccgtcttcagttaattgaagtcaggtatacacaggattcatgctaaatagcacctgataattgacctaaagtgaattgatggttagattttgagttagtctcaggaagactttaatagtagagagtaccgtcaatggactgggctttcctattaagtatcatgctctgtatcattggaattttccaaagggagtcaaacaggtagacttctgttatgaagaatgacttaatggcaacaggttgaatttagtgaatttgttccaatacttaatttctgggctgcttttagtctaagtttagtcagacagaaggaaagcattctaggtattcaaacagaaggagttaaatgcaaggaattggttatacatttgtaggaagggctggaagagcaaaagggaggtagacagagcatggaagaggtaagaggaagaaggggtaaaactgagatacaagaggctgccagtgtcctagggtgaagcccataaagctgcctcttctgctgctttgttggagacacttttcagttatatctggatgcagtgaggaagagctgcatgaaccaggcctacaactgtgcaggctgctgcagttcagaatcatctcatcctgctgcaacagcagcaaccacctgggactgttggcaattgacactgtcagagccagaagcaggaatattttctaagtgcttcctattggcagaacctaacaggaagctagtagacaagggaacctgggaactgtagttcacagactcacagtccagcaaaaatagagcacagtatacaaaggcaggtggggtgctgacagacaagaagtcagtcgttgacatttgggcccctaggcccactctggtacaagcatccatctctcataggaacaatcgcagtggctccaattagtctccttcaatccccttggcctttcttctatctgctgtttatgataaagctggaggggtctctttaaaacaaacatctaattatgtctctcctttgctgaaaacctcccagtagcttcccattaccattaaggcaagagtctactcttttgtatacatgtctagaaggccttgtgtagtctgttccttcttcatctttatagctttctctgacattagatttcttcttggtctttgtaatgcagttatcatggtttctttcagtttcttgaatgtgctgttctccttttctgccatgtgtcttttgtacatgcttctccctctctataggatatgttttggatttgtgtccccacccaaatctcatgttcaatggtaatccccagtgttggaggtggggccttctgggaggtgatagatcatggggatggatccttcatgaatggtttagcactgcccctttggtgctgctctcatgatagagttctcatgagatctggttgtttaaacgtgtggcacctcccagcctcactttcttgctgctccagccatgagatgtgccggctcccactttaccttcctccatgattgtaaatttcttgaggcctccccagaagccgagcagatgccagaatcatgcttcctgtacagcctgtagaactgtgagccaattaaacctcttttctttataaattaccaagtctcaggtatgtctttatagcaatgtgagaacagactaatacaatatggtatgttctccctccacataacccagacattcattcgttcttcagaattcaactcaatcagccttctttcatagacactttccttagtctttctgactgggtcaattgtactattttagtataaatgtttccatctattacttacttacttctatgtctctctctcctcccctgacacacacacacacatttaatttctttctttctttctttcttttttgagacagagtcttgctctgtcgcctaggctagagtgcagtggcgtgatcgcggctcactgtaatctctgcctcccgggttcaagagattctcatgcctcagcctcccaagtagctgggattatgagcactcaccactatgcccagctactttttgtatttttagtagagacggggtttcatcatgttagccaggctggtctggaacctcaggtgattcgcctgccttggcctcccaaaatgctgggatgacaagcgtgagccacctcacctggcccacacatttaatttctatctcttcctctcaactgtaaacttttgtgaattcaggaattatgtctttttctttgctcaacaatgctcactcaacacctagcacagtgccttgtatataaaggatgcttaaaaagtgaataaatatacaaaggcatgggtatatgatctgatgattcattcttgctgagtgaaagttaaaatatcctgggaaccagtgtcagttgtctactttttattgcacacttgaaatgctggattcactgttgggcttatcttagggatcatgtaaatattagaaaaatgacaatcatttttttctctgactcttgtttgagaggtaagtctatctctataaaaatataacatgcttttggagatattttgccttttctttgtactcctgagatcccctgctctccttaatggcttcaatctttatcaagatctctctcatgggagaagccctctaagaatgctgactttgtttgctgggtgattttgaagcctagtctattctgggaacaaaaacccaagctgaaatggtttgcatttgccattgggaatttaaaccacttgtctctaagactgtagcgacaggaacacagggaaaaatagatgaggatctgagttgcaaaaattccccaggactcattggaaaactacctaaggaaggagggggggaaaaggcaccaaacaatctctaaaaagagccatattggggtcagcatctagctagtttattaatttctttgactgttgttttttcctttaatttctgtccctgaacctggcaaagaattgtggcagttagtccccaagtcagtttgcggggaggccatgtttagtagtgcaggtgccatctggattttgaatttgccatgagaacaccctctgctaggcttgaggtgtttagatgatggtgagacgggcaataagggagaaatatgacattgctcatgagtgattattcttcttgttatttattccctattccttaaaccataggtgaaatgtcctagtcaaagactttagctgacaggggactcccagtctcttccagatggagaaaatgtgaacctgaagggattatttttgcagtgtttacagtgcatagaagtttccttaaatatataatcagaggtaattagactgtgtggtgtaagaaggggtataaacactattgacatgctagtctcgaaataggcaccatctgagttgatttgcctttgacagttcctgattttcaatatttttgatattttgggaagcagatgtgatgagggtgaagaagtttaagcccaagaataacatctcttggctccaagataatattgcttgtttgcatcttcttatcttcttaatctatggagagacaccagcacacggagggatattgtcaatctagggcttagtaaattggatgattcaagatggcaaggttttacctgctgccagatgaataagcttccgttaaatctatggaaattctctgccacaggggttgacatcttttactctgggtcgaattttttaaagttaccccttccagtcttgaaacagacttaatatcagtattttgttgtgcctgtcagaagtttttaagtcattctttcagtattgtgtgaaaatataaaacactacagcaattcacaatatgattattaacaattccacttaggaataactggtgtttccttgatttaagacacatttgataatgccaaatgtgtttccccttgcatacataataaatgtgtcccagggccatggcagcctggagttagaatcttggtactaaaagctagcattgcatttattctaaggctcagtgccttcctacagagccccatataaatgcttccacatttcactgcttgtgttgctgcatagcaaattacctaaaaatttagtggctaaaagcaataaacccttagtatctcagaaaatgcagttttttatggcttagaaatttggcagtggcttagctggctgactctcggtgtctcctgagattatgatccacgtgtaagttgtggtgtagtcatctgagagctggactggggctagagaattagcttctacaatggctcactcacatggctgttggcaggaggcctcagttgcttgtcgcattgggcccctccacatggctgcttgagtgtacttataacatggcagctggatttttccagagcaagtgatcttagagagagcaaggaggagcctgtagcccttgtgccctcatcccgagggtcacattactttacttccaccatgttgtactcatcaggtcaccaaggaaaactcacactcaagggtacaggaattagtctccaccctttgaagctaagagtatcaaaaaacttgtggacatacttgaaaaccaccctattgctgattgattgtgacctgctctactttgaaatgcttatttcttctttgtaccccaagatcttgtcactttggctggacctgattcacctgtccaggagctgcacttaattttatatgttttgcccttcccctcctgagcagaacaccaccaggcacaactctcagggaacttgccttagctaaacctaaacctaaagacttcaaaacaaaattagttactcaaaagtcaagtttccctcctgctgtggaactgggagaaggtggaacatttccttttcaaggatcctattatctttttctctcaagtggcctttgtcaggccatgtaaatcaattaaaatttgtattctggattcgtgggcaagatagctgaataggaacagctccggtctgcccctcccagtgagaccaacgcagaaggtgggtgatttctgcatttccaactgaggtgcctggctcatctcattgggactggttacacagtgggtgcagcccatggagggagagcagaagcagggtgagatgtcgcctcacccgggaagtgcaagggctcagggaactccctccccttgccaagggaagccttgacggactgtgccatgaggaacggtgcatttggcccagatactacacttttcccatggtctttgtagtccgcagaccaggagattcccgcaggtgcctgggtttcaagcacaaagctgggcggctgtttggatagacaacaagctagctgcaggagtattttttgtgccccagtggcacctggaatgccagtgagacagagtcattcactcccctggaaagggggctggtgccaggggcctgagtggtcttgcttagtggatcccagcaagctaagatccactggcttgaaattctcgctgccagcacagcagtcggaagttgacctgggatgctcgagcttggttgggggaggggcatccgccattactgaggcttgagtaggcagttttcccctcacagtgtaaacaaagccgccaggaagttcagactgggtggagcccaccacagtcccacaaagccactgtagccagactgcctctctaaattcctcctctctgggcagagtgtctctgaaagaaaggcagcagccccagtcaggggcttaaagataaaactcccatctctctgggacagaacgcctgggggaaggggaagctgtgggtgcagcttcagcagacttaaacattcctgcctgctggttctgaagagagcagcagacctcccagcacagtgctcaagctctgctaaggtacagactgccttctcaagtgggtccctgaaccccatccctcctgatggggagacgtctcccagcaggggtcgacagacccctcatacaggagagcttcagctggcatctggcaggtgcccctttgggatgaagcttacagaggaagcagcaggcagcaatctttgctgttctgcagcctctgctggtgatacccaggcaaacagggtctggagtggacctcaagcaaatgccagcagacctgcagaagacggacctgactgttagaaggaaaactaacaaacaggaagcaatagcatcaacagcaacaaaaagaatgaccactcaaaaaccctatctgaaggtcaccaacatcaaagaccaaaggtagacaaatccacgaagacggggagaaaccagtgcaaaaaggctgaaaattccaaaaaccagaatgcctcttctcctccaaaggatcacaacacctcgccagcaagggaacaaaactggatggagaatgagtttgatgaattcacagaagtaggcttcagaaggtgggtaataacaaactcctccgagctaaaggagcattttctaacccaatgcaaggaagctaagaaacttgataaaagattacaggagtggctaactataatacccagtttagagaagaacataaatgacctgatggagctgaaaaacacagcacgagaacttcgtgaagcgtacacaagtatcaatagccgaattgatcaagaagaagaaaggatagcagagattgaagatcaaagtaatgaaataaagtgtgaagacaagattcgagaaaaaagaatgaaaaggaacaaacaaagcctccaagaaatatgggactatgtgaagagaccaaacctacatttgactggtgtacctgaaagtgatggggagaatggaaccaagttggaaaacacactttagtttattacccaggagaacttccccaacctagcaagacaggccaacattcaaattcaggaaatacagagaacaccacaaaaatactcctggagaagagcaaccccaagacacattatcatcagatttaccaaggttgaaatgaaggaaaaaatgttaagggcagccagagagaaaggttgggttacccacaaagggaagcccatcagactaacagcagatctctctgcagaaaccctacaagtcagaagagagtggcagccaacattcaacattcttaaagaaaagaattttcaacccagaatttcatgtccagccaaactaagcttcataagtgagggagaaataaaatcctttacagacaagcaaatgctgagggttttgtcaccaccaggcctgccttacaagagctcctgaaggaagcactaaatatggaaaggaaaaaccagtaccagccactgcaaaaacatacaagaatgtaaagaccaacaacattgaagaaattgcactaactaatgggcaaaataaccagctagcatcataatgacaggatcagattcacacataacaatattaaccttaaatgtaaatgggctaaatgccccaattaaaagacacagactggcatgttggatagagagtcaagacccggctgggcacagtggctcacacctgtaatcccagaactttgggaggccaaggcaggtggatcacgaggtctggagattgagaccatcctggctaacatggtgaaaccccgtctctactaaaaatacaagaaattagcctggcgtggtggcgggtgcctgtagtcccagctactcgggacgctgaggcaggagaatggcatgaactgaacgcaggaggtggagcttgcagtgagccgagatcatgccattgcacttcagcctgggagacagcgagactccgtctcaaaaaaaagagccaagacccatcggtgtgctgtattcgggagacccatctcacatgcaaagacacacataggctcagaataaagggatggaggaagatttaccaagaaaatggaaagcaaaaaaaaaaaaaaaaaaaaaaaagcaggggctgcaatcctagtctctgataaaacagacttctttaaaccaacaaagatcaaaaaagataaagaagggcattatataatggtaaagggattaatgcaacaagaagagctaactatcctaagtatatatgcacccaatacaggagcacccagattcataaagcaagttcttagagacctacaaagagacttagactcccacacaataatagtgggagactttaacaccccactgttaatattagacagaatgatgagacagaaaattaacaaggatattcaggacttgaactcagctctggaccaagcagacctaatagacatctacagaactctccactccaaatcaagagaatatacattcttctcagcaccgcatcacacttattctaaaactgaccacgtaattggaagtaaaacactactcagcaaatgcaaaagaatggaaatcttaatagtctctcagaccacagtgcaatcaaattagaatgcaggattaagaagctcactaaaaactgtacaactacatggaaactggacaacttgctcctgaatgactactgggtaaataacgaaattcaggtagaaatatataagttctttgaaactagtgagaacaaagacaatgtaccagaatctctgagacacagctaaagcagtgtttagagggaaatttatagcactaaatgcccataggagaaagcgggaaagatctaaagttgacaccctaacatcacaattaaaactagagaagcaagagcaagcaaattcaaaagctagcagaagacaagaaataactaagatcagagcagaactgaaggagatagagacacgaaaaacccttcaaaaaatcagtgagtccaggagatggttttttgaaaagattaacaaaatagatagactgctagcgaaactaataaagaagaaaagagagaagaatcaaatagacacaatagaaaatgataaaggggacatcattaccgatcccatagaaatataaactaccatcagagaaaactataaacacctctgtgcaaataaactagaaaatctagaagaaatggataaattcctggacacaaacaccctcccgagactaaaccaggaagttgaatccctggatagaccaataacaagttctgaaattgaggcagtaattaatagcctaccaaccaaaaaaaagaccagcaccagatggattcacagctgatttctaccagaagtacaaagaggagctggtatcattccttctaaaattattccaatcaatagaaaaagagggactcctccctaactctttttatgaggccagcatcatcctgataccaatatctggcagagacacaacaaaaaaagaaaatttcaggccaatacctctgaagaacatcaatttgaaaatcctcaatacaatactggcaaactgaatccagcggcacatcaaaaagcttatccactacaatcaagtcggcttcatccgtgggatgcaaggctggttcaacatatgcaaatcaacaaatggaatccatcacataaacagaaccaatgacaaaaaccacatgattatctcaatagatgcagcaaaggcctttgataaaattcaacaccacttcatgcaaaaaacactcaataaactaagtattgatggaatgtccctcaaaataataagagctattcatgacaaacccacagctaatattatactgaatgggcaaaagctggaagcattccctttgaaacctggcacaagacaaggatctcccctctcaccactccaattcaacatagtattggaagttctggacagggcaatcaggcaagagaaaggaatgaagtgtattcaaataggaagagaagaagtcatattatctctgtttgcagatgacatgattgtgtatttagaaaaccctaccgtctcagctcaaaaactccttaagctgataagcaacttcagcaaagtctcaggatacaaagtcaatgtgcaaaaatcacaagcattcctaaacagcaataacagacaaacagagagccaaatcatgagtgaaccgagaataaaatacctaggaatccaacttacaaggaatgtgaaagacctcttcaaggagaactacaaaccactgctcaaggaaataagagaggacacaaataaatggaaaaatattccatgctcatggataggaagaatcaatatcatgacaatggccatactgcccaaaataatttatagattcaatgctattcccatcaagctaccactgactttcttcacagaattagaaaaaaaaccactttaaatttcatatggaaccaagaaagagcccatatagccaagacaatcctcagcaaaaagaacaaagctggaggcatcacgctacctgacttcaaactatacttcaaggctacagtaaccaaaacagcttggtactggtaccaaaacagatacatagaccaatggataagaacagaggcctcagaaataaccccacacatgtacaactgtctgatctttggcaaacctgacaaaaagcaatggggaaaggattccctatttaataaatggtgttgggaaaactggctagccatatgcagaaaactgaaactggttccctaccttacaccttatacaaaaagtgactcaagatggacgaaagattaaaatgtaagacctaaaaccataaaaaccctagaggaaaacctaggcaataccattcaggacataggcatgggcaaatcttcatgactaaaacaccaaaagcaatggcaacaaaagccaaaattgacaaatgggatctaattaaactaaagagcttctgcatagcaaaagaaactatcgtaagagtgaacaggcaacctacagaataggagtaaatttttgcaatctatccacctgacaaagggctaatatccagaatgtgcaaggaacttaaacaaatttacaagaaaaaccttatcaaaaagtgggcaaaggatatgaacagacacttttcaaaagaagacatttttgcagccaactaacatataaaaaaagttcatcatccttggtcattagagaaatgcagatcaaaaccacagtgagatactatctcatgccagttagaatggcgatcattaaaaagtcaggaaacaacagatgctggagaggatgtggagaaacaggaatgcttttacactgttggtaggagtgtaaattagtttaaccattgtggaagacagtatggtgattcctcaaagatctagaactagaaataccatttgacccagcaatcccattactgggtatatacccaaaggattataaatcatgctactgtaaagacacatgcacatgtatgtttattgtggcactattcacaatagcaaagacttggaaacaacccaaatgtccatcaatgatagactggataaagaaaatatgtcacatatacaccacggaatactatgcagccacaaaaaacggtgagttcatgtcctttgcagagacacggatgaagctggaaaccataattctcagcaagctaacaaaggaacagaaaaaccaaacactgcgtattctcactcataactgggaattgaacaatgtgaacatattggcacagggaggagaacatcaaccactggggcctgtcgagggctgggggtcaaggggagggatagcattaggagaagtacctaatgtagatgacaggttgatgggtgcagcaaaccaccatggcacatgtatacctatgtaacaaacctgcatgttctgaacatgtatcccagaacttaagtataataaaaaataaaataaaatttgtgttctaacgggaataggtcagagactttttctcgggcgtgggatgtctgcaggaatctggagccctgatacagaattaccacaccaggttgtccttaggaagggctggctctggacacaacctgtgagcaaggtttgagcccctcctgaccctaacacccttgtaagatcagccaagcccattccttctcagggcctttacactcgcacttccgggcataagcctcaaatgttcacacccacattgctgcatgactgattcctttttgttatctcagcccaaagaccaccttctcagagagctttttcagactactcaatctaatttctttcctgctggtaggccgtctttaagagtccatctgactttacttcttcaaggctgcattactctgtgaacttatttagtctatttttttgtttctttgtctacctcaccccattaaaacataaggaacatgagagtaagggacctcactttccttttctctgctgtatcctcagcatttacagcagaacctgatgcacagcaggtgctcaaaaatgttaactggctgaacgaatgaatgagtgagtgatgaatacagattctgttgtgaaataaaaaaaaaaaaaaaacgctgaagactaacattatagaccaagcaggctgtgtgttcttaggcatatctgggaaagagaagcacagctaatctgggcaggtagagcctcggcgtcattacaacttgaatatcaaaggaatgtgactttcttggtatcccagtttattgaagcaggtcatacctgctttacatgggttttctgtatgtatattaggaaccccagcctcatgagtctcccagttcattgggcaaacatctgccgctgatggtgagactttgttaatccatatccaacatgagctgcacctctctgtcttctctcctttgatcccacccatgtttttctcccttgaccatcttccccttagctcatatgcagctcatgagccccattgccccactcctgtcccttctaactgccttatatatttttccacttttggagttttttgttacacataattaaaaatccaaaggtgatgaaaaatggcaaatgattcaaacctgggtaaatctattcatgtcagaagtctgtagttactggtatttatttcttttgtgttccagtggtattttcattgttgctggccccatccctcctctttttctctagggagaaatcttggctgctggcttctttaaagtgtttcacagatgaagggaatatcaaggacagacttaaaagagggaagaagactattgtttgaagccaggtgaggccacttaggaaatgtgggtacaatcctttccaagtccacctgtgttgaaagcatacagaagcctctgtactttgctagcctgagctgtttggcaaatgatgtcccttttatttactctctgtccctttcttcatcctgttcccagccttcggaaggcctccctgtgtgggctggtagaagtgggctcctgtgtgctctgttgctagttggatttggccagtgggaggcaccagcagtgaatcagaggatgagagaagagtggggtcagggtatctactcccgtgccctggcttgctccagtggatgctatacaggcagtttcctagatgtagggaacgctccagttttcagtaacttctacctccctttgtcccttaattgtaggggtagtaacagctcttcacagtggacagcctgaggtgctgcactattgctttctggtttttgtaaatcttacccatctcttggaaagcagcccctttattaaattctcctccagtagcagagatgctgcacacatatcccctttcctctcggggcccgaggaccagcttgctcagcatccttgtcctcagcaagtccttgtcactcagcaaatccttgtcacagcctccacaaacgactatagcctaggcaactgaggcatttgcagacactgctggcattgattacttcgaaataaatcatatggagactacattactgtgcccaccaagaaccaaaccaccccacccaactgacactacaggatgcatctacatatatatatgtttttgttttttttcttttgagatggcgtgttgcactgtcacccaggctggagtgcagtggctcgatttctgctcactgcaagctctgcctcctgggttcataccattcttctgcctcagcctcctgagtagctgggactacaggtgcctgccaccatgcctggctaattttttgtattttttgtagagacgggtttcactgtgttagccaggatggtctcgatctcctgacctcgtgatccgcctgcctcagcctcccaaagtgctggaattacaggcgtgagccacatgcccagccaaaaatgttgttccctacaaaagctactccataaaattggaactattctaccagatgcacagctatcaatggagagacacacacacacttaaaactatgaaaaagcagggaagtatgacacctccaaaggaacacaacaattctccaataacataccccaaagaaaaggaaatctatgatatacctctgtaactcaacctcaatctttccttctaagcctaaaggcagaactcttcccttcttctgtcaaaacttgatacctgctagtagtttgatcttcggtattctaagaaagggaggtgagcacataaacttgtagtacaaattatttacattgaaaaagtgtatatatacagatgcaaatgagttacaaatattttggtctcatttctaggtgaagccttgatgactgtggtttgaattcactgggaaaagtggaatcgtcaagagacccgggctaactaaatccctctgggagcctcagcagctgaggccatcactcaaaattaagggtggtagattctcctttggacctgtaggcccaattcaagaactaatggctgccctgattattctgtagtctgtgttgtctgatggatccatatcttcctctttggaaagctgggaactagaaagaagtgttctatttgctattacccaagggataatactaccagaatagccagtggaatttgcctattacttttcttaaaaacaatctttgtgttctggagtaattttagatttatagaaaagttaccaagggagtaaaaaaagttcctacgtacccttcactcagcttcctctaccattaatgtctcatataaagataatttgtcaaagctaagaaattaacattggcatattaatattaactaaactctgggtttcatttggatttcaccagttttcccactagtaacttttttgtggtgcaggattcaatccaggatactatgttgcatttggtcattgtcttagtccatttgggctgctataacaaaataccttacactgggtaatttataaacaacagaaatttgttgctcacagttctagaggtcaggaagtacaagatcaaggcaccagcagatttggtgtttgatgagggcttgttctctgcttcaaagaacaccttcttgctatagtagaaggggaaaaaataagtccttggagcccatcttacaagggcactaatcctattcatgagggtggagcccttatggattaatcactttcaaaggttccacctcttaatattatcacattgagtattaggttctaatgtatgacttttggggggataccaacattcagatcatagcagttatcatatctccttaatttctccaatctgtaatacttcctcggattttcattacttttcgtgaccttgatgttcaggcgtaactttttaaattagttgaaagttcatgaatgcaattaggacatgattaatcttattaatcatgaaaaactattttcacatagctgttgccatcctatggatcccaccctttgaggacaggtcagggccttccctctattttgcacatctctctcagcggccatgctgagtgtgttatgatttatggtgattatagcatgatattgaggattttttgatcagtgtctgcttatcatagtagccagcagctttcatcaggtccctgtatgaaggaaatgaaaagatctcttttaggaaacaggtccatttattttccccttggtgttccctttgaagccaatctataaactcccttagatgacagtcacctataataatttcgaataatgctcctgaacctatgctccctaaaagtctgtccctctggttggactttcttgtgctttaattgttgcgtgttatcactttaagggtagtattctttctcacaaagcttttaagcattactttgtgaaaggtgttagaaaggtgaaaatggtaattaaatcttatctccagcgtaattttatgattacattgtactattccccagaactatgctttcaaaattgttgtgggcccacaaatgcctcttgtgtatcactgtagagaaagtgctaacacagggctttgttgtccaattatttttatttcagcatctgaatggattctcgatctaggcgccgttgttcatgctcatccttctcactcatgttactaaatgaaaaagcaggactccacaatcttgtacttggatgattgtaatgctggggcaccaaagttaagacactagaaataaagggataaactcctcctgatgacatggacctgtgaactggtgcatcttacaatcttcagagactcagggacagattagcagtctcaattttgaatacctcaactatctggtggaaggagatcttcagttatatccattcactccttcaagcagttgtagagcacggacagtgtgtcagacattgtgtcagtttcaagatggctgagagtttgttcccatcagtctgcgaggggagacctgcaacaaataattgctgctcaatgtggcacgtgccgtgaggggaggaagctgaaggagctctggaagctcgggatcgtggggagcgacgagggaatgagggccaccagatgttttgctgaggggtcctgaggacagtcccctaagagcttaggacttccaaagcgaatactgctttaaataacactttgtgggaaattcagtcatgtgtagtgagaatagaggagacaaggggatgagacagaaagtgggaaaatcagttaggaagcagttattgtagtccaggcaaggagatacagtttccctccccctctcttattttattgtaagaggagatcacagtctgtagaaaaaaatgtatagaactggtttgtagttaaagaaatcctagctctaccatttattgaccatgcaatcctgagtaagtcagtggagttctccaagtctccatttttctcttgcagagtgaaataaaatgtgaagagtaactgcctggttgctctcagactcattctctgccttcctttgctctcttctgtaatgcagaaagctacatttctttcccagactttccagctctttggcttccagatggatttgacccaagagaggcagtggcaagattgcagagtagcagtggagagtagccagggcatttctcttcctcttttggcttcctgtggcatccttgacagcaactcagtttccttcatggctccagctgctgctgtggggccccagcttctggactgtgttacaccactgccttctgctgtccctccagacctagggctgataatggcttcctactgttgataatgccggggttcaccctcaataaccctgattgtatttctaacttttccctcactgatgtaactgatttttctgtattaactttcttctgtttgtagaacgaataatggtttctattttcctgactaacatgtgaaatagaggtactctttaaactgcaatgtaagtatagatatgtgaggttttgctgttactctttaggactgttatatctgaagaaaatcctggaatgcaaaattccatgatgggtggagcttggtgtagcttgtgctggtcagtgggcatacctataggcttggtaggcaatttcttcacttttgggctctgtgcctgtatatctagttcagaagccaacaattggttctgtgtcagtggctcctctggggtccatgctgtatgctgagcagagacacagatacatgaaacatatccttgtccttggggagcttatgtctgtagaaatttagcaaaaaatacctaatatagtactaacacgatttgggatttgtacctaaaaaacaaagtacaaatcaagccaactatattaaaaagtttctttgatgagttgaccaagtaccaagaaatgaagaaataattgagtatgcactatagaaggtatcgttctagatgatgcaggacatacaaaggaggactatgacatggctttcctctcatgaagaggtttacaatgtcctgaaggagacaaaataaaattacatgaaactaatgatcaaaggaagtgtattacaattgtttaagcattgcagaaacaataagttttaagaactttaatatttttgaccagtaagtaagtgtgaagttatcctattcccaaaaatgtaacaacatgtttaaatttctttttttctttctctttttttttgagatgatgtcttgccctgtcacccaggctggagtgcagtggcacgatctttgcttactgcaacctccgcctcccaggttcaagcgattctcctgcctcagcctctcggagtacctgggataacaggtgcccgccactgtgactggctaatttggtattttcagcagagacagggtttcatcatgttggccatgctggtctcgagctcctggcctcaagtgagctgcccgcctcagcctcccaaagtgctgggattataggtgtaaaccaccacgctcggcctaaatttctaacaaaaaaagagagcaaacctgttaacctagaattctttgcatggcaaaaaaaatctttcaaaactggagtcaaaaatgaggttttttttttttttttttttttttcagaatagcaaaaagtgaggaaatatgttgtcagcagactttcactataggacatgtaaaagaaattcctttaggtggaagaaaaatgatgccagatgagacttatatctgcataaaggagtgaagaatacctgaaatgggaaatatgtttggaatataaagcacatttttcttatatttaaatgtcttcaaaatgtttgactttttaaggcaaagataacaatattgaattgagaagcttgtaaagtaggcagaagtaaaatgtatgacaaaatagtacaaataatgcgaaggaggaaataaaagtattcatcataaagttcttacattatacataaaatggtacaatactatttgaaggtagagcatctaacttctagatgcccactgaaaaccttagagaaactgttggaaaacaaaacaaaacccatgaaccaaaaacaaagtgttttagctaataaaacagtagcgaagataaaatgaaattaagaactgcccagtctaaaaggatacgggaagagggaaaaggcaacacaaaacagatgtaagaaatagaagggaaataacaagacggtagattgaaagtcaactgtactgggtaaatgaaagtgatataaatacctcaattagcatgcagagattttatgattggagagaatactaagacccaattatatgttgtctagaagaaacacactccaaatataaaaacagagaaatgtcacaaataaaaagataataaagagccagacacagtgtctcacacctgtgatcgcagtactctgggaagctgagtggggaggattgcttgagctgaggagttcgagaccagcctgggcaagatgacaagaccttatctctaccaaaaaaaaaaaaaaaaaagctggttgtggtagcacattcctgtagtcccagctactcaggaggctgaggcaggaggattgcttgatcctaggtgattgaggtttcagtgaggtaggattgcaccactgcactccagcctaagcaacagaacaagaccctgtctcaaaaaaaaaaaaaaaagatagaaaatatatactatgcaaactctaatcataagaaagttaagagttgttaataccaaagtagacatcagaaaataaatattgccagacataatgggacatttcataatgaaagagggatcaacacattaagaacacataacaatcataaaatgaatgcactcaataacaaagcttcaaaatatgtgaagcaaaacctgacaaaactacaaggagaaatagttacttcttcatcatagttgaatattttactctcagtagttaatagaacaagtaggcagaaaaatcagtaaagtcagtaaatatatggaagacttgaatgacaccatcaagcaaatccacataataatggaatatacattcttttcaagtgtgtatgagcactaaccaacatatgctaggctaaaacaaatctcaataaatacaaaagaattgaaatgacataaaatatagtctctcacaacaacataattaaactggaaatcattaacagaaaaatatctgaaatattcacaaatatttggaaattaaataaaacacttccccaaatcaaagaaaaaaaacacaagaaaaattagaaattatttggaattaagtgacaatgaaaagagaacatatcaccgtttacaaggtagagctaaagcagtatttagaggaaaatgtataccattaaatatttatgttggaaaagaaggttcaaaataaatggcttaagtttttaccttaagaagtaaaaaaagagcaaattaaacctcaaataagtagaaattaggaaataataagagtaagaacataaataaaaaacagaaaaaagcaatagaaaatatcaattaagcaaaaaaactggttctataaaaagatcaataaaatggataaacttataactagactgatcaggaaaaagaggaaatacaaatcactaatatgaagaatgaaaagagacatatcattataaattttgatacattaaggataataaggaaataatagaaataaatagatgtcaataaatttgacaatttagatgagatggacaaagtccttgaaaaacacaattggccaaaactgactcaggatgaagtagattatctgaatagctctatatctactagttaaattgaaattctaataaaaaaccttgtaaagaaaatcccagtcctagatagtttcactaaagaattcatcaaacattttagaaagaaatgacattattccaatacaaagtcttttacaaaatagaagagatgggaacactttccaacttattttgtgtggccagtattaccttaatactaaaatcagaaaaattcattatgagacaaactatagaccaataataacctttatgaacatacacaaatattccttaacaaaatcttagtaaattgaattgagcagtatataactgattgatttagtatataactcatgactgtgtaggatttatcctaagtaatgcacaaaaggtttaacatttgaaaatcagattcctaaacctgacaaagagcacctgtgaaatacttccaagtggtattatatttaatagtaagagattgaggactttgtccctaagatcaggaacaagcaagaatgtctgtatcccttatttctgtttattgttgtactggaggtcctggtcagtgcaataaggaaagaagaaaaatgaaaacacatatagattggaaaggaagaaataaagctctctttatttacagaggacgtggtcatgtctatagcagatccttaggaatttacaagaaagattctagaactaaaagtgagtttagcaaagttacatgatacaaagtcacagtacaaaagtcaattttatttatctatagtagtaacaaatggagattaaacatttgaaaatatcatttggaatggcatcaaaaaacatgaaatacctattaatcagttaagaaaatatgtgttaagacctatatgctaaaaaactataaaatattgatgaaagaaattaaaggagacccgaagaaatgggcagatccatcttgttcagtatcagaagacttaatattgttaagattgtcaatttttcctatattaaactacatattcaattcaatcccaatcaaaatcccaactgcctgatttcaagactgaccataaagatatactaacgacaatggtgtagtattggcataaggacagacgtggacattttcagaatatagaacaaaatagagattctaaaaatagatcaccacatgtgtggtcaattggtttttttttttatagagatgtcaagaaactttaactgaagaaagggaatatttttaaaaaattatgatgaagtaattgtagtttatctggaaaaatgaatattgaccattgcctcacatcacacatgaaaagtaattctgtatggactatggaagctgaaaaatgctaaatcataaaacttgtaaaagaaaacaggagaaaatgtttttgacttttaattaagcagcgatttcttatatggggagaaaaaagtgtaaataatttaaaaatgatacatttgcatctcataaaaattaaaacttctgcttttttactaataccattaaataaataaaaagataaatgagatatggcagaaaacagtcaaaatactatgataaagtatgtatatatagaatataaaaaaactcttacaattcaatagtaagagcacgaaaggtaaagaaaaattagcaaaacatttgaacagacacttaccagagaagatacatgaataactaacatgaatatgaaaagatactctacatcattagtcatcagggaaatacaaacccacaataggataccagcacaagtccataaaaatgaccaaaattaaaaagactgacaataccaagtcctggtgagggcatagagcaagtagtataagaatttttgaaaaaaagagtggtggtttcttataaaaataaacatattcttatgttgtgacccctaaatttccacttatggatatttatcgaagagatatccacacaaacacttgaaatcttcgcagtggtttcacttaggatagcctaaaactggtaacaactcaaatgtccatcaactggccaatggacaaacaaatcataacataagtaaacaaatcactgtataactaaatgaatgcattttacatgcataaactgtatctcaatcaagttggtaaaaacatggagataatatctaccttaactctgttgaaaaggtggaatgaaaaaagtcggaaccattagcatgctttgaaacaaaatgtgtgtaatccgtgcacacttaccagaccccagagatgatgtggggcttaagagaaattaggtaaaacctaaagaataaaatcagaggcagaaaaagaagactttgaaattgaatctagatttccctagaagttttgaattttaaaaaaaaacccaaaaaacccaacctataaatatgtaacttgtggcaagtggccattttcataagccctgttgcacagcggtaggggcatcagagtctgagtgaaatggagctgtctgacccacacgaggttgtctgcgatgtccagtgacaaagaaatgccttgtcccttgaacatgtgataatgaaacacatatatgttaacaaataaagtgttagaacacaaagtacattttaatgacttttctcagtctcttagctggctgcattcttacatttccacattgagtttacgattcttggggagagtggaaaagggagcaatctcatgatagcttgagcttagaaccaatttgtacttgtagaactctctggtgagcattccagctctaacccatgtccagctgtacaccctctagccactgatcaagacagaatgtattatagttgttattaaatatttttttattaataacaaagtatttgaaatgaaatatatgaaataaaatattttcatttttaccagagattttagaaaatggtttgaaatgatgagtatattgtcatattgctggtgtgtgttgggctggttgccaaatgggaatatgattttgagtaaaaggtccaggtcattcttccattttctacggttttctttataactaaaaattgctttagtgatgaatactagtgaattttacccaacaactgagtatatagcatactgtggtgtgttagttagggtatgagttgggttgttgttgcaaaggcataacttgatggattagacaaggtataaattaatttctctctacttaattgtttgaaagcagagagttagtaagggctggtagagtgtctctacaatcacctatatgtggcttccatttctgtgtctaaagtggctgctcctggtctagctatcacttctgcatcccagtcaatgtgaaggagaaaagaggaatgccagtgcataccccttccttttgaagacatggcctagaggttgcacgtaatacttctattcatttcatgttggcaagaatttagctgcaggggcacactttgttgcaaaaggagtctggaaaaatgagtcctttattcaggtggcaatgtgcccaggtataattgagggctttattatgaaaagaagacaatggatattggaggacatctagccatgtctcacaattgtggaggctgtagtaacatgaaaggaggagaggaggacttagacaggagacctttattgattctacagccagaaagacttgaggacagcagggttttaggatttggtttaaatgtggtgtgccctctctattgctatggtagaggccgcagccatggaaaccaggtgtgacattgcctttgttgcttgggtgtgactaagaagatggccatagaaatggtaagaaaggattaaacctgaggaataactcgagtaggtgatgaataagacctggagacagatcaaagtgcagaggagaagggagtttcagggaagacttcaaggtctgtagtgtgtgaaagccaaagactgtaggttacgctgacccaaacaggaaacctgggagagaaaaccaattgttgggaaagacaatgaccttgataggcatagttttcagtggctcttgatcataattcaggtctgggacaaaaaaagaggttggtgcttggtccatccttgaatctctgggccaattctaagctctcttaatttctctttgatttttttttccaagtaaacacacttacaaacagcctggaaccggggagttttgagatgtgaagtagaatgagatttaaataatatgccccgtgactgggcatataaccttcatcactcttcatttcgttatttttagaaaataggcaaaataaattagcctactaaatattggcagaaaatgcatagtacctatgttgatacccaggttttgctcaaatcttatcaagttctgaaaccagacgtttgtaatgatcagagtgttcctcttagatatttatttagagacggggtatcactgtggtgcccaggctagagtgcagtggcacattcctagctcactgcagccttgagctcctgggcttaagtgatccttctgcctcagcctcctgaatagctgagactgcaggtacatggcaccatgcacagctatctcttagatatttctttgttattttactagaaacttccttggacttatctttgaggtcagttaaagcaatctacatatcaaaatgatttttttttctagtaatgtccaggtaacaatccccaaagagacttgtgttgcaaaaattatagataactcttctacattctttctaaatgctgaaagatgtataaaaattgcatctggttaaacaactagatattttttaaactactggatgaactcagtcaaatagtttgtaattggttagtaaagaaataatgagtagtttaacaaaataatgggtagtttgcctaaatataatctggatttacatatttcatctctaaatttgcttatttgtgcttaagactagaaattaagttttcagagacatggctgcccagggaaattctgtgtgggtatttgtggtgggaaggggataagtgacaatgcgtagggagatttcttcccttctctctgctactcaagaaatgttgcaacaatttggtctttgtggaggttcaccactttggatttgcttgacatttctgtccagtttctaaacaacacattttaaaatataagtgaacaagttcttgtcaccctgaagaggaaggtgcattgttgtctatgatgaagggctttcctttgctgtaaaagacagtatttgtttccttccttttaatcaacatttatttgaatggtcagtagagaagattcttaacaaagaactttggtaatcagttgattctatttgagtcaagagatcaattttttttttttttttggtctgaaaatgctggctaagaggattacaccttacaagtaggaaccagtggttcttctggttaaaaaaaaattatttacaatgtgggccaagataaaaatgctgctatataaaagcatacctctctttctaaattcagtggttgttccctgcttaatttctttttccctttcaaaatcgtcacaggtatcagacagtattttgagctaatggcctggaaaaattcattataaaatcattttgaattagtcagggaaaatgcagagcctaacaactattgccttctgaattcctacagttttgtccactgtggacatttctaaaatttggagtataaatgaaaaggctttgaacttgcttctgcttgccacagtggagatctgagccattgattttggatcagttggcttctcatctctgagggagggaaaagcaataataattgaacacatttcttttcaatagtagtagtttggctataaggatatttgaggtggtagtttaaaaatttttaatggtaacatgggtgcactaaagtatcatagtgggaatgcaggcaggcacagaatttagttcttagaagaatgtattttttggctctcattctatatcaggaaatgactacagtatattgctctgcaggtcttatacatttcagaagagtggtaccatatttagcttaaaacattagctttctttagagtgagtgtatatacatgtgtgtgtacctgtgagcagacagtaatgttaaaaataatccctgatctgagtgcatgttggccattcaatttctgaacattgggcagactttacaaataacgttggggagcattctgatctgttttaccaaatgaggaggaagtagcttacaaatggccatctacaagtcaccagcttatctatgacattgggttgggcctggcaagaactaacaaagggaagcccaactatttcatcagctgtataagaatgtgggcacattttattccaggctcctcacaacgaagatctgtagttgacagtacaagattggtgcacatggactaacatgttggggaggttgagaaaacgatgttcatagacaacctacctggattaggtattaggcacttattcttagatatataaataaatgcaactggactacgtttatgaaaacatgtgcctattcagaagcacctcgctctaagtgtcactctatcgatatatacacttgctgaaaggttcatgtttgcattcatggagaatcatgtggagtaaatgatgtgctagagctgtccccttttggctcatgggagcccattgttagattgtgagaaattttacaaggtggttgttaaacacaggcattatcaaaaattaaattatataaacttataattaaattatattaaaaacaaaggtaatgaatacctcaagctcattgcttcctaattaacttaccacattttactacaagatgattttgagtttaattgcaatgaccatgtttctatggtgaaggcactatatcatattgtctattgcacatctcttcccaactctatgttcggtgacatctacttggtaacttgaaatcaggtagatagagactcaggatacttcttttttttgtttttgaggcttttgatatattaaaaaaaatctcaagaatgccaaaattggtgaaaaattatggtatattttaaatatacatggtacaatgtattgtgattctgctattcacaagataattttaaattttagaaaaaaatgttaattcatagtatatgaaaagatgtgtcctagactttaaccagagacaaaggttaagctgtttacttttaatggtcttggtttctgtctgtgaggtgtcatctcatttagagatgaaaacaaaggtctaaaatggaggccctttgtgaattcaagcctggggcccttggtatttccaggcactgccgtaagtggccttgcctcataatgtctgatttttcatctgtaaagtgactataatgataataatattcactgtatagttgcaatgagtactcaggaagatcacataaggacattatgacaggtcaggtcatttataaatggcagctatttgaaattatcatcatcatcatcattgctttattgagtacttattgtgtgttgagccctgttctaagaactttacaaacattagctcatttaaaccttaaacagctccctaagctaggaagagtataagctccatttacagatgaggacacacaagtagcagtttagtcacttgcccaaagtcatacagctagcctgtggtgagttgaaattggaacccaggtctgactccacagtccatgctctatatgtcaatactttctacttattgttttagtatcccttgcagggcatacagtagatgtttaataaaaacctttttggtaacactgtttatggtgctttttttctaagatgttcagcctcacttcttagctccaggtcaccagaaaattccatttctgttgtgagagggttcaaagagaataactgcttacgcagatgtaaagccagcacttgataggagaatcttgagtattttgcaatatgtttactaaatgaaatgtaagataattaacatacacatttatgattttctttctgaggacattttattttctggtcttcatttgctatgctattaagagaagttttgtttcagtggtttgttatctgcttttatgaacttctcccaacgagactctgtaatccagcacatggacactgtttcccctaataggatttacctttatgaatatctgaaaatccttccagaagattaaattgtttagctcaatatttaatctgttacttcctttctaaagacaccccatggacgttgccatgcatttggctgatatgagaggtattgatcagtcataaacaaacacaaaaaaattgagaatgaccagtgcaacatctcctagctccaccttataattcaattttgatttgagctgcttttgattaatcttcttatttgtgagtgtgtgaattcaagaggcttgctaagtttctaaagttgctgggcattggtctctggcggatggctcagctaaagaacagtatgattgcgtttttatggttttcagatatttaatagcttcttcctgtcattttctgaatgactgaatacagttcagccctctgggagcagtgcagcatccgagagcgggaagatgactgaggtctgtgtacttgactgattgccttagtcttaattgttctcttaattagctgcagtagcaacggcatctggggagagatcacggtattggtaaacagctccaccttggagctcagggtaatgccttttggaatcctgacagtgagcagctcatgcgctctctcctcagagatggggacctgccaaatcaccagcccccaaggccgatgagccccctcttgcgatctgtcactctggcccctgagaagcaggtctccaactgtttgtccttaaacaaatactgttttaatatgcaaaaagtaggctttattgggctggatggatgaacataaaacaaaaggaaggggataggattcaccaagcagggcgtccagctagaaggcaggcttggcaggaggaggcccaggagcagggctgcagcctgggaggggtggctcctcccaagccattcttgtgtttcccatgaagacatcacgaatgggctcagcttagcttgtctctgaggtgtggcttggcctctgaaacctggcttgcctattcttactacctatttgggatttctcctcctttgtatttctccaccgaggtgtggcacggagacatgaaacttcatccctaactgccagaaaaggaaaaaggagaaagttcacctagtctgggggatttggaacccaaagagtggaaaaactcaacttttttttgtgtatatgtaagtgacagcgcgttattgtcaggctgacccaaccagcatattttagagcttgtagaacccgttcaggctcacattcatgtacagaatagaaaggaaaacaggtgcttaggtggcaaattacaaggtcagtacttaataaatgtttcaaaaagctatgcaaagcagtaacaaattggcatggagaagcaaaatgatctcaaaaatgacatgaatcagttgtcaatatttgcaagaaaataaggagatctattggagtaggactcaaggacatgggaggaacctgtgaggtctcaggcaaatcatttaccttttctatgtagaattcccttttgatataaacagataggccctacgtgctccacacacttaccacacagatcaaatatgatcagaatgagcttgctttgaaaggaaaaggcattattgaaaacaggctttagataattgtggttatattttatagtggttatatttatatgtggttataattgtaacactttcatgatcataggtgtattttcattgccttgaaaataaagatgcagctcagacatggtggcatttcacatacatgtgtacatagttgtatggttggccatctccttttccatctctcgtccaggaaataaccttcttcgtaatttaaccagcctgtttttccctacagggcaaaacctaagaaaagaacaactgcagtgttctgagagttgcctctgaacccgagctagtagaatgttcacagaaaagcaatgtctgggaatttgaatgagttaaactatgagatcatgttttgaaggcatgtgtcatactattttcaggacagtgctgaaaaccaaagtgccagctacttgtggctattaaaatggcaaggctgcctcttgtcaaaaatgtattcagtaagttaaccctgatattatgctaatattggaacaactgcattctagttatcaaaaatactccctccccagaatctcagctatatgatatgttttacctttgccttgctatggtgagctgcatttcgtgacagcagagtgctaattatgttagctaccttttatacatatatatgatatctatattatatatcatatatttatacataagatatcttatatgtatgcatatataatatataacacattatataatatataatgtgtgtgtgtgtgtatgtgtgtcacagacagcaaaatctttcttttgctgggcacggtggctcatgcctgtaatcccagcactttggggggccgaggcgggcggatcacctgaggtcaggagttcgagaccagcctgaccaacatggagaaacccagtctctacgagaaatacaaaattagctgggcgtggtgacacatgcctgtaatcccagctacttgggaggctgaggcaggagaatcgcttaaacccgggaggcggaggttgcggtgagccaagatcaagccattgcactccagcctgggcaacaacagcaaaactctatctcaaaaaaaaaaaaaaaatctttcttttatgctttccttggaccaaggggaaagtcacatattttggcaataggaacatttgattaataggcacttgatcattattgatatgaataaaacaccaatactaatgaagtccataagaagcacctgtacaattgtcattaaggtttttcctaacagaggcattgtgcaataccttctcatcaaaaattgctattatagctctgtgtttagcatgtgcctgaatatcagtcctagggtgcatttatttcctaccatcaacacagtgtcctgtctccaatgtgctacagaggggtgtagtttggctgtcttggtttccattcccaatacttcttcccattgttcttctctactctagaggctacagaggtaaattttcatctttttttgccaataatgaatggccatccatttgccacagttctagcaggggaaggaaagaaccccgggcccaagaaagcagcaagggagggcaaacaaaacagtagcaggaaccacctaactgcactccttgttatatgaaataataaattgacatttgtggaagtcagcttagttggttttttgttatctatagctgcagcatttctaatggaggaaagaggctctatgaatctgaagaatctatgaagcactaaatgttaaataagtggcctcaatagaaatcctgatttaatacaaactcctttctcatctagagaagccttgttattgatgatgaagggcttggcaaactgtggcccctaggccaatccagccttctgcctgtttttgtaaataaagttttattggcacgcagccatgctcatttgttgacatgtagctacttgtgccctacaatagcagagttgagtagttgggacagaagttgtgagacaccctatgacctatctaaatgacctgtctaaatgacctgtccaaagacatttgaactttgtgcttagtgagagcagttccttctggcctttaataaatagcaaagctcttcagtaaaaccttttaaggcatacctttgttgcagcgaggaagctctggcaggatgtgcataaaaattagacttttggttttcaccagagacaaggatgcaacctgtctggagggcttgtgggtgtgggtgtgggtatgggaatgtacagcgtcagagccaggagctggcgggcctgtcctcagccagccttctctccaatatcagattcctacaaagtggattctaatcggatgcttgtgtctcattctcctttaagcagataccagctatactcacttggaaaaatatatcccagtgttagaaaaatctgttccaaaaacatccagtctttcacagccctacagggctgcttctgtttgtgtgttatcagagtacttggttgcctacccttgagggcatttttttttttttttggcgtttaatgaagaaagggagaaaatctctcaaaacaactgacaactccaaaaattacgtattcatgaaaactgatgaaaataaagtcagcatagttcttaccagtcttcgcattctatcacctttctccacttcaggccttagttcatcatctatcgttagtgaaatactcattctcattttatttgtatttcagtgcaggcagtaaccaatgcattactctgtctccacttccccaaatatgcatttatgtttttgttttggtaagagaaacaaaaagggccaaagttgtcataggttttgatataagtctacaccttattttgcttttttctatctcttatcttatagacggggaggtagaaatccagtaaaagtaaaagagcagactaggagagaagacagcaatagcaatacaaagatgaatttgatccaggtagtgttgggagttaatcaatttagagtttcagtctattcatggttttggtttttgctttagagaaaaataaaaatcctaagctcccacagaacatctggaaaatgaaacttctgcctgtcataataaaactagctggagatgtaagcaagcctccacactctggaaaatacttagccaagtgagaccttgagtcattcccggcctctgaaatgaaaaggatcagattatgtgaatgttaccctgaagcttggaatataaatttggtggaacatcagtctcctaaattcaggaatctggattcaagttccatgtgcgattctatgacatccattgacatgttaatatactgatcctgaaaaccgatgccctgcgagatgaactagatactgaatttgcaacatgcctcctatagaggaagagattatttttatgatgtgcctaagacattaccagaaactcaagtctgtgatggaggcagtgagattggagggccctgtgaaagggcacaaagagaaggagctatggaatctactgggcaggtatggatactgcaagtgagctgagttctctgcctgaaaagaggtgcttttccaatcagaagtggagatattctgtcttggtggagcatttatactgcatcatacccctgaccccaacatatgcctgcctctccaagggctagaggcagcggcccaagcaatcatcgcttacaaatgagaaaagagagactcagagagggcaagagagcagtgagggacaccagaacgaggacttgaaccttagtcttctgagggcaatccttcctctctttctgctatgtaaactgcctctgatgagggagaaatgaaccactggtgtaacctcccggaccttaacctacaaagaaaccagataggcttacaggcaaacaccagttgaagttcacaaatagtttattaggttaaccttgaccctccagtttacaagtttgtgaagcttggaacaggaagggtaggtgagagctcaggatgtttagatcaaagcattgcaattccttggctctgccacagaatgtcacctttacatcatgtacttctcggcatgtcagcatttcctaggagcagaaaaagaagagttttcttaaaggagctagtttcaaaacagaattatctcaactggtgcttgaataaagcacttctcaagctatagaaatcgttggcattgaaaaaatcccctttcttctcttctgccattttccccctggtttattatttgcagtgtttaaaggatttgtatgccaacttttctctattccttctttagtacaaggttttataaattacacctttctcctttaaaaagatctgaacctttgtatttaaattgtatttaacctacagcctaaacgattcaagtttagagactcttaagtacttaattctaaggatcctatttcatagaaggctctttcagaaaagaaagtataaacatcagctatgtgaagggtttaggtgaaatgaatttccacagactgaaaatggaagacttacattgtggggaagagatggtttgtgaggagaagccagctggaactggagagtaagagagcatgaaaaggataggacaggagggcccctgatgggaaggatagggcaaatataccggttcaccgcagggacagagggaaccgtcaatcacccagccattcaaaccccaagggtttttgaggtttgacataaacaaacactcctttagtcaccatctttctggcaacgtgattgtgctgccttttgaaggaggactcaaagagtcatcaagtcatgaggttttattgacctcagaggcactgggaggggctgctggaggcatcttgggcctttggctgcctggataaggtggcctagtctttgctccttttcttctatttttatttcactctgcggtgttggttaggaggacacagaacctagaggcaatgtttggaagtgcagagtatggtgcaggagtcatttcctgacaaacactcaagtttgtcatttctccattcttcctatttgaagcacacctcacccaactgctgctcagattaagaagatcccgcagcatccccatggcctttcattgctcctggaattcttgctccttttgggtgtgctttgttcgtttcataattggactcttaattcagcaatagctctggccaatagctattaattatcactttgcttggtcttcccatggcaattattaattaaacttcctagagagtcataaagactctctaggaaattaaagactgtaataatattttaggaagcagtgtcccatgatgttggaggtctacattctgttccaaaggcagagcagagtttgtttgtttaattcacaaacatttactgagtcccctctaggtagaaggccccattccaggttccaggcatacactgcagatggctcctactctagggaggaactgaaggtcatggtgtggagtgttttttgatccaactcttaattcctattgattctcctttctcaacttatgccattccattgagaatcaggtccaactttcccttctacttttattacccactgttccctcccacaaccttaaggagcactcaggttaattgctccttttctgagttcctatggtaactttgtataaacctctattatagaactaatatttttatcatcattaaaaaaacctcagttgcttctcccactctcagtaaattttgccagggtgaaaattgcgtcctcttcagctgtgtactggatatcacctagcctagggcttagctgttggtgtttagtaaatattgaagttttgcaatttcaacttaagatcagcctcagagtgcgggctcagttctaagaaaaactttagagtgggagcggggagaacaaagagcaaagtgggcaaggccacggagctggccttccatggaggtcaaggttctgctcaatccagccccttaagtagcgctggcccaccccactgcacgctacaaggagcacaaccatttctgctcaatccacatggtgtttccagcttcaacttagactctgcccctttctgtgctccttgatctcatcttctctagatacttctaatcccttagcttcaagctccagcttcaaggctttctttctctctaaattgcttgggcatgattttctggctctgacccatagcactcccccttggacctgatgtggcactttaccctctgctctggcatctcagggccaaggtcttgcctgtcacaaagcccctactgactcataccccagagtagctggctgaccctgtgataggattttagggaaaagccacaatgagccaatcagtactccatgtccaaatttcctcccttaacatatagctttcacaatagctcccagaaatattttctgcttttattcaaaatgcaaaggcccatggatggagtcatttaagtctctagcatgtatagtatgtgcaaaagaattggaaagaaatttttttgggaggaagatagatcttgtggctggtgggattcagttttggagaaaggctctactgcagtgcagataaaagctggaaagacgagtgccacccatactgcagaaggggtagactctggggggtatctgttgtttttgccacccaatatccattcacctttcttctggtaaaggtaatctgattcttctctttggaaccactgttccaacaacttcagcctataaagtttgagtggtgttgagtcaaccactgactttggaagggcacatatgagtcaggttggccagtaatacatcctatccctggccactgagatggttcagggagcgtcaagcctaagactttcattcaaacttacaaggaaaataactgtcccttttctcctgtgcttgcagttgtgagagtttcagcctggagaggaccaccctgctggaagggtgtcctgggaatgaagtccacgtaggtgagaacacacaccagggatatgtagctggatggactcagcagcccttggggaataaagccaggtgtgctttctatatttctactaagatcattttttctatttttttttctactccagtttcagttgctattttttctgtcattttgcaaccaaagctgccctgactaacatagcactaggggaagcatctctgggtttgatcgaggtcagaaggcgtgagcttaaaccacacctgtgtcactcaccagccgtgtacttagcttcccagagtcttggtttccttatctgtagaactcagtgaatagtgtctatactgcagtgttttagtcaacattcttggtagtaagcagctgaaatgactctggttaacttaagcagaaaagtgcttcattggaggcgtatcaggtaattcacagaactgaggagaaggctggaaccaggcttgcaaaatgggcagagaccaagaggagctgagcagccagaacctcagctaaaatgcagctaggacctgcattttacctctccatgcacccccaaagatacacatggctcataggtcattcctcttggtgttacttgctccttattcaaagcttgcctggggctgcatatcctgttggtcagaaggtagagagttccttttttgttgttgttgaagcagagtctcactctgttgcccaggttggaatacctggtgcaatcatggctcactgtagcctgtgcttcctgggcataagcaatcctcccacctcagcctcccaagtagctggaattagaggtgcataccaccatgcctggataatttttgtagagatggggtttcactgtgttgcccaggctggtcttaaacccctggactcaagcgacctgccagccttggcctcctaaagtgttgggattacaggacaggagagagccactgtgcccagccaagtttctttacaaggcttgggtattgagcaacctggcataatgacaaaagttcatgacaaatagctgctacgagaattataggaagtcacggctgtaaaagcctgccgtactgttttatcaaggctagttcctctttcctttcctcacatttctgatcagggctgaccctactgatctttgtcttcagagaaccaactctgccaaagccccagatctaacaggccacatgaggctggacagaatttttcctcctctgtacaccaagacatttaatgacttttcttcttgttggatatgtcttcattctgttaagttttcccaactttcctttgctgtttgtagtgacaactactcctttagtctgttagattcttgagggcatagttagcatctattgcatcaatttcctaaaactgcttaggttatattctaacacatgctggctgctttttggatcaatgtttatttactgattggtccaaaattaggactggctgtttgaccatttcaggaagaccgtggatgggttgtatttcttatgccaatacctgtgcctggcatatataagtatccaatatgtatttgttgaatgaatgggtggatggtatatagtaggtggcctctagtaccatgctacaaaaatattgaatatagctgcagcaacattgctccaagactgctgctcgttcctgtaagtgtgtccttgtgctatgacacttgataactatctcactcattgccaccagatcaatgtaaatgatattagtgacggcttactgagcactgcctaatctcatgtaaaaggcagaggtgtgcactggggaattgaatgcctcattatatggtggacagaagggctgggaagccattccaacaataggcatctaggaagacctattatgtactgggtgctgatacacaaagttgacagaaatgtagcctgtgcctttgaggaactcagaggctagtgggctcacgaagtctggcttcttagatgctcagaaatgagtccttagcaaagactgtatccttgggaagcataaataaaaggtggaaagattgccgtatgttggtgtaggttttaagttccagggaattctcttggagaaaagatttctaaacatttcttttctataattcaggcttactcaatatagtcgtccttgtttcctgacatctccgatatctctcaagatagcttattatcaaagttccaggacttaatctttttttttattttttattttttattttattattattatactttaagctttagggtacatgtgcacaatgtgcaggttagttacacatgtatacatgtgccatgctggtgtgctgcacccattaactcatcatttagcattaggtatatctcctaaagctatccctcccccctccccccaccccacaacagtccccagagtgtgatgttccccttcctgtgtctatgtgttctcattgttcaattcccacctatgagtgagaatatgtggtgtttggttttttgttcttgctatagtttactgacaatgatgatttccaatttcatccatgtccctacaaaggacatgaactcatcattttttatggctgcatagtattccatggtgtatatgtgccacattttcttaatccagtctatcattgatggacatttgggttggttccaagtctttgctattgtgaatagtgccgcaataaacatacatgtgcatgtgtctttatagcagcatgatttatagtcctttgggtatatacccagtaatgggatggctgggtcaaatggtatttccagttccagatccctgaggaatcaccacaccgacttccacaagggttgaactagtttacagtcccaacaacagtgtaaaagtgttcctatttctccatatcctctccagcacctgttgtttcctgactttttaatgattgccattctaactggtgtgagatggtatctcattgtggttttgatttgcatttctctgatggccagtgatggtgagcattttttctgtgttttttggctgcataaatgtcttcttttgagaagtgtctgttcatgtcctttgcccactttttgatggggttgtttgtttttttcttgtaaatttgtttgagttcattgtagattctggatattagccctttgtcagatgagtagattgcaaaaattttctcccattttgtaggttgcctgttcactctgatggtagtttcttttgctgtgcagaagctctttagtttaattagatcccatttgtcaattttgtcttttgttgccattgcttttggtgttttagacatgaagtccttgcccatgcctatgtcctgaatggtgatgcctaggttttcttctagggtttttatggttttaggtctaacatgtaagtctttaatccatcttgaattaatttttgtataaggtgtaaggaagggatccagtttcagctttctacatatggctatccagttttcccagcaccatgtattaaacagggaatcctttccccattgcttgtttttctcaggtttgtccaagatcagatagttgtagacatgtggcattatttctgagggctctgttctgttccattggtctatatctctgttttggtaccagtaccatgctgttttgggttactgtagtctcgtagtatagtttgaagtcaggtagcatgatgcctccagctttgttcttttggcttaggattggcaatgcacgctcttttttggttgcatatgaactttaaagtagttttttccaattctgtgaagaaagtcattggtagcttgatggggatggcattgaatctataaattgctttgggcagtatggccattttcatgatattgattcttcctacccatgagcatggaatgttgttccatttgttcatatcctcttttatttcattgagcagtggtttgtagttttccttgaagaggtccttcacgtcccttgaaagttggattcctaggtattttattctctttgaagcaattgtgaatgagagttcactcatgatttggctctctgtttgtctgttattggtgtgtaagaatgcttgtgatttttgtacattgattttgtatcctgagactttgctgaagttgcttatcagcttaaggagattttgggctgagacaatggggttttctagatatacaatcatgtcatctgcaaacagggacaaattgacctcctcttgtcctaattgaataccctttatttccttctcctgcctaattgccctggccagaacttccaacacgatgtcgaataggagtggtgagagagggcatccctgtcttgtgccaattttcaaagggaatgcttccagtttttgcccattcagtatgatattggctgtgggtttgtcatagatagctcttattattttgagatacgtcccatcaatacctcatttattcagagtttttagcatgaagggttgttgaattttgtcaaaggccttttctgtatctattgagataatcatgtggtttttgtctttggttctgtttatatgctggcttacatttattgatttgtgtatattgaaccagcgttgcatcccagggatgaagcccacttgatcatggtggataagctttttgatgtgctgctggattcggtttgccagtattttattgaggatttttgcatcaatgttcatcaaggatattggtctaaaattctcttttttggttgtgtctctggcaggctttggtatcaggatgatgctggcctcataaaatgagttagggaggattccctctttttctattgattggaatagtttcagaaggaatggtaccacttcctccttgtacctcgggtagaattcggctgtgaatccatctgatcctggactctttttggttggtaagctattgattattgccacaatttcagagcctgttattggtctatttagagagtcaacttcttcctggtttagtcttgggagggtgtaagtgtcgaggaatttatccatttcttctagattttctagtttatttgcgtagcggtgtttgtagtattgtctgatggtagtttgtatttctgtgggatcggtggtgatatcccctttatcattttttattgtgtctatttgattcttctctcttttcttctttattagtcttgctagcggtctatcaattttgttgatcctttcaaaaaaccagctcctggattcattaattttttgaagggttttttgtgtctctatttccttcagttctgctctgattttagttatttcttgccttctgctagcttttgaatgtgtttgctcttgcttttctagttcttctaattgtgatgttagggtgtcaattttggatctttcctgctttctcttgtgggcatttagtgctataaatttccctctacacattgctttgaatatgtcccagagattctggtgtgttgtgtctttgttctcattggtttcaaagaacatctttatttctgccttcttttcgttatgtacccagtagtcattcaggagcaggttgttcagtttccacgtagttgagtggttttgagtgtgtttcttaatcctgagttctagtttgattgcctgtggtctgagagacagtttgttataatttctgttcttttacatttgctgaggagagctttacttccaagtatgtggtcaattttggaataggggtggtgtggtgctgaaaagaatgtatattctgttgatttggggtggagagttctgtagatgtctattatgtctgcttggtgcagagctgagttcaattcctgggtatccttgttaactttctgtctcgttgatctgtctaatgttgacagtggggtgttaaagtctcccattattaatgtgtgggagtctaagtctctttgtcggtcactcaggacttgttttatgaatctgggtgctcctgtattgggtgcatatgtatttaggatagttagttcttcttgttgaattgatccctttaccattatgtaatggccttctttgtctcttttgatctttgttggtttaaagtctgttttatcagagactaggattgcaacccctgcctttttttgttttccatttgcttggtagatcttcctccatccttttactttgagcctttgtgtgtctctgcatgtgagatgggtttcctgaatacagcacactgatgggtcttgactctttatccaatttgcccatctgtgccttttaattggagcatttagtccatttacatttaaagttaatattgttatgtgtgaatttgatcctgtcattatgatgttaggtggttattttgctcattagttaatgcagtttcttcctagcctcgatggtctttacaatttggcatgattttgcagcggctggtactggttgttcctttccatgtttagtgcttccttcaggagctcttttagggcaggcctggtggtgacaaaatctctcagcatttgcttgtctataaagtattttatttctccttcacttatgaagcttagtttggctggatatgaaattctgggttgagaattcttttctttaagaatgttgagtattggcccccactttcttctggcttgtagagtttctgccaagagatccactgttagtctgatgggcttccttttgtgggtaacctgacctttccatctggctgaccttagcattttttccttcatttcaacttcggtgaatctagcaattatgtgtcttggtgttgctcttctcaaggagtatctttgtggcgttctctgtatttcctgaatctgaatgttggcctgccttgctagattggggaagttctcctggataatatcctgcagagtgttttccaacttggttccattctccccgtcactttcaggtacaccaatcagacgtagatttggtctttttacatagtccgtatttcttggagggtttgttcatttctttttattcttttttttgtaaacttcactgctcgcttcatttcattcatttcgtcttccatcactgattccctttcttgcagttgatcgcatcggctcctgaggcttctacattcttcacgtagttctcgagccttggctttcagctccatcagctcctttaagcacttctctgtattggttattctagttatacattcgtctaaatttttttcaaagttttcaacttctttggctttggtttgaatttcctcctgtagcttggagtagtttgatcgtctgaagccttctcctgtcaactggtcaaagtcgttctccgtccagctttgttccattgctggtgaggagctgcgttgctttggagggggagaggcactctgctttttagagtttccagtttttctgctctgttttttccccatctttgtggttttatctacttttggtctttgatgatggtgatgtacagatgggtttttggtgtggatgtcctttctgtttgttagttttccttctaacagacaggatccccagctgcaggtctgttggagtttgctagaggtccactccagaccctgtttgcctgggtaccagcagcggtaactgcagaacagtggattttcgtgaaccgcgaatgctgctgtctgatcgttcctctggaagttttgtctcagaggagtacctggctgtgtgaggtgtcagtctgtccatactggggggtgcctcccagttaggctgctcaggggtcaggggtcagggacccacttgaggagtcagtctgcccattctcagatctccagctgcgtgctgggagaaccactgctctcttcaaagctgtcagacagggtcatttaagtctgcagaggttactgctgtctttttgtttgtctgtggcctgcccccagaggtggagcctacagaggcaggcaggcctctttgagctgtggtgggctccacccagttcgagcttcctggctgctgtgtttacctaagcaagactgggcaatggcgggcgcccctcccccagcctggctgccgccttgcagtttgatctcagactgctgtgctagcaatcagcgagactccttgggcgtaggaccctccgagccatgtgtgggatataatctcctggtgcgccgttttttaagcccatgggaaaagtgcagtattggggtgagagtgacccgattttccaggtgctgtctgtcacccctttctttgactaggaaagggaactccctgaccccttgcacttcccgagtgaggcaatgccttgccctgcttcggctcgtgcatggtgcgctgcacccactgtcctgtgcccactgtctggcactacctagtgagatgaacctggtacctcagatggaaatgcagaaatcacccatcttctgtgtcgctcacgctgggagctgtagactggagctgttcctattcggccatcttggctccagccccaggacttaattttgcccaagtctttttgctactacaaaatgataattctttgtatgcatatgtgtgtatctgtatatgtgtatgtgcatgcacgtgcatccatgcatgtgtgtatgtgtatatgcatgtgtgcatacatacatacacatgcatgcatgtgtatatgcatgtgtgtgtgtgcttgcccatgttcatgtgtggaaatgatgagtacaatgacagaagggtagaaaccagagctagatggaagacagagtaggaatgatgtgtaacttagctctttctttctttactcatcatcagtgaccctgttaatgttttgtctgtttaatgaattggtattagttaattacttgggccattaaaagttcaagaacctccagttctttttattccctgagttcctagagcctggaggtggcacagccaggcagacaggggtgaaaggagatttgttcccaactggcttcccctctgcagtctctggcctgcctttaatgataaacatttagagcctcctttgagggctgcccattcattaaaggagttaacgcagtttcctctatggtgactttgggaggaaattaattctcccccagtgcctagttcagtgccccaggcttagaagatgctcaataacacattgctcatcactgctgctcatctgccctgtgcaagaactttggaagctggccttctgctcggtgaatttgccattctcagtgtttctcccaaatgctctcagttgttccacaatcccacaacggtcatatggtccgtgcaccaggcatgtaatttgctaatctcatgattagacatgcacacaaacctcagtgctattctaatgaactctgcagttggcctttggattgtttctccctaaacaaatctctaggcacatgtgaatggaattagtcttctgatcactctgacctcctgcacactgttgttgaatacttttagtctgtagtacttcctgggttgtgggcagcccaggtttctgtgatcagaggcacataccttggttctgggtgctgtctttgggtcgacaatccccaggcgagaggggcctcacacttagtcttgatgtgctttggatgtagaagttttgggaagatttctgggttatttctttctctgattttattcttttgttgtcttggcaactagaataatagtcttaagtgtctgtgtttgtatattctttggagaatattttatcacaaatcttttccaagaatgcctatctcatgatgcattgattattcctcaatgtcttccttttttttttttttctgtatatgcttgttttccacagttgggagaaagaaatgtttgtacgacgtaaacagcctctaggttgaggattaggagtgctcagttagtactttacctctctggccttcagttttccagattaaatggaccaaatgatttctttaagccctgaactgccacgaccctaagccagaattaggtaagaatgtgccattacttgctgacatccttgcaagaatcttctgcattatgcatgggaattttccaattcttcactcttcattgactagaattttttttttttttggttgaaatatgttacttcatttacctcagtcctcggtattttgcagaaggggtaaatgctgccatgtaaacacatgatactggcagaaggctggtgctgcttcaagccagtgttttactgtggttggagtaaatgtcatggaggtttcttcctcttttctttaacagatctcttgtgcttttccccttccttctacagttggtaccccttatcccctctttgtcatttatcaacttgagggcttcagggaaaaacttcagacatccacgaggaagtgaatcctcaaagaggactgccctggaggctcttgggagggtggagcatccaaatggattggcttggaatccctgacactcaactacagatgcttccttcaatgttgactttggagccaattgagtctgcttgtgtgtgacaattggggagggatctttggtgcctgtggcaggatggcttctccttggccataccaggtacacatttcaaagccagaactggaaatatcagcttcactcaggataaattttccttacatctttggtcagtaaaagcaatatacattgcaataaaggaaggcagcgtttttcctttattgtagcatttaggtagaaaagagaaatatgaaatgataatagtgcatgatatgactttaaatgataacttcatgtttatcttttaaaatgtaataatatcactggtaatgacataccacttgttaaaatgtggaaacacttctctactgggtggtaaggagctgctgcctcacatttcctgtgtggtcatgctaccacagcctctctggtcattacctctgggcccccaggatgtcctgatcatcctggcataacaggtggcctcctgcaaggctgctacagctccaagactgctgtttgttcctgtagatgggtgctctgactgtgccacttgttaactacagtgcgccttaccactagatcaatgcaaatgaaaataatagtgatgggctcccactctgtgtgtaggaccattctgtaaactctggagggaagtggccctgtttccattcttagggccagacacacacgagcacttgataaacattttctcagcagtcaatgatctcatgcgattccatcagtgacattataaggcaggtgttttaaatccagttttgtaattgctaagaagatgtcctaaagaattcaaataacatgacctgagtccagctgagaggggaaggagtggatagttcaacccaggagtgtcatggcaggttaaaagacttcactcttctagggtgcttgagatgttctgaaacctcacaggtacctgctaacttgaatggtctgtgattcccgattttgaaggtaacttggttttaggttccccgagaaagatgggtgggaggaagggtactgtgtatgtgaaatggagcaggagggatgggctgtggatccaggaaaaggggctctaagatcatcctgagagattacaacacacctgcccccaactattggaccctataaaccaaaaagtccttccctataggaagaggagaaaaaaaagacaaaattatgtgagaggaaactatacatcaaccatcataccaccatacctgctcccccattagccctctgaatatagagaacggagcgtcaattttccagaggtactaatggtttctaattaaggcagagacatagaactaagtgtttagaggccttttgctgtgttaaataaggccagagcaattggaggaagctgctcagaatagggagactgggtgtttgaaagccaagcctctcaagcttctgagtttgtgtagagccccttggtagcttaccctggcttccttgtatcatcagaattgcatagagacagagaacacaagccttgggctatgttttagtaattacagttaataaaattcattaagagattataaattaatgtctaacagtctcattttaacacttgtgtgttgataggcatagatattagaaaaactgttaacccataataatagccatcacttatttaactcctatactgtcctgggctttagatattttggtctcgttaatcttcacaacacctttatgagatagttattttgactgtggtagtttgaatctcagttcttcactccctctatggatttacaaaggcttcatgggggcagagtgcactttctcccaacttggcttgagatttggttatgttactgctttgtccaattggatcttcagagatgtgacttgcctttagatatgtttgcacagcctggcttgcccctctgtgctcctgtggcttgccatgagaagagcatccctgtgttgctgctggtccaagaagatcaacccacagcctggagctcagccctgctgactccagtcaatcccagtggaccttcaactactggcaaatctgtgagcgagagaataactgctttttaagggactgagatttttgagattatttgttgtgcagcaaaaaaggacaaacacataatcctaatctccaagtgcagacgctgaggttcaaagaggttacatagtttggccagaatcactgaaatatcacagcacaggctggattcaaaccatgggtcatctcatttcaaagctacattattgtttggggaaaagtgtcctatattggagcaagcataaggttaaatatgatgagtatattaaaagtgcctctccaagccttacacctagtggaggggagggacagggcattagagaatggttgccagagaatcacctctccttccaggatggggccgtttaatgtaggagtgagagcttgctggaaatattccaggatgtggtggcacatagcaaccctaaacaccacccagtgttacctgcttcccagcgccattaataatgatgcccctcctgggccataacaggctgagcttcagcaaatccctttcctgaatgtttaatataccggaggcttatttagattctacatggggagcctcatttttcttttattaattgtaatgagagttatttttgttgccttaagtataaaacatccctctggggagttctgggcccattatagacatgaagaacccaatcatcttctgtccttataacaagcctaggagggaggcaagacaggagccacttaatcggaattgtaataggagaggaaacccgaaggttttacagtggaaaactctaagagaaacaaattaagaagctaaaacttggctgctgttgtcaaatcagccccacagggaagagcccaggacacacagaggagaaaagaggaagaggaaaaggaactaagatgagacaaaatagtggagggaaggagagccagaaggacaaaggcaggttgtgagatctggagacaagctctgctgggtgggcagttattttcatggcttgccagcaagctgccccattcagttgatgccacatatgtatatctttagagttgtagacgcatccctgggactgaccccaattcaaagggatgatgaaagctgaagaaacttccctgttgaggagcagccagccttgcatttgtatcctcataccaagggcaaatttactttggaaacttcttccccagctactttcctaatcaaacacttttacctaaagcattctaaattaactgctttcagcctgaatgcaataattctgtatttcctgatttaatcttggcttacattccctctatggctatcctctcccaaggacacaccaggcaaaaatcttcaagaataaagattgaataaagggttttgctgtctatatgctaggtgaagtttcctaagaccttcttccacactcctgccggcagttctggggccattttacagcctctttcctctttagtagaaagcattcatgaaccattgattcatgaaatcaatccaataatgggcttgttcacaggtttgggacaaagcaagggtagttgggaagaaatttttggtagacaagaatgctgaacttgctaccaagggtcctagcatggcaatgtgggaaatatcccccacgtgtgaaaaccctttccattattaacctgcacaggatattgaagtggagcctacatgattgtatagtgaatctcaaatagtggcttttaatttttccagaaagtatcaacctgctcaaactacctacctcttgctgcagcctgtcttacttcctgaagctttggtcataaatccacagtggcagctatcttctgagttttcttcagatcttctcagcatcctctgatttgtataggttggggctgtgaaataaaatgccataatttaaactggcctgagaagcaatttgaagagttggttcttggcttagaggctctgggtgtgggtggatgtctctgtaagagagctgactgaggggtcatccctggagagcagggatatctaccttggtgacagagctgttgatgttaagagaccttcagacattaggctggtctaagcaagtttgaaaataagtctttcgctctctcacagccactttctgtgctcctttatgattccttgatcccgttttcctcatgccctgagcattcaggttgcctcctggttacactatgtgtccatttgacctatttccccttaaaggcctcacatcgagaatggcttgactcctcgctcctccattcttccattgaaaccctgtcaattattttaattaattgtctgcaagggaggctcctagctcccccagccacactttgattccacctccaaagaggaagaatttaactatgcatggatggtcaggcttgaaggcattcattgggtctcattttctaagagatagagtcttatctagaatggggtaaataagcccattttgtggcaaccactcccttagtctttccggatacaattccttccaaggacctagaggaacaaggcagaggctgtgtggagacttggctgtgcttgactatgcatagagagtcctggcctggtagaatctgtctgcctatttctgtctctccccatgtattgcctactctttctttataagctttgccctttaggaggccagaggtaagaagtaccctttttccatgatgaaagaggtagtcctcttcccacttcctttaaaaagctaagtgaaagctaaagtaacgttcaagggaaagcaagcacttcaaccttcccagtctagcaaaggggagttctgacaggcagcagagctaactagggttagagatctaccttatggtttggggccaaagcatcagctactagcaaaggatgaatgttctcgccattgtcctctgtgtgtatagatttctggaccacttgtggggtggtgtggctagctaaaaccagaattctgggctcctgggcctctctgaagaaaggtcttaatttttgaagatcagagggttatgagacctgttcacctgtagctccccctcctgaccttcccatgcttatctggagtaggtgtaagaaatccagcaaacttttataactaccttaggctaagatgtgattgattgaaagtctacctctccaagtagtacaggttggatatccctagttcaaaaatctgaaatctgaaaatgtttgagcactgacatgatgccaatagtataaaattacacatctgacctcatgtgatgagtcacagtcaaaactttgttccttgcacaaaattactaaaaatagtacataaaagtacctttaggctatgtgtataaggtatatgaaacctaaataaatttcatgtttagatgtaggtgcatccccaaggtatctcattatgtatatacaaaaattcccaaatcccccaaaatccgaaattcagtacacttctggtcccaagcagaaggaataaggaatactggataagaaatactcaaccagtatttacattttaggtgtcaagaattaactctaatgtctttctcacaaagatattgtgaactcagctgacatgctcctgatcaactgaatgatgagcttcctgctgtcttggatagcatttaaaaataggcacccgtgcaaaaccaaacacacccacacagcaaagcattcagggaattcatttctttaggtttgctcacacctggcatagcatcatgggcaaaattatttaagcattttaagggcattagtaattccccaacagcagcgcagagggtgatatggctgaacacatgtcatataatcagatttttaaaatttcaactcatcaattgatgatgataatatacttgggcattgcccatgttgttaacctcagcaatcaaaataaagtaattatactaattagaagcctcttaaaacccagctcagtgtccttgtgcatgagaggcaagctgtgccacagtcacttcacagagctcggagaccccataaagtcttaggagctcctcatggggccagtagccacattgccagggaaaaggagtattagaggtgagtctagagggagatggataaacctttcactcagaaatggccttagatgctggaaagagttgcaagtggccgaattggcctgatggtctggaaccagagatttaagaagcactgaagcccagtgaactgtgactgtcccaagtgttctggtggacagtcagtcatctacttgagtgggattgctgacagagtattaaaggagacccaatagatgcacagttatttggatacctctctattgggaattgaagtgaccatatgcagacctgcaaggtagccacattttattaccaagtatcttgagctgacagccaggctaagtgagtaaaatgtggtgaatctgaaggtgatcatggtaaagagaagcctagttattgagtcagaaatggatatactatcatgtgagagctcaaatctggaacaatgaatggaaaagtggagaagggtagagggcattgtacagcttgaaaaaacgaaggaggctgggtgcagtggctcatgcctgtaatcccagcactttgggaggctgaggcaggcagatcatgaggtcaggagattgagaccatcctggctaacatggcaaaaccccgtctctactaaaaatacaaaaaattagccagcggtggtggcaagtgcctgtagtcccagctactcaggaagctgaggcaggagaatcgcttgaacctgtgaggtggaggttgcagtgagccacgatcacgccactgcagtccagcctggacgacagagcaagactctgtcttaaaaaaaaaaaaaaaaaaaaaaaaagaaggaaaggtacaaaaatgtaactaaactgattgtttctgaaaatcatggcacctaacacttgtttgcaagaattatactcattgtggccttgaatatttttcatactctgacctgcttaaagacatcatgcttccaaaatttcctactctatagtaatcaagctattataataatatgcattacctccatagacaaatgacatggcaggtataaaataatatgcataaaacatttactattaggttattagagcagtaggaaaagtgacttacattaacttgcattataggagtaaatgggtgaatagggtaaaaaacagtaaaacaaagggatggaaaattgggaaagccaccaaaagcctagaaaggcttatgtggtataaaaataaccacagatcttacagactaaacagtaaaattgctcagctaattcatatcttacattgagtgacttaagtgaagataagttgatgggaataattgacaaatgcacacaaaaattaagtcagtactcaaaacattacagaaatagaaggaaattcaggatttgcaaaattaagataagtaattccaggaaaaccaactaaaatgtacttggcttgacaataacaccatttagctctcaccaagagtgtaactcaaatatgatgtgtgattgaattgttggcaaatgtttgtcaagttcctaatatctaatggctacagcattgtggttgtgagagaatcaactgggcagatgagccatggaattgtcaacctattgtcatcttaacaggagtttactgaagcaatgtaaataacacttcactagaaagctgcaggttctgacttgcaaataatatagtccaagagctcccaataacacgtgacagtaatgcaagatgttccctgcgaacaccatgtcagtcagacataaaggttgattcatgacatctggaaacagctgccttttactgaaagacaaagaaatttcaaattgcattaaatacagcctgctaatatgcttaccttccatccacaaatcattggcagacatttggggctgagatttcctcacattgtcacaaaaattaggtcagagtaataaatagaaaagatgttagaatttggacaaggaggtaacaagcagatccccaaataggtcaaaaacagcaaagccaatcaaaaccatttaggactgtgactgtggttatccaaaagtgacagggtctgggagtacatgtggatgaactgaactataacattattcttgaaagattgtctccattcaacaacatcaatatatatcacccggaaacctactattaaattagtgtactcctgtctcatctaaatctagatcattgctaattatacatgatgcttttttcagagcttaaatgtaggagtcaggaataacaggattcaaatataggcccttcaatgtgatgttcctaaaatactttttttttttccccacaaagtctactgtttgtcatctttagcatgggagatgccaatggtaccaacatctttggattattataaggtttgaatcagattaaaatcaggcaatgcatgtaaaagggctttttttttgcagctaaaattcaaagtctggctgagtagagaaatttgtagtgtggtagatgatgtgaatcccaaggtttgcttttagcagatctctctaccatttgatgagttgtctaataacaggttttttttgccatatagagaagattatttggaggattcttatacctaccattcttgaggtatctccttcctaacgcaagtgtgctggcaattatctgaaacctaatcaactggctttttgttttcctagctgccaccatggcagagactgctagatgctcatcaaacccatttcctcctcctactgagcatacagtcaaatccatttcccttttgtggtcacgtaactgtgttctagccagagaaatgtgagaagaagtagtatgcactacttccaggcctggcctataaaatcctcctacatgcatcttcccagctcccttctccttttggcttgttagaatgcattgactttcatgatggtttgaaagcacatgctgaatataatagaacctgaacacagaaggagcctgggcccttgattcactcctttgaggccagccacccaaccaggaatgctaaattgaactattacatgactttaaggttctaagccaatgaaattttgggatttgtctgttatatcagttaaggttgcctgaagtcacatggctacctaatgaagatgttgggtttgaagagcctgatagataacacctctctcctccttgcctgaattcagagccaaatgaaagatcaacattggagccagtcatatagaaatcaaatggctggctttaaccattaaaaatgcaaccaaatgggcttgctgatgtgctctgctccctcctttacagtcttgactatgggaatggcattttaaaagcagatgcactcatctaggattgtggcattattctggtcctaaaaagaggagaagaaaagagatcaaattcttagggttcctaagaattaattctctcctaactacgaaatgtagaccaatagctttcaccttcaattgatgtgaaccatttgtgagtaaggctcgtgagaccaggactattactctgatagttatctctctacatgctaatgcaggattgaagttcatgtctacaaaccagtcagtccatgtctacatgccacacatggtctaaggggcacaatatgcatttcttttggaagtcactttgccaccatggcctttccatgattacttttaaactattagaaccctgcccgccccccgccccctgccccagtttggaattcttcatttgagaaagtcattcccttcaataagcaggctgttgctgggggaggaggatgtttgtagagcagtgaggaagggcatatacctcagtttgccagaccagctggattaatcttcagaaattaggacatggcacatccaggtctggcccttcatagcttgtcatatctgcacaacctgggtgctgatggattttgtcattttcctggggagaattttcaatcatacttatgattgatttgggtcatcatgcccattgcttgtgtgcaaattagctattaataaggccccaaagtcagaataggtgatgagatgtgtcacccagtcatgtgatagaatgcaaatgtgatgtcactcacacttcttagaggatctgtcagttttaaatcctccagttctttgttttgttgccaaatggaatgaaccattattacagctttcagctgggggaggtaccttcaaattaaaggctatcgtcctaaactagtgactatttcagagacacttgcatggtctattataattctgctggtagactgaatccataaaggagaaaactaaatagcactgactttggctttaagagcagacatcaggaccaatttaactttataagccatttggtgtgcatgggcaactttgagttctctgccagctcagaagcacagtgctatagctattaaatggaataagaaacttacaggtgatgtacagttgaattggggtatcaataaatacaagtcaatccaaacaataagatctaaatgatactccagtctgatggctagattgtggtcaggaaattcaaatcttttgagctcagagggaaaatgaggaactcatcaacatttgaaataccagtgtttcagaagagcgaggcacccaaaaataaaataaaaattgaataaaacatttatttatttttattattaataacaggcaaaatttcaaagctcatgatatgaaaggcaccttaaattctaaaaaagtctacatgctagttattattctattacttcacttaagtttcataaccatacagagagggagagagagaggggatatatttgacatatgcaaggaacaaaatgtgggaatgtgtttctgtgtgccaattctcactgggtattactgacacaggatttttcttggtcacttatcagctggagacccccagctggtgacacccttgcccaggccttgctcaggcctgggtttgccacaggagatgccctgcccactaggcccagtgggctgtacctgacctgcattccagcatggatcccgcggctgctgcgactgcgtgcttagcccccagcaagaggggttgtgtaagtgagggagtgtggagtctggctggctgctccaagtgctgacataggggcaggctctgtgcagtgcttgtggccagaccaagcgtgttgcaagccactcttatggtagactctggtgtccagaagaggggactgtggtggtgcccaggcaggagtgcccatgaccctgaagccccagagagagtgttacagcatgctaattagctcttttagtcccgtcatccacaacccagtggacggtggcgtgttaacagctctgccctgtggcagagggccatggtgttacagtcttctctatacccacattttggtaggtcccaagctcttgtcctgtgtccaagaaggaggaggatacactgacaattaaagggtgaggagggcagagaataattttattgagtgaagaacagttctcaggggagaggggacatgaggctggtctcctacttgacgtcgggtgacttctctttcaatgtggctgggtccagggcttttatgggcttagaatggggagtgtgtgctgattggtttgtgagtatggaaaaaaggttaaaacaaaactcaaaggtgggcatgacagtataaaaaccaattagggaagggtaggtatatgtaaaataggtgaagggtggggaccaatcagaggaaactgtgccaaaccagaaaagaggttctcaatctggtccatggatttgacttgtagcttagttttcaggctttgaactatcttaggcttgaaggtcaggtttcaccagggagttgctcctgtctgccttggatttgtctacctcctgtcactatcagtacaggagaggccaaaaggcccaacacaggccttgaggtccccaagcaattccagagattcctggggaaagggtatgattctctgtgaataaaaatggcaaggatcctctgtcctacaggcagcagagtaaatgaaagtctgcaatttgttttctacacagattgccaaattgaatgcttattaaattcaagcatttagacattgacctgtatacatcaccacaaaactatgttctggacctggaagtacaaaagaagcactgaccatttttccacaattttatagctgagtcaggtttagagaaggtgctcaaatgttttcaattagctaaataaatattggttaagatgagctaaaaatgacaggccgtaatgcaattatgggaactcagaataggatggtgtggaaaacattgggttgatatacttggatacaggagtacagtagctaatgagaactatgcttgaaattgagaagtgcatcactttttcttattgttaaagtgtatagctaaagctgtataagacagagttttaactgggatggtaagtggataacagcgcactagaccataaaacaatatttacaatagcataaggcatggggaaacaatatgttgaaaccatgtttacatgttgggatcaacagaacacaaggtctttggtttatttattttttaaatgattaaagcagtagatattattgctattcaatatgcagaagtgtcccaagaacatatacaagaagataagaaaagaaagatggatcaaactgagacaaatttgaagatcacagaagtaaggtaactcatcgctctggccaccacgctgacctccgtgagccttccggccttggacacagatgagaaagtcatgccatgttgtctcttaaccacagataagagtcagcctctgttctttaaagccatgcttcatgcgttaatttaaagggctataattccagacatctgagacaattgggagataggatgctaaaaaacagttcaatgtagttcatgtccactttgttataaagtgattcatgagaccagctcaatctgaagtatagaaatatgaaataataatagaacccagaatttataggatgccttcactcccaagcatatgaaatatcttcatgtgtactctatttgatttaggttaatattctctctattagctaatgtatggacatggaataattcccgtttaagagagagaagaacaaagacacagagagatgaggtgatttacccagcacctgggtatcaaaagtagaactagaattttccattcactagccacttcccataaatatggatggtccagattctagtggattatccgaggggtatcaaaaacactgtaaatggcccagtttttgtctacttcttcatgatattgcaatccctttgccaatgtgtgtcttttgactagaaactttcttatctctagtgagaaaaacaggacattaaagagtttctgtggaagtcaaggaaatcattggagttttgtggaagggaggagaattaggctaattgctgctctgccactttggaaatgttaaaaaatcagtagcaaaggcttatttaaagcttaaaggaaataaaagcagggcagtaagccacctgctatggctgggggtacaagggcagtaaatccaggaggtgcttttcatgtacggtgtataatttggtccctgacagagctcggatgaggaatagtcctatataactattgatccacagagctatcagggacatcatttaacttgatggcttgtgttggtcccttaggatgtggagtcagctttaacctgcaagggaaaaaaaattaaaggtaaatgaaaagaatagaagggaaaaaccacgcagagttttccgtactctcccttttaataagatacatttccaagtgaccctcattttcagctgccgtggtatgtgttggtgtatttcattcatttacctatagaattatattcagcaacgcctatcactcaatatcctattagacatttacaaatacatcatcgatacctagtctttgacagtgattgcagcctaggagacaaagacaaataggccacccctggccacaatcagtagcaatcccaggccaatgtgagactccaaagggggaaaatgggatgctgccactcagtgggaggagtcagttgcctgtcaaacgtagagatgtctcctttcattgagaccttgccattcctggaactgcagaagctgatgtgtttcaggctgttgatccaagcctgcgaattcttaggtcaggggtgtccaatcttttggcttcccttaatcacattggaagaagaattgtcttgggccacacataaatacactaacactaatgatagctaatgagctaaaagaaaaaacttacacaaaaaatctcataatattttaagaaaatttacaaatttgtgttgggctgcattcaaagctatcctggatagccttacttcatccttttggcctaattgtctggtgctgctgctccagtttgggccctttcctcccttctttgaccacagttcagactgtccttccagttatattgctttcagctgcctttggtaaatgttccatttggtcctggccacattccggaaatataaaccaccacatatgctttcaaggaggcaatgccccctctgactttacttcccactaaggggatcgaaccacatataatttaaaggctaaaaggacaaaacactaatgccaattctttgccagtgttttgttcatttctatcattaactcaaatactttatatgtaatcaacccacagtcattactcactgttgatgagaaataagatgcctgcgtatcatgtctattaacatgtacatctccccaagacttaaggtcctgcaaggtcaggacagtctcttgtaaaattttttattccttgaaggtacacctataacagatattttggattattgaatccagagaatttgtttgttgaaatgaaaaggtttatgtcttgtatcttctaaacagtgaaatctctgctcctttaggtatcttgactcaatgctttttcaattcttcatccacttctctggccttcctcagcattcttcttgccctgtcctcagccttcatagtctggtgtgcttctgggtctggtcttggcagccttttcagcccacgtaatttatctgatgacacccatatttatagattgagcccgtccttttctgcttttctatcaaaatgtctaatggacctctctacttgattgtcattaaagaatttccaataaaaatgcccaaacctatattcatcaacttctccctcctaaatcttgttacctgcctatatccccactctcaaatcaaacccatctctcccttcccaccttcacctgatatgggctcctactgggttccttggcttcaatttgttcctcttttcctcttatgcttacttatgcttagagtgatcatcccaaaacaccaacagattaattcatttgttcaattcatactgttgagcacctgctgtgcagaaggcacaaaataacacagtggtgaattaagcagacttgatccctatctgcccttggggagttcatgcctcttttctcattaaaccctttgacggcttccttagctatggggccaaagtccaactttttacctggccacaaaagacctttcaaaaagtgaactttctcaattcatctttagccactacccatttaccttctgctctccaattatatacaactacttgcagtttttcaaacatgttgtaatatttccccctctgttgaccttttaactcctcaagatcctgttcatcatcttcttagagttgatttttctctctttttttaatcattactgtaccttgtaatatttctacttttagcactgcaaagcagaatttgtttatatttctacctctccaactaaattgtgacctactatgtctctttatcgtatacttggcatttagcataatgtctgggatatagtagggacattttattttagaaaaaaaatttacttaagctaactaactcatgattgttcttcagagaactgcaagcttgatcctaatgaatgaaaaaaagttctaattttatctcataataataatagacattaaatatcatgtacttaatttatcaactggataatattcattaagtgtcagcaatctgatgcttatgagacctgatttagaagtgaataatggttgcctgttttcatctgagtcttttaacactatgattttcaagtgttaaagatgtcaaacaagggcagttaattagataagctgttgatttgagactacatgtgtcaggattttctaagttgttcatcgatgatggatttacatcattttatcaataatttaggttcctactctgtatatctttctgtccaagacaataaagaagtaaaaaacagtagaaagtatggctgctgcttgtaatgtatttggagaaacatgataaacctaggtcacaagtagatagcatgatacatgaaatgagaaatactatacttgaaagcaaaagacaagttctagtggttcatactgtagtagtggtccaagagacatggggctcggccgggaaggcttcttaaaagtttctagttggttcctgctcatggcgctagatagactagacatgttgacagtggcttctgtttacctctgtattttcagtatcaagcatagtgctcagtatataatagaagctcaatgaatgctgaatgaatgaatgaatgaattaacatattagtggtaagtcaaggactaagccttgaatatgaacaaagtgtaagcatttaatttcaactagagatggcaagcacatttctactcccttggcaactaagatctaatggtagcatttgtctgtagtaccgtattttgggagtgtcagactaatgttgggttcagcaggtaagagttcaatggtcggccgggcgcggtggctcacgcctgtaatcccagcactttgggaggccgaggcgggtggatcatgaggtcaggagatcgagaccatcctggctaacaaggtgaaaccccgtctctactaaaaatacaaaaaaaattagccgggcgcggtggcgggcgcctgtagtcccagctactcgggaggctgaggcaggagaatggcgtgaacccgggaagcggagcttgcagtgagccgagattgcgccactgcagtccgcagtcccgcctgggcgacagagcgagactccgtctcaaaaaaaaaaaaaaaaaaaaaaaaaaaagagttcaatggtcaaataggaagacatgggaggagagcatggcagcccttttgctgggaatttcccacttcaactgtctaggcaatgggatttctgataacttacagggcaatatgaagaacatgactttgagaaatatcacagataaatagctgtgatatagatgtatagaatgggctgtgttggagaaagactggagcctctgtgtgactatgtgattatgagtgtatgtggttgtgggtacaagcagaaaggttattttcaccttgattcctgtaacacataattttcatatttctaaagcccgattttctctattgctgataagtttctaaagaatgggcacattagttctgaacactttttgaataaaagttttgttgtgttgttcgcttctcatagaaccttagcaggtgactttaggatcaatcgatcaggtggactggcctgaagtggattctcccaagaaccttctaaagctgggagtcctccagaactggcagaaagtgaatgtttgtcatcaggtataaacaacagccatgagtgtgttattcagaagttatccatgcattactgaggccagaagttgtgctgtggcagaaggaacctacactctgacatattaggaagtatgcactttacagattcttaccgtatgcagaaagtcatagcacatttcatttacagggtagtcctgccaaagtgtatgagctgtgtataggcatagtcataaaatgttgctcaaacagaagagaaattaaacacaaagacttacttgttttttttctctttctctctatagctttgactttggaaacaatttctttccttcctaaatggaattgctgccaattacacagcaccatggaaattatctagttaatattagagaaaattagcagcccatgtgattgaacatagagaagagagaaaggctgctgttcctagggacttgggtaactctcatctctaagatttagagaactttgcacatttaatatttagacaagaaaatctactgaggaatgacagcagttgcaggttgcaggactgggttatattgctggttgaaggtaaaatattgtgaaactaagaacagtcatctgagcatgataagggagtatactggtgacttgaggatgtctgactacagaatatgcatgtctgatttgagaaggtggtgagtttatgcttgggccatattactgcgtaggagcagaaggctagatagcactgaagctgctcactgtggatgaatacaatcctacacatcagcgtaattctaaggtgactataattgcagcagaagttaggagatccaaattctaactcagagagtgccctgctactaatctgtttaggacaagtcacttaacctcttaatgcctctgtttccttatctgtgagatggacaaaacacctgccctgcatgttttacctgatttttgtaaggataagatgagctttgcctatgaaggcacagtacatgttgagacaaagctggccaacagaacttccaagtatatgggtggaaaagaataaaatatctcagtagtaaaaatggaagacctcaggaaatggaagcagctggggaatgcagtgtgtgagtataaggcatgcagaatctggcacaaacaggaaattaacaggaggatgcatatgtttgcatcaacaatatctctgtaagtcgaccccccatacacacataccatactctcactgatcagcaaagggaagcaggaggtacccaatgtaatcagtggccagtcttgcccaacttgcttccatttcagcccagttcatttggctgttggctcggcttctgtgctctggtcttggtattttaatgtggctctcagctgggctctgcatgtcccttccaggcatccagcttgggctcatggggactgggatgggttcaacttgtcctcctaatcagagaattaaaaagcactactgcaggaatgtagctgtatccctaagattttgtcatctgtcttttgctgtggcaaagagggagtcctagtggtcattcatactgggtctttgaagataaaatgttctaaaattgtggcatggtgcaaaatgggaaggacatagggagcatgggcagaggaaggaagcaaaaacatggaggcatcccttgtttttccgagttttcaggaaaagaaaagcaacatgcagctcctgagcagggaagaagcaacaggaataaacctttggggcacatactggacctgaatctttggtctctctcttgaggcaaaaagtagctactcagggaaaaacaatgcagtgtgggaactgtaattatgaattcagtgaatggatgctatttatagtataccatattctgcaggcagggagttcaatatgaagttcagagccacagacaaattgaatttggtgtggaggttctgtcaggagaaaaggactgctggaagaatgtggtgggctttaacagagcaggttagggtcagaggctctgttcattctattcataaatgaaagagtaagtacagaaaacactatgactttgtttaggaggatttacttgtggtaccagttccagtaaagcagcttgctttgaggtttgaacttggcaatatgaatgggaagttgggctgtagcaatttgaagggtggcttctctacctgctaggaagttttaggttttttttttaaatttaaggtggaaaagtgggtcataactggaatgaaggtaatccaaaaggtaaaaggtaaaactggaagctaagaaatcatttatgcttagtaatgtgccagtaagccaagtggtttggttatggaaagcaaggataccagattactgaatctatataaacatttgggaaataaagtctataaaaaacaatcaaaccttgttcaagagaaatttttaattacattgtaaaaaatgaaattaagcacccttaaatcttagttcagataaaaaattaaaactctagactatttagagatatatgaaatgagaacaccacacacaaaaactgatggaatgtggctacagttataacaaaataaaaatttataatcataaatgtgttgattaggagaagaaagactaaaataatcaagctaagcatttagttcaagaaataaaaatgggccgggcatggtggctcatgcctgtaatctcagtactttgggaggccgaggagggcagatcacttgaggctaggagtttgagaccagcctggtcaacatggtgaaaccccgtctctactaaacacacacaaagtattagctgggcatggtggcacatgcctgtaatcctagctacctgggaggctgaggcatgagaatcacttgaactcagaaggctgaggttgtagtgagccgagattacgccactgcactccagcctgggcggcagagcaagactctatctcaaaaacaacaacaacaacaacaaaacagtgtaatattaaaaagcataaaaaagaaaaataaatcaataaatataaaaggataatttaatgaaaaagaaacaagagacttagaagaagtaggtaagtggaatgaatgacaggccttgcttctgccgttggtctccagattacaactgatattccctgtctttctcatctttcatccactctaccttcctcttagcctggtctagcaactcttgtagtacaggtagctcacctggtaggatgactgagacccacacgcttgggtgatcagagccccaggctgtcatgtgcttctcaggcaagaactgtgtgcttgttcatttactgtcaaaattgtacaaggttgtaccaagagatagtccagtgcatcacctggtttctaaacattcttctctggcccagtgcataccagcaggcctacttactcatgacgattggctcagctaccctagtgactccatgcattgcctactggtgccttggcacaaggatcctgaagtaaacagatggaagtcatagtttatagtttaatgggatcttgctgtgtcacctgatggaagctttcctcctctggggtctactgcctctaaagctacagagcatagggttctagggaaagaaatcacaaatttccataagtgagtcactgcgatgatgataaatgatgtgactcctatttctggtcatttaaaaaaaacccacatattttatctgtggagattcagcactgtgcaatgttcatcaatttagagcacctattacaatctggagaggctgccttcctcagagtatcatctccacactggcccctccattgcacattcaaaaggccactctgctgctctgtcaggccaacaacttctggcgatgcagtatgtaacaggcctggtgaatctaatgaccatgaagccactgtggtacttcctttgctgtaaagtgggtaccttggtccaatgttatacttgtggaatccgggtcagtggatcaaatattctattcttgggtagtggtgctggctgaggtctgcagacaggaaagggaaacctatatccagagtgtgtttcaattccaatcaagatgaatcactggcttttctaggatggaaggggtgcagtgtaatcattggttggtcttcttgaggaatggcgctgtttcagaagctcagcatttatctctattgctggtaggcttgacatttaatggttgcagaagctaggtaagtcttcgtgactaggagtgtatgctgtcaggcccatgcacagccctgtccctgtctctgttcctgcaccattgcaccagcactgaggtggctgatgcagggcctggataacatcaactggacaagtcgtactgcctgcctggctgttcagttcctcttttatggtagacactctctggtgggttatttaacatgagatgtaaagatcttcacattttacacttacttacatagactcatcttcatgcctcctctctatctctccttgtgcacactcttctgatctctcttcttcagattcctgacacaccagacaagccactcaccattgcctttgggtccatatatgttctcactttaggccactttttattccatgcaaagtgcattatcaagtgtatcttctgaagctctgcctcttgggaggatttttcataccattgcctttctaggccacctctgagtggggcttttatgtagcagtggtccctttcatcctgcatctacacattgagaagacacatctatgatccaaacccagccttttgtcttttttatcctctggtcacatgagggaatcatgaagaccctccccacaccacagatgtgagctgagggcaaggcgttggcataagagtactgaatgaaatggggtctggggcacctgcttgtgctgcttgcttgtgcctctggccctggttgtttgatgagttgctgctgggcctgcgtgaccttattacttgataggtttgacaacacctaattcatggtaagcagttacagtcaagtggtcattagatgtcccatggtcagatgctgtatctatatcaggagccagcacccatacaggaactgtttttcaaaagatgccacttctccactactggtggcatgactttgcttcagtacccttggggtctgcattgtggttctcctcaagtccagagggcatcttctctcatagcagtacctctataacgcagagtctcccaggtaatatgggccaagtggcaggcttactttcagcacagcttggtcctatttgtagagcccttttgtgctgtagtccccacctaaacctggtagctatcatggcacccagtaggaggttagggtagtatctccaaatatggaatatgctgcttccagaaactggcctgtcagcattgtgcttccttcttattgattggaggtgtgagatgcaataatgtgtcctttactttgaaaggggtgtcccaacatccttggacatctaaaacctttactgatatggcatgtccctgaatctttatagggtttatttctgccccctccctcctctggagatatatatgatcaaggcttccacatacttgttacttgttattcctcttgtccaataaatgtggtgtcatcaatatctacaatgtccagtagattccaatccctttaaattgtagatgcaggaccactgctacaagtgccatgagagttagcatagcccaggagcaatcatgtaaatgcattctgttgcctgttccataatgaaagagaactgtttctgatccttgttcctgataaggatgtaaaacgccgcattcaccagctcaatggccatgtacttgaggctgtgttggtctactctctagaaaaggtactacacctgacacagaagctgcaattggagctaagtttgatgttatccactattatcctctaggatctgtttttatttttaaggaaataggagtggtgagttaaataggaatataatggggccaccacccttgtaacctagttctcaataaagcatttggaggtgggaccaatctcttccattttccccagaacatgagagtgtattttatttacaatttttgacttggaaggcacagttttagagactttcaccttggccttcccgacttcaatagctcttacttcaaaagctaagaagctcatggaaggattttgccaaacaacaagtatgtatactccaattacatattttggattcaaggaaattccactgggtagctctgtgaacccagtgaacctgttgtgagcaaggttgggcccaggactccattgattacttgtcccttataagctcccactataacaggtagccatgaggacacttgtgtacccagatagcagttcagctcctgtgttcaacagttcttgaaaagttgatttattctactttttccagtgtatgattgccagaatagtggtcatagatctctttggagaagaattagtgaaattattaccatgcaaacttgccttggtattgcagggtcttttcttctaggtatccagcttttccttcagtcaatggttctgaatttaaaaactagctcaggttcagaaactagacaaaggatcatgccttcttattacagtgtctgtccttagcctccttatcatctatccatgatttctttggtttagactgagcaatgggcttattggctgtccacctattttgcccctaccgtgccttattgtgttaaccatctacctagctcttcatgaatcagatactcctggctgccacttgggctttgcaatgtatcacagtcactgtgcctgcaatggactgaatatttgtgtcccctcataattcatatgttgaaccccaatccctaatatgatgtattaggaggtgtggcatttaggaggttattagaaaatgagggtggggacctcatgaatgggattagtgcccttatcaaagagaccctggagagatctctcacctctttccaacctgtgaggatacagagagaagacagctagctatgaaccagaaggcaggcccttacaagacatggaaggtgctgacagcagcaccttgatcttagactgtctagcctccataactgtgagaaataaatgtttgttgtttaagtcacccactctatagtatttttgtaatagcagtatgaacaaactaagacagtgccttccttgcttctgacaagtaagggccaccaccagggtgatcatcatctcctttcttaccagtgagcccagttctgcaatagcatctccttccctaagctctagtttacagaggacagcccctctctctggcccatttcttattcccttattgctttgctaagtggggtgtcctctgggccctcctgcagaacattgccaccagatgagctttcttgctctacataccatatccactctagcgtgccaacttcccaagcttctaagctcctcatcctaccatctgctatggcagctttggcatttctacttaactaagtttgggctctttctttctctcatcttcagagcaatcctaaccacatgtaagcaacatttcctgggccaggatattaaatcctatattatgagagagtgttcccatgttgataaactctccctccctcaactttatattccacacccactcttgctccaagatccccaggacccagttccatacacactctttcggcttctctcagtataaattggctaggttttcagagcatcatggcaatagagtccctctccttcctttgcctgcccagcatatcattggccagactgtgttgtgacttgatgctaggtcaagttacaaaccccagcaggggtttgggtggggatcgaacttgagggaggctgtgtgttgctctgcagcacaggagtctctgaatcatctttaagaaattggggactatagacccaaggggttcaggggaatctggagtgtaaagattttcaagtgcattgacccaaatgacccagctcaagtctcagggttccactcctcaattagggccctaaccctggcataggagacttaccagggaagagaatccaactttctctggagctttgctactcttataattaagtctcgggcttgatccttaaccttctcctcccccaggagatcaagggatcagagcctctttacatgctgccaaggaggtcctctgattttcacacttagccttcaattagtgattaattacccttagccttttcttgtctctctccactgcatcagtgccactcagcaagccattggattccattgtctttataattagtacttcttcagaacctctcgaaagcttaagctactgcatctgccagtgcattttcttccaagggtgttctatcgcaggatatcgctgataaaaagctttaacaattgcactgctacagcatgcctgtagttttcagcgagtcacctaccactaggaatggggtcctcactgccagcgggttagtaggtgatccagtttcaaaactgcattttagttcagttttcttcctcctcagatcactcctggcaacaattgttttaggtttgcttcctaggaaaataggctctgaaatgaaggcttctgtgcaggatatttattgatgagtactctcaggatcaatacctctaggggagaagagggaaatattgaactgtgatgcaactgccacaagaacctcataaccactctcatggggagacctggagctgggatggttcttcagcatttccctgccatgaagcaagggatttggatctcgatacccataacctactagtcactggatatgggctatctcggggaaaagtgagcccttgagcacagcagctcttttctgctaaagggagtcccagagaggaagtcaatttaaatctgtcatccatcaacacccagtagttggcgaaatgcttgcctaagcccagagtgagagcctgagcagcacatcacagtgtccattgcagttcctatatactagcaataagccagtaaaaatatgatgaatgacaatcccattaacaatagcaactggaaacataaaatgtgttcagagtaccttaaagactcacgtgaaaaaaacaaaaaaaacctttattgagaaacaatatcttgacgaatgaaaatatttaccttctttctgaataagaagacaataggctgggcgcggtggctcacgccagtaatcccagcactttgggaggccaaggtgggcagatcacctgaggttaggagttggagactagcctgaccaacatggagaaaccatatctctactaaaaatacaaaattagctgggcgtggtggtgcatgcctgtaatcccagctactcgggaagctgaggcgggagaattgcttgaacccgggaggcggaagttgcggtgagctgagatcacgccactgcactccagcctgggcaacaagagtgaaactccgtctcaaaaaaaaaaaaaaaaaaaaaaagaagaagaagacaatagacaatagcaaaagtaccaactcttttcaagttaacagaataaaataagctataatagaactaagtataaatattactttgtgtaagataaatatggtacttaaaatcactacggaaagaaaggattatttaataaatgtttttgaaataaatgattagcaatttggagcaaaaattagattttctacttcatactatttaccaaattacgtcccatatgaattcaatgtttaaataggtgaaaatactagaagaaaatatgagtgatttgttaacaatcatcttttggtggagaagatgtttaaggcatgataccacaggcagatagtatataagaaaaagataattaattaaaattgctaaagactatttttttataaaaagtgataaaaatttaaaagcaagtgaaaaactaggaataaaatatttataaggatagttctactactattcttgaggtatagagaactcctgtgatttaagaaaaagacaaaaatgtataaaggacatagataattcacaaaagcaggataaagtcaataaatatatagaaaatattattacctactattaatcaaatatatgcaattgaaagcagcaaataatatcatttatgacctagcaaattggataaaattttttaaaaaattgtcatacctactgtcgtcctggaggtgagaagtgcacatgctcatctccagagaatagaaacagatacatttatggagaatgtaaagcccacatggaaggtgattttatgatctatatcccctaacttcattcagatcctttgaccaaggaggtcacttctaggaatgaatcccaaagaagcaattgctgatacacatgaagatttttgtacaataatgttcattatacaattattgtttctaatactaaatgttagagccaacctgtctcacaataggcatttgttgaatcaataatagcttatctatattatgaaatactagatagcctttaaaaatgatgtagaccaatatttagtgacacagaaaaatatgcatagtagaatgtaggtgaacttaggaagcagcaaaattgcatacaaaagcaatctcattttttgctaatgcatgggagggggggaaaaaaaccctaaaagtgtatactctaaaatataaatggtgattattccttgttggccaggttttagatgaattcaatcttcttctttttgatttctagtattttattttttccctttttttgtaaagaaattaagaattactactccataggcagagcagccaatttcctgtgttttctacaatgtgttatgaatcaggctgcaatgagtacactaaaagtaaatgaaaatgtcctgtgttaccccagttctgattccatcctgatgctattctgatgattttagagagatggatctaactgagaaagaaaaaaaaaatgaaagaaaccacagaatcagattggctccataggtccagctgtaatgaacatggatttttaaagatatatacaaatttaaaagaataaactcaaaccagggatgtataaaggaaaatgaccagcaggtttttttttttttggttttttaaaagaaaagaaatagaaaatattttaaaaagctagaaaagcccaaagtgaaccaagtccttcaaaaatgcttagtatagggaaaaggatttaaaactaagcatggaataaagaagaaaagaaacagttttggctgggtgcttggcagcactatggtactgttgatgaatgagtgtacagagcaaactccgtcagtcctattttacattcatcttttctgccaaaaggaatgaggctggggctgtagaaggaagaacaaacatcagtaggaaggaactgtggcccagtgtgaatgaacagatccggggacctccctgctctggatgaattctaatttcctggctggagcagatgcatttctatgttcttgcacatgagaaggcaagaaggcagatcactgccagtgctcatggaccaactgtggaggggatgagagacggatcagcacgtgggagctgggccagcacagttccttgcttcaaaaaagaaaggaaggtgaggcccttaaatttcagcccggtgagcaagattctcaaacaaattattaaggggaagattccaaggaaactcagaacatgaagcagataatcttcataaaataaagatgaactggccaggcatggtggcttatgcctataatcccagcactttgggaggccaaggtggacagatcacgaggtcaggagatcgagaccatcctggccaacatggcgaaaccccgtctctcctaaaaatacgaaaattagctgggcatggtggtgcgtgcctgtaatccaagctactcaggaggctgaggcaggagaatcgcttgaacccgggaggcagagattgcagtgaactgagattgcgccactgcactccagcctggcaacagagtgagactctgtcaaaaaaaaaaaaaagaaaaatgaactacgtggagaaaaatagtacaagtcagagagcaagtgaaagacttctatgtcaatgaggtgcaggtgatgagggatggagaaggttaaggaggaataatgacgccacctacacacatctgggagtatgttgggagatgtggtaataagagaaggggatgtcacaggagtcctttatgtcatcgtttttaggaaactcagggaaaggggcaaggctgtggactaattctggcatttcaatcaaggaggcagccattagtgattcgatgcaggcctccaagctttagaaatgagttgatatctggaagtgctcccacaactgaaggcttcactgctgtcctgtattctgtgttaggtttggtgattgcctgatctgtttcttgggagttatttttcatggctaagaggagaaagatgataaaaaaaaaaaacaatacgcaaagaagatgccgcaacttttaaaggaagaaaaggtgaaagccattatgaacccccaagtttcattttcatccctccctttctccttttcttcttcccttccctcaatctcaaatatttattagactactgctatacacaaaatattatgctaaatgccaggaatagttactcatttaataaatatttaaagtgattactaggcactaaggatttagcagtgacaaatacaggcaaagttcctgttctgatggtgcttgaagtatcatgtgctgggtgggttctggaggggatgcagagaaaataataggcaaatgagtatataatctgtgaacctgtgacatgtgctatgaagaaaaaagaatcagagcaggaagatggagagcgatggtgagtaaggtgtgctggttcagggagggcctctctggaaagatgacatttgagcaaaggactacatgaagtaaggcctgagctgtgctaagatctggggcaatggtttctaaacttgatacccaaatgatgaataggagttttccagttatacaaataacacagaagaacaacaatcttgcagatagaggaaataccttgtgccaagtccccaaggcaggaaagagcgtggcttatctcatctaagggactgaaggaaggctggtttgaaatgaaatgtgaggacagccaaaaacgagcttgaagatcaggaaggtccaaacacctgacagccttgaagttctgctcagggtctggactcctccttaatggcagggaggactcgtcgatagttttaagcagggtagtagcaggatcacatttttttttattatactttaagttttagggtacatgtgcacaacgtgcaggtttgttacatatgtaaacatgtgccatattggcgtgctgcacccattaactcatcatttagcattaggtatatctcctaatgctatccctcccccctcccccctcccctcaccgcacaacaagccccggtgtgtgatgttccccttcctgtgtccatgtgttctcattgttcaattcccacctatgagtgagaacatgcggtgtttggttttttgtccttgtgatagtttgctgagaatgatggtttccagcttcatccatgtccctacaaaggacatgaagtcatcattttttatggctgcatagtattccatggtgtatatgtgccacattttcttaatccagtctatcattgttggacatttgggttggttccaagtctttactattgcgtaatagtgctgcaataaacatacgtgtgcatgtttctttatagcagcatgatttataatcctttgggtatatacccagtaatgggatggctgggtcaaatggtatttctagttctagatccctgaggaatcgccacaccgacttccacaatggttgaactagtttacagtccaaccaacagtgtaaaagtgttcctatttctctacatcctctccagcacctgttgtttcctgactttttaatgatggccattgtaactggtgtgagatggtatctcattgtggttttgatttgcatttctctgatggccagtgatgatgagcattttttcatgtgttttttggctgcataaatgtcttactttgagaagtgtctgttcatgtcttcgtccactttttgatggggttgtttgtttttttcttgtaaatttgttggagttcattgtagattctggatattagccctttgtcagatgagtaggttgcaaaaattttctcccattttgtaggttgcctgttcactctgatggtagtttcttttgctgtgcagaagctctttagttaaattagatcccatttgtcaattttggcttttgttgccattgcttttggtgttttagacatgaagtccttgcccatgccatgtcctgaatggtattgcctaggttttcttctagggtttttatggttttaggtctaacatgtaagtctttaatccatcttgaattaatttttgtataaggtgtaaggaaggcatccagtttcagctttctacatatggctagccagttttcccagcaccatttattaaatagggaatcctttccccattgcttgtttttctcaggtttgtcaaagatcagatagttgtagatatgcaacattatttctgagggctgtgttctgttccattgatctatatctctgttttggtaccagtaccatgctgttttggttactgtagccttgtagtatagtttgaagtcaggtagcgtgatgcctccagctttgttcttttggcttaggattgacttggcgatgcgggctcttttttggttccatatgaacttgaaagtcgttttttccaattctgtgaagaaagtcattggtagcttgatggggatggcattgaatctataaattaccttgggcagtatggccatttttacgatattgattcttcctacccatgagcatggaatgttcttccatttgtttgtatcctcttttatttcattgagcagtggtttgtagttttccttgaagaggtccttcacgtcccttataagttggattcctaggtattttattctctttgaagcaattgtgaatgggagttcactcatgatttggctctctgtttgtctgttattggtgtgtaagaatgcttgtgatttttgcacattgattttgtatcctgagactttgctgaagttgcttatcagcttaaggagattttgggctgagatgatggcgttttctagatatacaatcatgtcatctgcaaacagggacaacttgacttcctcttttcctaattgaatgccctttatttccttctcctgcctgattgccctagccagaacttccaacacgatgttgaataggagtggtgagagagggcatccctgtcttgtgccagttttcaaagggaatccttccagtttttgtccattcagtatgatattggctgtgggtttgtcatagatagctcttattattttgagatacgtcccaacaatacctcatttattgagagtttttagcatgaagggttgttaaattttgtcaaaggccttttctgcatctattgagataatcatgtggtttttgtctttggttctgtttatatgctggattacgtttattgatttgcgtatgttgaactagccttgcatcccagggatgaagcccacttgatcatggtggataagctttttgatgtgctgctggattcggtttgccagtattttattgaggatttttacatcaatgttcatcaaggatattggtctaaaatgctctttcttgttgtgtctctccccggctttggtatcaggatgatgctggcctcataaaatgagttagggaggattccctctttttctattgattggaatagtttcagaaggaatggtaccagctcctccttgtacctctggtagaatttggctgtgaatccatctagtcccggactttttttggttggtaagctattaattattgcctcaatttcagatcctgttattggtgtattcagagattcaacttcttcctggtttagtcttgggagagtgtatgtgtcgaggaatttatccatttcttccagattttctagtttatttgtgtagaggtgtttgtagtattgtctgatggtagtttgtatttctgtgggatcggtggtgatatcccctttatcattttttattgcgtctatttgattcttctctcttttcttctttattagtcttgctagtggtctatcaattttgttgatcttttcaaaaaaccagctcctggattcattaattttttgaagggttttttttgtgtctctatttccttcagttctgctctgatcttagttatttcttgccttctgctggcttttgaatgagtttgctcttgcctctctagttcttttaattgttatatgagggtgtcaattttagatctttcctgctttctcttgtgggcatttagtgctataaatttccctctacacactgctttgaatgtgtcccagagattctggtatgttgtgtctttgttcttgttggtttcaaagaacatctttatttctgcctttatttcgttatgtacccagtagtcattcaggagcaggttgttcagtttccatgtagttgagcggttttgagtgagtttcttaacctgagttctagtttgattgcactgtggtctgagagacagtttgttataatttctgttcttttatgtttgctgaggagtgctttacttccaagtatgtggtcaattttggaataggtgtggtgaggtgctgaaaagaatgtatattctgttgatttgggctggagagttctgtagatgtctattaggtctgcttggtgcagagctgagttcaattcctggatatcctttttaactttctgtctcattgatctgtctaatgttgacagtggggtgttaaagtctcccattattaatgtgtgggagtctaagtctctttgtcggtcactcaggacttgctttatgaatctgggtgctcctgtattgggtgcatatatatttaggatagttagttcttcttgttgaattgatctctttaccactatgtaatggctttctttgtctcttttgatctttgttggctgaaagtctgttttatcagagactaggattgcaacccctgccttttttttgttttccatttgcttggtaggtcctcctccatccttttattttgagcctatgtgtgtctctgcacatgagatgggtttcctgaatacagcacactgatggtcttgactctttatccagtttgcctgtctgtgccttttaattggagcatttagcccatttacatttaaggttagtattgttatgtgtgaatgtggtcctgtcattatgatgttggctggttattttgctcattagttgatgcagtttcttcctagccttgacggtctttacaatttggtgtgtttttgcagtggctggtaccggttgtttctttccatgtttagtgcttccttcaggagatcttttagggcaggcctggtggtgacaaaatctctcagcatttgcttgtctgtaaagtattttatttctccttcacttctgaagcttagtttggctggatatgtaattctgggttaaaaattcttttctttaagaatgttgcatattggtccccagtctcttctggcttgtagagtttctgccaagagatccactgttagtctgatgggcttccctttgtgggtaacctgacctttctctctggctgcccttaacattttttccttcatttcaactttggtgaatctgacaattatgtgtcttggagttgctcttctcgaggagtatctttgtggcattctctgtatttcctgaatttgaatgttggtgtgccttgctagattggggaagttctcctggataatttcctgcagagtgttttccaacttggttccattctctccatcactttcaggtacaccaattagacgtagatttggtcttttcacatagtcccatatttcttggaggctttgttcgttttttttttattcttttttctgtaaacttctcttcacacttcatttcactcatttcatgttccatcgctgatatcctttcttccagttgattgcatcggttactgaggcttgtgcattcgtcacgtagttcttgtgccatggttttcagctccatcaggtcctttaaggacttctctgcattggttattctagttatccattcgtctaattttttttcaaagtttttaacttctttgccattgtttcaaacttcctcctttaactcggagtagtttgatcttctgaagccttcttctctcaactcgtgaaagtcattctctgtccagctttgttccgttgttgatgaggagctgcgttccgttggaggaggagaggtgctctcatttttagagtttccggtttttctgctctgttttttccccatcttcgtggttttatctacctttggtctttgatgatggtgacatacagatgggtttttgtgtggatgtcctttctgtttgttagttttccttctaacagtcaggaccctcagctgcaggtctgttggagtttactggaggtccactccagatcctgtttgcctgggtatcagcagcagtggctgcagaacagcggatattggtgaaccgcaaatgctgttgtctgatcgttcctctggaagttttgtctcagaggagtatccgaacttgtgaggtgtcagtccacccctactggggggtgcctcccagttaggctattcgggggtcagggacccacttgaggaggcagtctgcccgttctcagatctcaagctgtgtgctgggagaaccactactctcttcaaagctgtcagacagggacatttaagtctgcagaggttattgctgtcattcgtttggctgtgccctgcccccagaggtggagcctacagaggcaggcaggcctccttgagctgtggtgggctccaccgagttcgagcttcccggtgctttgtttacctactcaagcctgagcaatggcaggtgcccctcccccagcctcactgccaccttgcagtttgatctcagactgctgtgctagcaatgagcaaggctccgtgggcgtaggaccctctgagccatgtgcgggatataatctcctggtgtgatgtttgttaagcctgttggaagagcgtagtattatggtgggagtgacccgattttccaggtgccgtctgtgacccctttctttgactaggaaagggaattccctgaccccttgtgcttcccgagtgaggcaatgcctcgccctgctttggctcactcacggtgcgctgcacccactcttctgcacccactgtccggcactccccagtgagatgaacccggtacctcagttggaaatgcagaaatcacctgtcttctgcatcactcacgctgggagctgtagactggaactgttcctatttggccatcttgactccacccggatcacatttttattttagagaactgtctgctgcaaggagtaaactcagttactgagtttaagtgagttcaaaatacacacgggccaccaggggacaatgtcaagtaatttatgagtatgaaaatcagatgagaggtctgactgtgccagaaatcaatgtctgttccaaagtccaaagggctggtgagacctgggttaggatttctgtttacttgtctctaaatgagaaagttagattggatttcttaggtttctttcagctttaaaatctcatgggcaagggtagaaaataaaggctgagtttgtaagaagaaaaattttgaaagaattctctgtacaaatgagtaattttcatttagaagctgatagataaactcgaggctaaactgagcataactgagcgtaaactccttgaggctgatctagaaagccaggactatcctaacctaagtaggttcttccttatcaccatctcttggctgctaagcagttgtggctgccatgtggcattatttatgaacagaccatcaacttatctttgtggcaacagaaatagaagcagagtagcaaggggcaaggagggccttggagatgatctacacacaagtcacaagagcaaatgcaagcaccaaaggatgcagccaagagaaggtggttgtgaagggaagacaaacaacatctgttttgaaatatgtgagcattatttgattagcgtttttgcagtacaaaggagggagaaaaaagaaaggaaaaagagaaaaacgttgagactcattatcttatgattaaagatccttggaggcaacagacttgcaaacacctatgtgtataatacaatgacaacaacagtaagaaaggttttaaaggaagcagaattgatcaggagagaaaaagaactgttgagtatagcaaagagtgggacagtggatggagagagagattatttgaggttatgagcagctggtgttaatgtttccagaaatattgttgatttgcttggtgatgctaagatgactgtaaatatacatcacatttatgggctttatgcctatgagtatcaaatgtaataacaaagttgggagtacttggaagattataaaattctatacacacataaggaatgattgctacttaagctttttcagctagaaaagaaaaatattctttttgataaggatacttacttgttcttccccacttaaatccacaaaggagtagatcagacagggaaaggtgtgttttgcttctcacacaattcccagagaaagagacgtgttcatatgctacaagtggggaaattggacaatttattctagataatttaggacaatgatattccagttcttctgcatgtcttagctaggtctatagggaaccaccagatctgtcaattctgttaaagtctcagtctgaagattgtttcattcctgtgagtgcctttgataaatcagcaagtgccttaatactctgtagacatgaacaaatgtaatttgaagggaaacaacatgggaaggtagggtttggagaaggtgtcatcctcctttagggtttcccagctgacattgattcaggtcaatcaattgagagagaggaaagagagacaaggagggagagagagaaagtgagggagggagagagcacttgctatattctctggagggcaagcacatatcatgtatataatttttattagataattaataagacatttctccttcactgagtataaactccttgaggctgatctagaaagcctgcatgactatcctaacctaagtaggttctcccttatcaccatctcatgactcctaagcagttgtggctgccatgtggtgtgatttatgaagacagaaaatcctattctctccttctaggttttccaacataggtgtctccttgctttcacgttgttttcttctatgtcttttcacccatatatatttttaataatagtgatgccaatgtattactttaaggacattttttaaaaatcaacacttttagagaatacacccctcactccccaatatgttttgggaggaaacatcctttctctcatctcttctttctgtggttttgttttctgttctctttcttctttttcttccccatgcatagttgaatggtcaatattgatctccacacctcctttggatccctgagtcaaatgtctgggctataagaatttctctggaggggctgtactccctccccaaggtggctgagtaacattctacatatggcaggcacatggctgcacattctctcatggtgtgggattgggtgttgattgacacagcacaaatagaaactttattttatattcccaaagctcaactcagctgtacttctcaccacgtggcaaaggatggaccaaaggctgggagcaactgggagtgtctgggtgagtttggatatttaattttgctctgatccattgagagacagagagggaagaaattgtgtggcacagagcctctggagtgtaagtgacactctgaaagcattcccttcttcctctgcggcttctcccggatctcatagaaatagggggccacatagaaaatgcctaaatttaaagtctaactggtgcatttagggaattgagggagaagggaactcttctaaactagtagaaagacccccaacatagaagtaagaaaaaaacctttaaaatacctgaagacatattaaaataaatagggctgccttgcttttcccttcctgacaagattttttatgtaaccacacaagcacaatcactgtgtctggaagatttggggactccacaaacacatgatggattcaagacagaggcttggagggctgtgctgatgggggttgaaccccagagaaagattcttgtgtagtcccatggattataacccctccccatataccatatttcattgtatctaaggatccatccagtgtaatagaggccattattttatgtttcactaagaaatacaagtagtcacctattaaattatgttatgccattgattgtaagatgcattttgattttacagatgttaatacatgaacaacttaagaataggtgaggtacagtagtcaaagatctacaaatcctagcaggcagcagagaggaccagcccttcatccagttctctttatcagcacactaagatgtatgcccagaacttccttgggcttctctttagtgagctgagtaggccttcctttatatctcacccagctggcgattagaggtggctctggccttctccacgtctcctatgcgctttggaaagttaaaattgtcttcaaagttctgagatgagcatatttgtgaaatggatggtatatgcttttcagacatctccatcttgctgaatccaatttattgttgtggcactccattgacaattctccctaatactgtgtggcttcataccccatgctgcctatccaggctatactgtggaacccaatcactgtgtttatgttgagaaggttctccaaactcctttctttttttaatctctccacatcaaaacttatctgtccgggtcctattcccttaagtccttgctaggtaactagctagttactcagggaaggaatagtgataagctaataaaaactaagggcaggctgggcatggtggctcacacctgtaatcccagcactttgggaggccgaggcgggtggatcgcctgaggtcaggggttcaagaccagcctgaccaacatggtgaaaccctgtctctactaaaaatacaaaaattagtcaagcatggtggccgttgcctgtaatcccagctactcgggaggctgaggcaggagaattgcttgaacctgggaggcagaggttgcagtgaaccgagattgcaccattgcacttcagcctgggcaacaagagcgaaactgtctaaaaaaacaacaacaaaaaaacccccaaaaaacccttaggttattcctccaaagaaacacattttaaaggtaactgggatctttttgaagcttttcaattctaaaagtaatgagtgagagatcaaaataattaagaaaacattttatctgaagagtcatattcttcaaatcagagcatatacatagtaacatgttctcaagattttacacagactgatggaaggatctagaggaggtgtaacaaatgccaaagctgctccccacccctgagcccatggaacacactatatttgatcacaacacattttcttattgagcttggacccaacctcagaatccccccctaacagaacccttaccacaaggaactggggttgacatatgaaatgaagcccattttccagccctgatatacgttttaatgggcagggatatttatcagcttacatacattttctcagtttgaagcacagtcaggtcctttccatttgggacctctggatccattcagttaaggtgaaggaaatagtaagaaagtatatggagtcatgttttcagaaatatctcagtttaaatgcagcaagacatttgtcgtaactgtcaactggagaaggtatttttggggaatagcatgtgcttgtcttaagtggagcttccccaggcaacacagacagagagaacttgggaaggctctggctcaggagatgaataaagggctagagagtgtctgtgtgtggcaatgttgaagaatggattagcctggaagggaaaaccctgatggatcacctgagactagtcatcaagtgctaggagtattactgtggaaagggtgtttgccagttttctcttctgtcttactgaagatgaggaaccttacatcagaaggaaatacaggtttgcttaaagaaagagctctcaggtaagatcacatacacaaccaagtgtttaaaatacactagatgctcttctgttggggatgactatctgtgatggagttgaggggccacaaatttcctgctaccaagcagctgacaacatgtaggagacacccccttaagaacaaatgctcccataatgcccgtgtggagactgtaggcactgctgtccatgctttacatatattgacgtattgtacccatttcacagatgaggaattgaggcctggacaagttctatgagtaatctggagtcacaccgctggcagagatttgtgatttacttagagctaggattcataccagactggattcaggctccagaatccatatcctgaatcataaccttatgctatctctccagtcactattctacttggcagaatgaattaatcccccaaaaaagtataaaggagagagaaccttcatgaattacttaatcccactcactgggacaccctagtggccactgagtaattctctgtgatagattgagtgattctcttctaaactctgagagcagcacagtagcctcatctgatttgcattctagtaaaaagcatagtcattcctgatatgaagactgagagtgaatgaatgaatgatggttgtatgtatgtgtgtaggtatgtttattcttagcatcagtctagttttggacaataaagtaggagagggaaaagagctgcttcagtcaaggagggacatgttgttatgcccatggtcttaggtagtctcagtacagccatagtcaggattcaagactttattcctgctaaggaactcaaaactcatgtcttgttaagaccttacccatcacttaactttctccataaagacctcccagacgcactccttccataccaaacacttctttctttgctctcagcctttctgaatgcacttcatataacttcaacaagaaatggcgtctaattctaagaaattctaataaagtatcaattctgggaggttgcacatgagctctccaggagaagtggcatgtcttatttctttctgtccttgctcagagttcgggtttggcccagaacaggtgtttgagaaatatcatttgcattcaactgagttgaatatttcctcccaatatctagcaggtgaagcaaagcaggcccaggaaggggactaaagcaccacaccagggttactgcaatacctgatgttgattttctttgtttagaaaagagacccctagattttgtggtcaagagattgatcacctgtgtagtaataattgcatttattagctcattttatagcaggagagatgaggccatccaatttttttattggcagctatgaaaatataattcggctcttgtttcttagcccagtacttgttcctctgtaattctattagagataaatctgagaagttctggtaagtgagagaagttgcaaataaacttatttgcatcttacaagttagagtcttcaggaaatagtatccagggtagtggttctgatgatatggtctgtgggccacatgccatgagaagcagcttgggctcttatttaaagtgcataacttgaggctgaggcaggaggattgcctgagctcaagagtttgaggccagcctgggcaacctggtgaaatcccatctctactaaaaatacaaaaaaaaagtagccaggcctggtggcatatgcctgtagtcccaactacctgggaggctgaggaacgagaatcacttgaacccgggaggtggaggttgcagtgagccaagattttgccactgcactccagcctgagcaacagagccagactctgtctcaaaaaaataaaataaaacaaaacaaaataaaataaaataaaataaaaagcataactcctgggctcctccttggaactactgaatcaaataccatgccccagcccaggaatctccatgttctgtacataccctaggtcatactcatatccatgaatttaatgggccagctggtcaaatgttttcctacagtagaaacagtttatcagatagactttttgcattaaaaaaagttcttaggagatgatttagctccgctcccttcagctactttcctaaggggcctttctttttgtatgttccttttcatctttctggatgtttaaaatgtcatgaaaaaagaataaaagaacagtacactttttaaaacactagtttccatgaacttacaatctggtctgaatcgtatatatgtacataaaaattgttttcatatacatatgaatcattgttaatttgctggactcttacaattgtgatggacaaatttgtgtgtgtttgtgttcatgtgtgtatgtttgtgcacaaaggggtcctctctggcagctggctcctctaaaatgggtcatcctgcatagaagtaatttgggaaagaatgaggcttggagtaaactctgtctgactgagtttcctttctaatgatgttttaatgcccttactttctcctacagcccctttttctcccccaggttttcccagacagcttttttttttttttttttttttttgagaaaaagtctcgccctgtcatccatgctggagtgcaatggagcgatcttggctcactgcaacctctgcctcctgggttcaagcaattctcctgacccaccctcccaagtagctgggattacaggcatgcaccaccacagccagctaattttttttttttgatctttagtaaagaaggggtttcaccatgttgaccaggctggtctcgaattcctgacctcgtgatccacccagacagcttttaatagaatcctgaggtagaatccactcagagtagggttaacagagaggcaccataaccgagtggccagaggaccgggacctgaagtgcctgaacccttgcatgggtttcttgttgattttcctgctctggctccctgggccatgacaccttcctcttcttcattttcagactctgccttgatttcaggtgcatgagaagctactcatgacatctctccaggtctgtattttgctatctataaaatttgtactctgtcaaagcatcatcaaagatgctccaaggttattattattattattttttaagtatacttagttcccttggagcaagaggtcaaatttctgccaggaaggtgctaatcaagcctggcctgttgcactattgaaacttaattttttctcttagagagaattttcaaataggattcatattgcaatcttgaaaattgaggccctagaatctgaatataatttgataaatcatctggtctagtgggcacatggaagcccaaagagataagaatttcccaaagtcacacagcaagtcagtggcagagctggtgaatccagtctccagactcctggcccagtattcatcccagagtgggaccagaaaatggcctatctcttctatggcagatctttggagcatgcccattagaatggctgaggagtaggagaggtcccaagcatcagtgatttaggttgagaggatggcatccctcaggcggaaatgcacttgaactctttgcttttcttttcaggacagacaagcatttctcacagcaaaaatcggtaattttacaaatcatattcacccaaggtctttgcaaattgtaatactgctaaaaaattaaaacatagaagcagtttgtttttcactcattcacattgctgtatggtacaccaattggaaagagactgtgagccctcctaatattatctgtgcagtgttggtacagctacctactctctgtgtgtaacattgttttcttctttaaaatgagcctgacaggatctgccttatgtaacttctaagatagttgtataaaaaatgaggctgggcacagtggctcatgcctgtaatccaagcacttagggaggccaaggcagatggatcacttgaggccaggagttcaagaccaacctgaccaacatggtgaaaccccatctctgctaaaaacacaaaaattagcccagttactgggaggctgagggaggagaattgcttgaacccaggaggcggaggttgcagtgagccaagatcattccactgcattccagccagggcaactaagtgaaactctgtctcaaaaaaaaaaaaaaaaaaagaaagaaagaaatgagataacggttataatattttaaaaattagaatgctatgtgagattgtattagtctgttttcacactgctataaagaactaccaaagactgggtaatttataaagaaaagaggtctaattgactcacagttcttcatgtctggggaggcctcaggaaacttacaaccataatggaagtcgaaggggaagcaaggcacgtcttacatggtggcaagagagagtgagagtgaggggaaaagtgccacacttttagaccatcagctctcatgagaactgtatcatgggaacagcaagggggaaaagcatctccatgatccgatcactttccaccaggcccctccactgacatgtagggactacaattcaacatgagatttgggtggggacatggagccaaaccatatcagagatttcctttgatctgataaaactgttatgtatttcaagagtacagcagccattgaaagaaaaatgaaaaaaatttttaaaagataggaatcagagagtgagactatcattcatcctcaccgtacagctttaacacaggctggctggccacttggaggtttgcatttaggtgaatgagtcggtaaccctgactgtaccccattttcagttatttgttgtcctctgctggtcagaattcaaagtataacatttctctgggatattttgtttccctcattctctgcatcttgagtggaaagctccggaagggtgcagtgattgcccaatgacatcaaattctccaaagagtcagagagccaaagtcagcctggtgagaaaacaaatgaagcaaatactaaaataacactgagggcagagccccccgccagaacctgccaaaaagatatgaagtttgattagaataattattttaattgaattatcattttaaatcaattaaagggaaggatttcaatggaagaatgccaaatcctactcatgggatccattcgctgggctgtgtgttgggagcctaaatggtccacatgatggctgggcacactcatgccctctttaataaacactctcaaaagctctcacaattgagcttcacacacagggctgcagacctgggctttgctgagccctgtaatgggataacttcgggtgattatgtggtttagtaaatatccataaattaaggatagtgtttgaagactgccaataacgacctcagtttcccagtatcccccagagaagtgaattaattattttaagagttcggggcaaaggcaagccaggacagagaagattatctcctatttcttctctcccataattggttacctttctggtccctcccagagcactggaagtgtttcacacaatctctgggtctcgacaataatgtacctcgaaaaggaggctgattatgttgactgaaatccatcctggcaaaaggcttttgctgcagctggttccatttacattttgtatttttggagcttgtgcctgttccagggagggatgggataattgatttaaatcaaattatgaaacgtgatactttgaattcctaaaaacatgtttcctggcactgcctgcagcagtggagccctcgcaggtacggtggaatgggatgggcgcgggagtgcctttcttgacccatgtgtgtgtgtgtgtgtgtgtgtgtgtgtgtgtgtttgacctcacactcctcctttagagcctgggccagggtttctttagagcctgaagccattaacagagtatggtgtccccttgtaggtgaggtacagctatcacattgccgccattcctcatgccaagtacagtcattgattttaatagtgagcttctctagtttcatctctttgatcacagagctgaaattaaagactgtacattgtgtaaatgacaaaggaaatagatggagctcagcaaaaagatgctaataactttaagacttcactgcatcacacattcattttgatttggaaagacaatttgcctcccagattttaaaagctattttagaacggtttcaagatcaagatccttaatgttgctttgctcccatctgtagcctaaattatttgtaattaagttaaatagcttcatataaatagtagacctatggagttggggaatgattgtttcacatacatccctgcgttgtgaattgccagtagcaatgacatctttgaaaagcagcccccactctatctggtgcagaactttgagtggcatttaggaaagtgattcttacttcaaatattatcactgactcattgtaggttctgggtccagccagctagttggatttaaactgcacctctgcaacttactagatttgtaaccttgggtaacttatttgtaaaatggagatcataataataccaaccacatgaggtcacacataaagcaattagagcagttcctagggcataacaaggctattatttctttcttcaattattattaaagaaatactaagactcttcctaatgatacatatttcttagagtgtttccagccatttatttgaatggcatgttgagccttgctatttccatcctcctgggttagcaccccacaaagtttcacttctcttcccttcagtcaacaaagcctagcccagggtgcagcttgggagggtgcagcatgcaaaggtcacaaccttgcatgctactttgagctctttggttcttaggagtttatcccatttgagatgcaggccactgaaaggatggatatttttgaaaccctgacttgaatgatccatatatttatttatgggtaaacttatacccataccgaggtttacccatgtatttatttgtgggtaaatttatgaacaaagatgaaactcttagaccaggagtaaatttcagaacaccagtgcttgctgtgttgccagacatcatgatccgtccagaaaagtgtgttgcttcttccaccttctccccagcaacaattccaggtgtggttctgagaagggcttatctttcagatgagtcagacttgatgctactgttgtgctcccaggggaccctggatgccttggccagtccttatgtacagccccttagccttgggaatctcaaggcaattcaggagagggctcaagagagagggtgagaaagaatatatacaactctgccttccatggtaggaactcaatgaaatggggagaaaacccaacttagtgctcaactcttaagatagaaatgtcaaataaagctaagtgttcagaatcactgttgagattcattttgatttaagtgatacatgcatataattaaaatcaatgatactagatcacatataaagagagcagctccttgcttccattctcatgactacctagttccattacccagagaaaaaaaatctcttttaatactctaaactgattcttttggtgtttatctccatactgctaaaataagaaatctttactgttttttaatttgtcaactttaggcgttatctgtaagcactttttgatgacagatagtgagttggttctctttgatcacatccttacttcttcctcctccaacctctcactatagtcatatacagattttttattaaattagtagtcagagttttcattactacaatgatataaacattatcagtgtagaagcagtagtgtactataattttttaaattttactttaagttctgagatacatgtgcagaatgtgcaggtttgttacataagtatacatgtgccatggtggtttgctgtacctatcaacccatcatctaggttttaagcccagcatgcattagatatttgtcctaatgattttaactgttgtcctattttcacacatggatttctatgtacttgtcaggataggctaggttttctttagttaaaaacaaccttaccatcttagtggcttaaaacagcagaggtttatgtcttgttcatgttatatgtctactgtaggttgacaaaagggaatggaggagggattctgtttattgtggtttctaagggtcctaggctcttagagcaaccatcaccttgaacccagtcagtttccatgccagaaagaaaatgctctggaaagcaacaaaccaaaattttaatgctgtgtcccagaagtgatatacatcacttttactcacaatttgttggccagaactggtcaagtggctccaccccttgtaaggtaccattgaagagcagttctatcatgtgtttcaaaggcaggagctaaaaatatttgggagaagcatttaagattatcattgaatcttttgttaatttttccccccaattgatctgtcagatctattatatatctctcagttttctgttttccccaaatgtgtgattttgtcatttaataaattccattaaaaaacaagaacaaaaattggtggcctcctgcataagaactgcacagctgccacaaagaagacttccctttgccattcctttggtttggatcccctgctttctgcatctccttaaatctttttccttcttgatttttcctttttaataatgaggtaccattccagcatgttcctacaaagggtacagtcagctataagatccagggaagtcgtatctgagttcttcacagcagtcttcctttccatacctccatctgatttttgatttggctggtgatatggtttggatgtttgtcccctccgaatttcatgttgaaatgtgattcctaatgttgcaggttgggcatagttggaagtgattggatcatgggggcagatcctcatgaatggtttagcaccaccaccttggtgaagagttctcactcagttcatgtgagatctggttgtttaaaagtctgggcccgtcccactttgctcccactcttgccatatgacatgcctattccctcttcaccttctgtcatgatcataagcttcctgaggcctcaccagaagcagatgccagcactaagctttctgtacgtcccacaggaccatgagccaaataaacctcttttctttataaattacccagccttcagtatttctttatagcaatgcaaaaatggcctaatacagctggataaagaattctgtgttaaaaatcacttctcattgagaattttaaagagatcatttcattgacattcacaattttattgctgctaagaagtcttatgtcattctgattattatacctttgcacatgaactgaagtttttcagtagaatctttttagaattttcactttactcttagtctgaattttcacaataatgtaccttagtatgagttttttaaaaaatgttttttcttcctggatattctgtgttcacttgggattgtggtatggtggtagggggtggggtagccaaaagatttataactttaatttagagaagtttccttgtattatatatttgatagtttccatctcctcattttttggttttatttttaaggaacttctaataaattagacattggaataatcagattgatgctctattatctccttgcttctctcctatttctcacttctccattgtctgttatttttttaaggaagtttccatgagctttttttccaaatcttctactgagtttttaaaggtttatctagcataaatttagttttcatgaaccctttctttttctctgattgtgcttcctctgtggcatccaattttgttttataggtgtaatattctcttatctttctgagactatttgttatagtttgtgaagctttcttttgtttgtttctacatcatctgtatttcaactgtgtccccctttctctgttggtttgttcttatctcttttattctggaggccttcctcaagtctggtcattgaatttctgtttctatttaagaatgaggtttttgtgaaagctttgtgggcctgtcaagtgatggacttccctgtatggtcactgggcagagagtggcatcctcattggttaatgcctcacatgtcacacatggtagtctggggatatttagtgtctccagcaaagagacctgacggcggggcatgtactttgctgtaggtgttctggggaaaggacaagtaaaggaggctagttggcagtcccacaaagctttcttaagcctccagtttttatcttcctgtgttatccttttcctttgctatgccttgagcctctcattttattccttttagaaggactacagccttctgcctggggactatgtggtgtgagggaagcgattgagggatacaaccaccttatatgcagatctctactatcacccaccaaatccctattgagacatgagcctgacccctgccttgtgcaatatccataacttttagttcctgagtctcttagggattctgttggggatgatcaccctcttcccactggtatctcttcctgtaggcacatttggtgctaattttcctaagcagctagattggtcattactcgtttttcttgatttcttttctttctaagaatgtcttaaaaattttttatctgctcatgcctcatctcctgcttctttagttcatgagaacttatacccttttatttctttctcatcattttagtggacctaaatagaagaaaagatacatgtctgtggttgggctgccatatttaactggaagtctctttaatgaaagaagttatctcatagttttgatgacagattcctctccttctcatgtggttagttctctctctaagcagtctgagccctgaacaagaagggtcagttctttctcaggaaattctagacttgggcaatggaaaactccagcatcctggcttaggagcgccattggctaatggttttaaatcataggctttttttgagaaggcttgagtaggtgttccagctccattgccttctactgatatgaactttggcaagtttcttactcttcctaagtctatttttccagtgataagatatggatgatgagagtgcccatctcctagagttgatataagaattaaataaattaataataacttgtaaagtgtgtatcatggtacctaatacataaaacatgtgcaatgatagtagtcattactatccttaactgaaatatttaaatatttctggttatattctgcctaaaagaaacttttgagttcatttcagaactctcaaaaaattgtaagctgaacctatgactttggatcccttccagcaggcactgctcttgaacttgaatttagcataatttctagaacctatagtctgccctatttagatagttggcctattctcattggaaagtttaaataaaagcttagcaatctttcaagctcagaagggccaagctataccctgggaaattgaagttagttagggtcaaaagtatgttggcaaacactttttttgtaaagagctgaataataaatattttaggcttcatgatccatacagtctctttctcagctacttagctttgccatttgagtggaaaagttgccatagttaatacgtaaatgagtgggcctggctgtgttccggtaaaagtttatttagaaaaaaatggtatcagttgggcttggtcactctttgtagtttgccaacccctggctcaggaaatggggaaagagaggtcaaaaaagaagggggaaatggaaggaacataaatatacctatggggaaataagttgtgcctctcaaatgcaatttagtgatttagaggaggtttaaggatgttgactgccatgaaatctcccccacttctctatctggtaatttttataagagatgactcttgggaaaagtaggatgaaagaaacatttttgagtcgcaatctgaggatcttaatgttctgctttttgcattgacatttttctttgatcctccttcccttggctagttagtgacttcaaactttttcccctagttctttgagagccccttaatactaaagggtaagttaccagtaatggtttggattttttactcctcctggaagaatgtttactttggaaagaaaaaaaaataaaagaacctgatagttcctcctaagaaatatatttttgtaatgtatacaatgaacacacctcatttctgaacctcaccccatctggggtgtggtttagagattgggtggggattgtggtttctgttgcaaatataccttggtaataaaaacaatgcttcagcagtttgagttgttttgaaatggtcttgtcaaaatgtcttgtttcatcaaaaactctagcttaactttataacagagtgatttgactggataaccccagtggggtatactctaatagcaaaaagatctacagaaaaaaaccacttaaactattttgcagtattcaaatttagtagtttcacatcaaattattgctcatagtgctgatattgctaccttgcagttgttgtgtgtttgtatgggataattcaaatgagtatttattttggcttgcttagaattgaggttttcagagaggtttaaggaaataaagatgaaaggtcaatgagataaaggaaaaatcctgtagtcttgaatttaaacggaaataattcatgtgatttcataatattatttcttttaaaaaagatgtattttatattctattctcaaaaaagacctaaatataatgactacaccagtactaatgtgtactctgtctctggtttctgtttactaaatattaatgccatttcccatcaagagactacagctccttggagaaaggggtaattccatgtatggagaaagaaatgtacaaaatgagttgagaacatcttttaataaagctcttggtcatatggggattatttcaaaaggactcaagagataaataatttccacttagaaaatacaggactattttggcacaaataagaattgaatataatgaatttgagtataacaaatatgtttaaacccatggttcataatgatactttaaaacaaaatgaacaaacaaaaacaaacaaacaaacaaacaagaaaaaactccccaccccccaaaaaaactcaaaataccttattggtcacctttggggaatactaggaaacagcgtcattttaaaaactgataagtagaggaaaataatcattcacctttcctgattttcctacatgttctgtgctttagaaaaccaaatagttttatgaaaagtttcttattataagataaagtaatattggctttatattgataattatcgaagttgaatggtgagtacatggtggtttattatataatctctctactattatatttgagaatttccattatcaaaagcaatacaattaaacaaaacaaagcactagcttaaataacttatgttctaaaggtgaaattccagccatcttgcagcaagaagtagaagagttaaatatttgagtaacacagccttcctgaccatctcaaaagaataccgtaaagataaacatccacttggcaagaccagcacttctgcttaaattatgatgtttagggttaattttgggtattaattatgtctagaaaactaatgttaaaattcatttttaaaaaaaactgatggatgacatgttagcttatttttatctgtttttatataaggcactgcattgtaaagccctttctttttcaactaactgaaaagatttctgtcaaatcccttagctattttaaatctcagctaccttgttggcatcaagtgggaactttcatgctttacttaatgatgacatcagacctgagacaaactagtgattcccataggaagtagccagggaataggccttaggtaggcaagtgtctcaacccttggtctcatagaactgaaaaatacctaggtcattctctaaagaatctgcctctttctagagagatagaaatggatgatcagggaattttagtgatgtggatactgttatgaggtgaattatgtcccccttccctcatttatatgctgaagtcctaacccctatagggctttaaagagataatgcaatatgactggtatccttataagaagaagagatcacaacacagatgcacacagagaagcccaggtgaagacacagagagagggaaaccagttacaggtcaaggagaggggtctcagaagacaccaaccctgttgacagcttgatcttggacttctagcctccagaattgtgacaaaatatatttctgttgctgaagctacccagtctatggtactttgttatagcagccccagcaaactcatacaagaggcttacatgagtcagcagaagaacttttcttgaagtcttaccaacctcaagagttgtgattctcaacaaaaggaaggctctgatggaatgagagttaagccaagtgatggtaggagctagaaggcagtgagagtcaaacagaaagggcaaaagccaaatgagacaaaaggagcagagtagtaaaaatgaagccctggtactcatcagacttcttgaggaaggtactgtcacctttgactgagaggtaatgtcaaaaatgcaaatgtcacctttgtataccaaggaggcttgaaggtctgaactgtacatttatattgcacatgtgggatgggaattgcttgatataacctcaagaagtgaggttatggttacattatgagtaataacagctagctaataatcatatctgaattaattgtagggtaagcaactacagtcacccccccaatatccttgggttctgcatctgtagattcaaccaactgcaaatagaaaatatttggaaaaacgaggatggttgcatccatattgaacatgtacagaattcttttcttggtcattattccctaaacaatccagtatattaattatttacatagcatttacattgtattatgtattagtctgttctcaggctgctaataaagacatacccaggactgggtaatttacaaagaaaaagagatttaatggactcagtttcacatagctggggagccttcacaatcatggcaaaaggtgaaggaggagcaaaggcacatcttacatggtggcaggcaagagaacatgtgtaggggaaatgctcttttataaaaccatcagatctcgagagacttattcactatcatgagaacagcacaggaaaagctcacccccgtgattcaattacctcccactgggtccctctcgtgacatgtggggattgtgggagctacagttcaatatgagatttgggtggggacacaggcatataatactaggcatcataaatattttagagatgatttaaagtatatggaaggatgtgcataggttatatgcaaattctatataattttatatcgggcacttgagcacccatggattttggtatccaagagggtcctgggaccaatcccctagggattctgagggatgactatttcagagagaaaactacatgattgtacttttaaaacaaaaattctttaacatgaaaaatatgtggaggtatcaattactaatatttagagttttaaaggcaatgggagcaatctatgaagaaatgtgttgtgactaggtaaattcagtatcagtttttactatctgcacttatgtttcttaacttactgtgtctctggaattaaccttcgttgttgaaatccttctcaaactttcaggtcaagctcaaagtgtccctcccccatgtagcattcctggaagctccttaactacatagcagatacaaatataacaaacctgacagtaaagtacagagaagaatcttcttgcctttatgttttctcttctagttcattattcatgtgtttttccttcttgggggttgaaagctctttgaggtcaagaactgtccttgattttttgtttagcataaaaatgcttattgagcacctactatgtgctagtcatcattctaagagtcctggagtataatagtgaacacgacaggatagaattgacttggtttttgtagctccatattgcctagcagagtatatattgtatgccaagcatcaataaatatttattaaattatattttgtctcaccttcagaggcttcaggaattaagaagcaaccctagtttggttctggtatggtaaaattaaaaagccctcaaaaggatttagactgttttatcagaatgtatcactaccacccttgtatccctctttctacaagctagtgataaagtttctgtccttgaacaaattttaatcaggctcctctgaatcttttttccaatggatcttcacttttaggcttctgtattcatccctgtattgtccaattttagcaagaatcctattaagtttagccagaataccccatcctggatttctgaccccctccgtatctgaccaggttcctcaccctccaccgcctcccaggtgatgtctggtcaccctgcctgccttcagcaagagtcctgttaggtttgtttagccagagtcccccgtcccttcatgtttgctcttaggaattttccatccatatccccctgcctcccccaacccactccttggctacaaattcccacttttctttgttgtgttgagaattgagcctagttccgtactgaggtcccttttcactcattgcaataatttttctgaataaaatctcattttagcgctttaactccttctagttctgtttttcctttgatggtattagaaggtatttagggcctgctaagcatgctgggtgcttccttctgttcctacccatcctatcccagggtgtccagctcattgctaccccttgctcttgcccttggtcaggtcagaaaaccccatcaaacatggagcaaaaccaagtaacatctttttttcacaccctgtgatctcaagtttctactaatttattgcaactaagctaggagatacgaacttctcccttttacgctgttcatttttgttccttatttctgtttttttttttaaaaaagatggttgtcatatcagtttgtttttctttactgtcctaaggtttttgcatttcaccccttgccatagattttagtataaaaaagtctgactcttttctttttaaaacaatttttatatttttatgcacatatctatgaggtacatgagattgactttttttctttgcaaactttctgaaatgtttctgattgtaatgtaatagacaagtaattaaatatggatttaaagagtgattttcttttgtctcatttcatcatcaggggaagaaaacagtcatggccatcagtctgtggggccctgtggtgttaatataaggttttgactagaaactttttatcctccattctcaaaccattttatcagtccttggaattttctctaattttaccaagggttcccaggggaatccccaccaggttttaatggcttggagacagacaggataatgctacactactccgtttcctaatatcctcctcacatgttcactctttgcatagcctctgggtccaggtaaagtgctggctcggtggctggtttgaaacacgagcctcccacacatctgctgaggacactgactatggcagggaaagtgactctccaagttttatttgggtcgtaaaaattcatgctgcgcaccgcctctttaggaatctgtgccattaaatgtggctaggtctagagtacatacactctggaggaagccagaaaggacattaaaatgcttagtctatgacacacttccttatttttgtcattttgacatttatgtgttgtttcattagggatttttaagagaagaccctttttcagcaagaagttttccccagatcaccattaagaatcaacagtttataatcaaacagctgtctggtttgcatttcaactgagctggaccacctgccggctgttaacctctggaaggttattatgatacaattgttgttgttgtttgtttaaaaagtttcagagctcaaggaaaatattagtaataagttacttaacctgcagtgtttactgttcccactcaacttgcagatggtgttccagtggccagtgagagggaggactcatctgagacccacactattttgtacttgttttggagatgaaccgtaaaaataggcttggcaatgaggagctctgcccacgtgggaggagaggtagacagcattcaaaggaaacacaaccatttctgagggctgaggttgcaagacaatatctcaacataacccttagattcagcttggtagctttcagctgaggtctggtagagcagctcattttttgagcacgtgtgattcagccatggtattttgcagcttgcctgccatctgctttcttcccttatctctacatccccctgactaagggaaatgatggctgcaggttctctcaaatagccataggggtacaattttctaggccctataaaaatccagtccctggacatcatttgcggatgctgtgtttacagggcagcctgtctctcttcagaacctgggggccagagaacacgattgccatttgcagaggtgggaaaggctctatgagtgtgtgtgtgtgtgtgtgtgtgtgtgtcgaggatggggggtggtgggggagggtacctgtaacaagagtaaggaccactgaggacagtgactggctggaatcggtgttccatgaggaatgagatttttttctgttttatttcattcttcatcctcaatgcccagaacagtgaccagcatatgatgagcactcaataaatatttgatgaatgaaagaaagaaagaattaatgatcttttcttttttctattcacctctttgtttatccccccaagtaataatgaatagtagtcagttaagtgtggctggttgactgtcagcactggtgtaaaacaaaaacaaaaaaacaaaaacaaaactgctaaaattctttctggctatacattttagtatacttagggttgaagatttaggcaagagaacattcagggactgatttgggatgatttgtgaggcagaatagaatgggagaaagaattcagacttgggtttggagctgcagtgtacctgtttcttgctctgggaacttgggtaaattaattaggctctctgattcttagtttcttcatgtgtaaaatggaataataataggtattctacaggtttttatattagagattgtataggtaaaagctgcagagaatagaggggtagtaaattattataattattaatagtatattattactgtactatcaatactattatactatgtaatatcattatactattatagtataatagtatcaacactattgtatatcatgtaattgtatcaatactattatactacataatgtcattacttctctcctttttcacactcactgcccaccaaggaattaacttcctctgggctacagcattttgtaacagaaactgtccaggattctctggattctagttctatctccacgggtggctaactgtataacccacagcaagttgtttaatttttgaacttcactttttgcatatgtaaagtgaagaaaataattatgctgattctaacaggtagagagcattcaacaaagtagagctatgcaaatggttactttgcaaagtttgtataaccctgggatatttaatgtgaagctacttggtcaactgttaaatatcatgcaaatgtgagttgtatggttcagttcatttcagccaacacatttttattgactatctactatgtaccagatgctgtgctaagtgcagtgttaggtacagagaaataaggcaggacacctatttctgaggtgctcttaatctggtggaggagataatcacataaacagagcacagttatccctgtgatagtgaagttcacgtttgttctctttgttcactgttccatgctggcacctcaaagaaagcatcttgtggagatggaagtggggacacctggtatggggtttcaccctcctcttgcatttgtacggagtcagcagtaggttgtgctgccttgtttcttggatggcaatagaatcattgtaggatactcatgtgaagtcaacaccttcaccatctcatgtctttgcttgggaacctgacagtgaaccgtgatctcttcttgaaagtctcccaatagtctttgcttccaccatgatgtcatggggagattactctgaaagaactccaatatggcctatgataaatggatgaagagtgctttagggagagagtccatatcttctccatttataagtccttagcaccaaatacatgtacgccaagggctagaattcacaactatttgttgaatgaataagtgatagaaactgaattgactcatcctctccagaattcccactctccaaaacctttccactttgccttctagaatccccctttagggataagttctttcttttatattctcaatctcttccctaaactggcatccgctttctaatccagctaaaaaacccaggtttcccctgaacacatggctttctgcagctagtttccaccaccctcacatgacaggactctggtctgggaggtactttggcgatgacacttccattatcattttatatacaaaattgccttttcttctctgacaattatgccattcaattaaactgccctctgcctctccttgttgtaatatttcaccttctgcatgattctttctgtttcactgaaggcttctttagtcttctctatccccaagccaagatcttccatcatccacagtgaaaacatcatctgcgtgatgacccattaataccctggccactcagttcctttatcacttcagctcctaattttagcctcttcttggttttgtctatgtatcccatggttttctctgatcttggtgtcacccactgctgttttgctgatgaaaccactgccatgttacaatctaaccatgtcttcctctccatctggggctctcagagtccttgttattcaggtggcttagcattttccagtcctccagctctctagtttctcttatcttcactttcttccctaatcatcctagtctcatggtccatttaaaaccactctgttgcaagcctcttcaactccttgggttcaatatactttgatcacataggctaagtaaaactctcaattgtgaattctcactatctgtcatctccatgccagactgctgagtaaatgggctgccaaaaattaaaggtctacaatctcagtgtgcttggcagttctttgtattttcctaatcagctgtgtatctctttatcctatttttcatgacatttatgacaaagatcctccacctagccaaccatctccttcctcttagtagatggcattgtatctgacttcccagagaaaatagaaggtgcaagatagtatctctctatcttcctgccaccaaatcgacttatctgcctgtatccatgcctatcttgcccctaccaagccagcctcctctctgctgagggaaatctttctaaaattcaaatatgaccactttgctccctgcccaatactccagatctaaaatggttcttagtgatctagctcctgtttgcccttccagcttcatttatgactaactcactacctataccacagcctctactttctaactgcacagcttttgaaattattcatatgctcttacctcctggccattgtatatgatatgccttctgcctagtattttttcctctcttcctcaccacccgtgtgcagctaactcctactcatctttgatgtttcaagtaagatctcactttctcaagaaacctttcttgactgcatcaagccaccaagtattatgtgcacttcatctgctcctcttcttctgatttcagcacttattgtgtattttcattgcctgcttgtctttcaaattcagtaagatccttgaaggcaagggctgttacttactttcctttgtctccctagcatatagaagagcacttactccatgtgtgacactcattaaatatttgcaggactaagactgaatgaataagataatgtgttagctatatctggaaagattgaaacttggaagatagcagcataaagaaccatggaaaggacatacctggcggaaggaattgactgagcaaggtatcttatggggcaatgtctcaagagagggcagaaatttaatgagatggatgaatagaagcctggagactttttgagatttataaggtttgagtttctggatgccactgagcagaattaaactaacatttcagtggaccaacaacagatggttgactggattgatgagttgtctaattaatgggtcagttcagtgatatagtacaattggccaggaaccttagattataaaactcagtgatggtccaacaaatgtcccatcaatattcttaaaataaggaacagttaaggagtggcagagtattaaatctctctcaccaagtctttaattctggaaaattctcagtgattgtctcttcatatttagcttctatgccatttccttcctcctttttgaaactgggatattagggcagagatctaaaaacatttctgtaaagggctggataaataggctgtgtcgcccatttagttcttgtagcaactattcaaccctaccattgtagtttaaaagtagtgatagatctactctctcggctttgaactgcaccccccaccccgcccccgcccccgtctctgtacaggggagcttcttctttctttcttctcccttctttcttgcctattaaactctccctctctgctccttaaacccaccccaaaaaaaacaaagtagtgataaacaatatgtaaacagaccaacgtggttgtttaaagcagaccaatgtggtcattttatttatggtattcattatgagactaaagttttatttatgaataccaaaattgaattttcatataattttcatgtgtcataacatattattcttttgattttttccaaccattaaaaactgtaaaaaccacttagctcacaggctgtacaaaaacaggcagagggctgagtttggcctgtgagccatagttcactaatcccagcattagagcatctcaatctgtaacctgtatttcttagctattctctcctattgttccctggatttctctggggtttgttctggatgaattcctcaataatatcttccagttccagaattctactcttgatcttgtccagtctagattttaacttgccttacaagtttcttttataatttctgtgactttatttttcatttccaagatttctaattggttcttttgcagacttacatgatcttatattatttctgcctgttcttgtttcacagtttgttgtctctgatttttgtgtgcgtgtgcatttttgagacagagtcttgctctgtcacccaggctggaatgcagtggcatgattatagcttactgcagcctaaacctcccggactcaggcgatcctcccacctcagcctctcaagcagctgggactacaggcatacaccaccatgcccggctaagttttgtattttttgtagagatgttgcctaggctggtctcaaactcctgggctcaagcagtctacctgccttggcctcccagagtgctaggattatagtcatgagccaccatgcctagccttttttctcttaaataaaggctattacttcgtttttaattgagtactttaaatacgcttattttaaagtctttgttatgctgttctataaaatcaattttatctggcatgaattcatactcctattgctaatttttagctacttttcttagcactagattatctaatatattttggaattttgttatagagactcattttgagtgggctcctccccctcccctcccctccctaccacagacacagagacacacacacacacacacactcacacatacacacttctctcccttagtgatcacctctccttgtctagtgggtttgtggcctccgccttaccctcctccgtctgccctaaatttaggatcagatcttgtaataacagcattttagtcttctccttaagataatattaagagtgtggcaaagccaggcactaagccagtggatggatggcttagctcctttcttgtttgtgaagctgattatatctctgcctagctccatgggcccatatccctaatgctaggcacaatgtggtggtagtgtccctccccgactttcagtttcattttgtctacagggcagcctcacactagtccctagcttcaacctctcatttaatatggagctgggttcctggctctgatgcttgcttccagacctggaaccctgttggccagttgctatagccaagcccaccactttgcatttctggcccaagaatgtttatcctactactgagctcagttatgtctttggatgatttctgaagatttggagagagggattgcatcaaagtttctcactctgtatcatcttgaccagaaaaaaattactggtttaactgccagaacgtaagcaacttgagtgtagagcatctgtctatcctcttggccactatattgctggtattaagcatagaatagctactaaattaatgtttctataatagatgacaaagaaataatatagataattaatgaacaatctagatatgtattaaaatcaaatcttattctttatgcaagttgcatttttttaatgacaagcataattaggaccatacttactcatccatttatcccatgtattcagtgcttgcaggagatatttgtggaagtagggcaagcccatgtattcataagttactcttctgcttcctattagcattagtctttgcacctgtgagaaaaataaatagaacaatgtaaatttaaaaaatgccaattatcactttcattacaacattattatgctaccagtaaggtaaaaataaagggagttgacgcaatgacagaggcatttcttgatgttcaattacctgctcttgccatattagaggcatgcatcaagaccttaagtgaagttctatcatttctgtgctttataaagttgcttcctgttttagttcaaaagcatttatgtaacatgcataaccaggtcttgaaccccatgtcaagacctctgtgagtgtagcagtcctaactgtctacttgggtaaatggtctccaactatccccattggcatactagcgttgatggattctagagactagaagcctggtagactggcaagagaagaccgcatattaagtctaaaccctctgttctcccttctttgtttaatttggcaagcttacagaaacaaatggttcttctgaattctactcttattgggtcccagagagtaaggagttgccacttatgttgagaacttctcaacacattgagagacagctgcatttcttgggtaagggttacagtctgtctactgtttgtgtctctgttaggtgtgggtggagcttgttaagtccatcacaggggagatttatctagcagagatgcagcaaatatgtgttaggtattattattaagagctagtttgctccaattctaagccatgctaagtgctgaagaacaatttatattgccagctacaatagtaatattgggagcttactgagatggcagagtaatcttgttagctatactacttttctatattgaaaacataaagtactctgcatcaaatcatacaatctacattttccctttctctctttgattatgaactattactatgctttgccataaaatatgaaagttttacattttgatagtttttcaaacactgattttactttctgtgcaaatacttcatatctttccagcataattatttagcagccttttcgggttaattattgtcattaacaatatgagtcctatgagggaatatcaattaaaatacgcacagctgaactttcaaatgagtaaataatttagttttggaaaatgactggaaacagcagggtaacagtcaaaaggggaacaattattttaatgcttatttgacaaatgagtcatttttacagcaaattagattcttatcatagcacccctactggttaccacaggaaagctgttaacatgagtttttaaaataaaagctgttaagttatgcatgcaaagttaaggaaatcatttgtatgacgaaaaggtgattaggatatgcattgttagctgatggaatactgccactgggatctaattagggccataaatcaagcaaaatgatgtgtgtatatagggcttgaaacatcagagtgatgtgtgccattgacagtgagatggatgacttcccccacctctgactttcatggctgtccttgtctttgtgctggccagaccctaaagtcctacttgaagtaggatggagactgagccatgggaatttcccacttgtaaaggatgccatgaaggtctccaggatggactgtcatttcttcccattaggaaaaagctcaggaaaaccagaatggtggcctttaggataaatagctttgagatgagttccaacttgtgctttgtcagcttaacttactttttaaaatttatttttgactcagtaatttttagaagggaagaagaaaggaaacaaggatgagagaaagaaggatgaaggaaggaagaaggaaaggaaggaaggaaagaaggaaggaaagaagaaagaaaggagaaaaggaaggaaggaaagaggaaaggaaagaagaaatgaaggaaggaaggagggaaggaaggaagaaaaaaggcaggcatttacagaacccatgtattatttccaagatataaatagtacttactctaggcctcatatcttgagttcaacccagagttgaggcaaagcctatctgtagagtttttggagttctgaaagtagatgcacacatgcatcattttctagcttttgctcatgtgtttgaattgcttaccccatcatgccatggacatcattctgtgtcaaagattgaaatcacttttctcgacctgtgtgggaagttgagtggagtaaattggacagaggctgcctactagtcataaaaatcaggctccaagaaatgttctagggaatcagacccccagccaaattatctaggccaatcccagacctgtagtgtcagcatcaccacaggacttgttaggaatgcattctcaggcccacccagaactactgagtcagaatctctggggatgaggcccagccatctgtgttttcacagattctttagttgatcctgatgcatgctcaagtttgagaagcactgatctaggctagtccctggaagatctaaactgacactaattctttcagatgattataaaaattattccaagagctcatcaggacttaagtgcccttatgagacatcaaccctaatacacttcacttccctctgctgtttactgctaactataggtgtgaccatacatctttagcttaatgtttcagggtctaaacttttcatgggggaaacaagggaggaaactttgcctacaaggaggcagagttttggactgattaacttgcaactctgttacaagttaaaagtccttgatttgtcattttgagtatggctgggaagattacaacacagcaagaatacatatcaagagacactttcattacagtttttttgaactctctaaaaattgtcactctgacttatttcccccttgtgaattttctgtagagagaccttaacttcaggctctgatctttgcttggtaaacatctacacttcaagtttaaagagtttactttcaaggaggacacacttatatcagctttttgagagctcttagccttggaactaagtagctctgttcctccctcctcacattgccccacccagtgggattttgacttcatccctttctcatcattgagaaatatgatgcttgtgtctgtcttgaaattcggtccaaatcacgttcttttattatgagctttttgcctcccacctaatgctagacttgagtagtttctgttaactatttggtgttgacggaatgaacttccccacccaataatttcactaaaccagttctgcagaagctcctggctcattgagatggggttgagagatggggatgagggaatggaggggtcaagtgaggtgtataaaatttttagcagctgctaacctgggggaggcagggatgtaggagagaaaaatttatcaaggccccagcagaagaaggtggacatggggtaacattttggaaatgcttatttcggggagcaaagtttaggagtatctaactcatgtctaattttgccttgaggaaggccatgaagatcatctttatttgagcttccaagatgtgtcacttctctcacatgacctctctatagctaccactattttccccaatgtcttaaaaagaaaaaaacaaactatttttcaaaagaatcaatgtgtttctagttagctagcacagcatcagctagtcaaagacttttatttcacagatggggaactagacaaaatgaaggccacatggctgggcataaactaggctgtctgactcatggctcagtgtatcacaggggcttccagcacctggcaagaccccatggtcaccatctgtattagtcagtgttcttcagagaaacagaatcaatgggatatagagagatacatattagaagagatctattataagaattggctcatgcagttatggaggctaagaaacctcacaatctgctgtctgcaagctggaaaaccaggaaagttggtagtgtcattcagtcttagctgaatcccaaaaacctgagaaccaggaatgccgatttctgagggcaggaggagatgggtatcccagctcaagcagggaaagcaaattcacccttcctcctgactagtcaggtcctgtttagtcacgtcctcactagattggatgatgcccacctatattggtgaaaggaatcttctttactctgtctgctgattaaaatgttgatttcttccaatcaccctcacagatatatttagaaataatattttaccagctatctaggcatcccttagcccagtcaagttgaaacactgcacctaactatcacgcaatcatagtaagtatcatttagatgattgaatccctagaacagccctagaaggtagttcttaccacacagaagagggactgaggtttagcgatcttatagaactctccctttgtcacacagctggtggattatagagcctggactttgacaccctctaatgaccctaaagcctgttcatgggactgcgtcattgtgtgtccatgtggatgatggcttctagataaaatgagcatcacaattcgttttctcaatttttctgttaatttctaggcctcatactttagaatatatatgctcgatcatgactagtagaatgtgaaggaacagttttaaggacaagagttgtagaaattcatacaattaaagattagtccagttagaactccttgtatgtacataaataaaggtaattttaaagactcagttcttcctcatcccccaggagattttccccacagaaaggacccttagaggttccatgtttctacatttgcagaattcttcacttactctggctttctttggaagggatctgacatagccacatatatttagtattttacacaggatcctgctttgacagggaagtcagaattcacagataattctggtttatgttaaaacatggactactgttagaattgtgttaattttcagcaccccaggcagactgaaccacatccactctaaagaccttgcagacagaggtagtgctctggcagcagctcaagaaaccaataaacactgggagagacatgatttggatttgaggaagccattcaagcctagggccttagagtggccatgagaaggactgtgtccctcagtgtcgttctgcttcttggttcttgctgtcaatttctgctcaactcaggccacacctcccccatggagacttccaagatcatatgaacactatgaccaaagtattggaattcttttttccttttgtttctccccttcctcctctcctttcttccctcctctcttccttcctctcctcctttccttccttcctgcctcctcccttccttccctcctcctttccttccttctctccttcccttccttcccttccttcccttcctttctacttcccttccccttctccttccttccttccttcctttcttccctccctcccttccccttccttccttccctccttccttccttccctcccttctccttccccttccccttctccttctccttccttgcttccttccttccctccctccctccacccttccttccttccctcctcctttccttccttctctcctcccttccttcctctcttccctctcccttcctactgtctttcctttccttttgcccagtttctggttttgtctcttctctttctctttttcccgctttcttaatttcattgggctttcaagaatttcttgtttttaaaattccacactgaagaaatagtttgtccctgcataaacagccccagcgatgagagttcagcccacgagaagtggagctgttggtatgggtccactaatgaacagtttaattatgagagaacccattacactaagagtgtctcagtggtccggacgagtgaatgctggctgatgtttggagtgaagcagacatgtccactgggtgagccccatctgtagtggatggtctgtgtgtgtgactttctggagctttacattggatggtctcttttagatcctggaaattatatttataaaacttcctaaacattactttcataatcccaaacatggtacatccgtgttcccagtgctttttagaacgatgatacctagagtcagtgtatgtccccttcagctcttaaatcacttctttttggcactttccctttccctctcttagccctttctggttttcagcattttcatgtcctagccaaccagaaccttccctggcatcattagccctattgcccttgccggtgtctcccagttaatcaaaacttatctgtcttacttttttgtcctcaaagtcctactgagtaactaaaaccaatatgacaaatcaatcactatgcactgtgaatgcctggttgccattaattagcaacacactacattttaaggaactgctacaacagattccttggcaattcaagagtaaagggatttttcagcatgcaaaaacctttatacaatttcaggattatagagtataccatctgggctgccatattattttacctaattgctaggattgacctcagtgacatgctattgtttgctggttttgtttcctgctggatggcacctgtttcaatgtaagagtcaaagcaatttcaattcagccttgttggaaagatttttaaagaacatcagagcagcctttgaggtagctgaaaacctccatggaggttggatgttcatactggcagtgcccctggattggccccagggtttccagtgtatatgacattaggatgggtgagggtgcccttgattttctgctctaggaaaagcaagaggtcatccattatgctaatgtgtatggcacctcttattgattttgagtatcagtggttacattctcacatgtggattcgtgagacattttagaatttgtagctaacaggcatactatgagtataggggctaggaatagaagcagaatgaatattaattattgaatactgcagaggccatttcttaccctttgcagtcaatcaatcaattaatcaaacaatccacacatcttgatagaacactcatttcacaaaactcaaggtgatgtaaagccatgtgcatactagaaacaagtgtcagatactgttcttatcctcaaggacctcatagtatgatgagtacaggaattcccaaacaagtatggtgtgaggtgggattaaaaaggcaatggacactcattagaatcaccagatgtcttagtttgtgttgctgtaaaagaatacctgcagctgggtaattcataaagaaaagaggtttatttagttcatggttctgcaggctatacaagaagcatgacactggcatctgttcagcttctggtgagggcttctgtgctatgtgaaaataaggtggagaaagtcaaaggggaacaggtactcagaaagagaaactaaaagccgtggggtgttctggctttataacaacccactcttgtgggaactaatttattttgctgagaaccaatccagtctcacaagaatgagaacttactcactattgtgagaaagccccccaaacccattcaagagggatccatgcccatgacccaaaggcccccactagatcccaccatctcaacatcaccactctggggatcaaattttgacatgagatttggtgaggacaaacaaaccacatccaaaacacagcacctgaagagcttttttcagactatagctgccttggataaaatcaacagaagcaaagactccctgacatctttactctgaaagcacttctcaagtaattctgatgcacacctctatttaaggcccatgggtgaatgacataaggtgcacagtcacgtgaaaggttaaatagcaacatggatcataggacagactgcctggtgctctgtgaaggtcagtgaaagcccatggatccaactgtctgaaggccttggagacaagaggtttgagttggactttgaaggacaggtaggggtaggcttcaaacagaatcaagatagaagaaatacatttcttcctctttattattcattattatttctcaaatttgttgagtcactaaaattgacattttatattttcaaaaaggcaaatccccagctctatcccagagcaataggatcaagttttctcaaagcagattctgggaaattatattttaaacaactgcccaggtaattccggtagttaagcaattttgccaagtactgccctttatcttgactgcaggaatcttattaagattttcagattgtgtctgagaagcaggacgtaaagcaatatggtatgaagacttcactcaagagtggtagggatcatcatgggaggattatgagggcttacaatatgagaagtcttccatgacaattcataaattttgaattttgtagatacaagagtgcctttaaactttgagcaagggaacgtcaagataatttattattatgcggtagagtttgagtgactagtctgatagagactccaactgaagggacgggaagcaggagaaagaggcttggatacctcatatcagtgtgcgaagatatctgctttagtgtggagtgaagagcccacaaaagaactgcagatgtcctaagacacaggatggaactcataggcagagggtcaacaatggaataagcacagttgctttcctttcccatcctgtgtagagccctacagggaactgagcacagttggacactctatgggtcatgctccaggagaggaactctgatctcttgtttctttccctttttatagggattttgggagtagagagaccctaaccaagagtctgagaatggttgaaggtgccctgctaggggcatcttggagttaatatcagctgcttagaggagtgacacacctgtgtgaatagcacctggagacttagtggcacgacgaaactgttgggaacatggggagccactgggctagctagctctttcaggcagtccagaaagagccgccagggatacctaattttttgctccttgagtagccacccaagtttgggaagggatggtggcttgggaatggagagtatactttttctctagtacttgtccttaatccaaatgttgtgcagttctgtaaaggaataatcaagagagaaaaatttccaggaaatcatttgatgaaagtccctcttccgtcatgggtatttctacagttgagacaatttctgagtgtttttaattacaggagtccacaccttcaactaagctactcttcaaattccttctcaggcaaactcctcactttgtaaataaacttgtagtcacgtttacatgaaagtatttaatatattggtgtcatttctgaagatggcggcaaaagaaaatagacaggatcttcttctgtcagttaggattgtgttcagttgcatgcagcagaaagctggatttcagtggcttaaacaaattagaagtttgattttctcactcaacaagaaggtcagaagtgagtgactgctgaagttgattcagaggttctacagtgtgaaggattatatctctgaggtccacttggttggcctttctcttacggtctgcggcaggtccagccatacggtggtgttcaaggcaggagtgggtaaagggagaggagacacattggcactatgatcagaagagtaaaagcaggaaggagcctccacctcccacattgagggtcccaaccctcagtccagacctgggcacacagtcaccctgccttcagtgaaggttgaggaaatgagttctttctctttccaggcttcatggagggaagtggtaaggaagaagaaatgcgaaatgacttctgagttgccaaatattagtgtctgccttaccaatcaggctcaataaactagagccgcaattctcaaccttggctgcacatttgaatcagccaagggagctttaaaaatcctaaagcattaaccacaccccagacaaatttcattccagtctctggggttgggatacatgccatttttaaaagctccttagtgagtgcagtgtgcagtgaagattgagaacctctggtctagctctcccgcaagggtattttttaacatgttctccagataatattgatgcaggtgatccccttttgaaaaaacactgttaaactctcattcactgacaaatttatttatttatttatttatttattcagacatatgtactgaatgccttccacatttatggctactggagaagagtaggaatggatttatgctttatgctcttcaattacctccaatatcttcagattgtatagggctttaaaatgaaaataaaacacttttttatgcactatctcatttaaactgcagagcaagactatgaggcattatgatttcagtttaagagctgaagaaacttgatacttaaggaggcggagtgagctgctccaagtcacttagctttgactttatgtgtgaaagacgtgtcactgggaaaggggttttcagaccccacattcgatgctctatccactggaagacaaaacccatgcatatactacagctaagtcattgcacaaactgaaatatattttgcaaatgtacccaaagttaatgaggtagaaatatgaaagatagcaaatcttgattgaccaagtattagctaaaaacaatgttctcagtgccatattatatgcattcactcattggaatttcataacaagtctagtggagaagtattttattttcactttgctcacaaggaaactggatgtttaattacttgtccaaggtcacagtattagtaagaagagaagataggatttgaacccatgcatctggtttcaaaccttcactcttaactcagagctgccttgtacagttgagcaggtttttcactgcctaaagaggttcagcttagagggctagtgggaactgaaattcagcccaagctcagttcaccaagtctctactctggcgcaggtatatttgctattacaggaacagtgtttctgtaattcccatgtaggcaacctgtggactatgtgattttcaggcttcaccattacctatgttgccattctgtacatgacttgatttcattcattcctcaagttgctcatccactgactcattcacaaatatctatggggagctttcagggtttatgcccagttctaggaaatcttcaggagatggtgaccaacacaggctccaggcctttcctgcttataaatgtgcatcatactcattagattttattagccaatggtcataaatcactatctacacatagcaagaaatcagagagttcagaattatgatgaaaagcaacaatctcccaccctgcacctgcaccctcagccctaccatggaggttcctttgactgtggatttagacttgctaattcataaaacatcctgtacctcaaagatgctctcagtctgtctacccaagtcctgtttggccaagggaaatcaatggggtttaatcagaatgcatagctctagtttcccctgtgcaggcggggcctcagaaactttaaaagagtaaaatacactattactttctatctgtctttttcttcaccctatccttccctctcttcttttctctatcgttgccgtatactttgcacctaggatggtgttgagcacatggtaggcatttaataaacatttgtgaatgagtagaagaaggagtaaatgcgtggctaatttttgtagcacccaatgttaagaccgcttttcatatagctaatctcattcaatcttaataacaagctatgaacttaatcgtatcactaatttgaatccatcatatgtatatacgcaaattgtgtttcaatcacataaaataacttttccagatggtaaaatggtagacaagatgcctgaactgatcctccactgaaaacaacaaaatatgcagaataaaattttaagaaatatttctataatttttccatgagcttgcaagaaagtaaggaatactcagaccaaaaattgggtgaaaataggagcccagagaggtagtaaagtccagttactgacatgaggtcacttttctgggtaaaactgagtgtagtttttgaggcctcgtggggcttaataagatttggaagacaaagctcacgaccaactagaagtaggaatctaatagaagaccctctggaaagctggggctccgtgagactatactctcagtgccaggatacattaaaaataaaacaacctctcagttcactcaggggacctcaaaacaaactgtcacaaaccttggcactgaactaataagggaaaaaatttctttgaaaatcgataaccataagccatttctcatgaagctttacagatcaaattgatatcacctcagtggcctaaaaactctcaagctgatgaaattaaaaaaaaaaatttccagtagtggtaatgtttccattcactgagagaacaaatataaatcattatttgaaaatttcatcttaattctagggctcaaaattttttcacaggtaaaattctgagagtaattagctgtttacagtcaaaaatcattaagtaaagtttacaaagaagacattagcaagagccagcagaaacaacagatagcacaacaagacctttaaaaaaccttcagattttggaaagatccaccacagaatacagaataatatcttttataagatgaaataaaatattactaaagagtaagcagattggtaaaaagaatttctagaagtaagaaatatagtaatattctaatgaccattttacactgaatgtcatcaccgacacattttttataccatttccattataaggtcttaatttgtgtgaaacattctgttgatacaatatttggttaaggcaactccatttttttagctaacatttccatttagctataaattcatacaagaacacgacactctccaaccatggtgagaacttatgcatggtctcagttaatgacttgatgatagttcctgggaggtaattcagggtgtgaatgtttattcacttacaagatggtggtagtaataccatcttcacagttttgttctgagtagagtgcggtgattaagactttgcatactggagtcagaccgactgggctcatattctgtctctattacttactagctgtgtgaccttcagcaagttttaaaatctctctgtgccttggttccctcatttgcaaaaaaggggataatgatagtacatgcctcacaatgctgttgaagggccaagtgagataatgaataaaaagtgctttgatgtagtgatcacacaatagaagctaatggcttttgagattatatagactatgtagtgcctggtacatagaggcagtccaaaaatgatattctgttatatattattattcttaatcagacattgttggaattcattttgttaaggatgtgtctattaattttaagctggaaggtttcttccagttcaattagtctaattgtctaacttcacaggcaaaaatactccagagaggttgagtttgtatcagaaacagccttcttggcttctagatctgtggaaatggcaatgaaggagagggaacaaaatgtaaggattttattggtgggtgaatcaaacctttatttctctgcaataaaaagacaaatttgtgtctcagttgggtttttctcttatgggggcaggactgtcaatgggactggctggaattgtgggaaagaggcaggggttttagaggtgctgaatatgtgagctgctgtcaactgggagtatgacttaaatgtggctggatattgagcccagttcaaagaattgcaggcaagactgggctttgagaaaagattaaacagaaagaagaagttgatgagagactggggaaagggaggtagaggaggaagggcgaggtggtggagaaagagaatgtagaagaggaataaaaaggtttagacattttatattagatgaggattacctctgtaatttattaatatttaagtcatcccattttcattttcttctagcggctgagcatatagttgttttgagtttgaatggattgtaaaatatatcccaaagcaatatggaaaactcctctatcatgacacaatttaagtctctgctcaaaaaaatgatataattttttttttgtagaagatatctgctatggttaagggatataaatgcctccagaaaacagtttttgaggtttttgttttaaaaaaatatcactaagacagttcacaaggctgagagatctaaccgtattttgctaaggtagatgagagctttatgtaactaattaagtcctctatagaaattagttttagcaagttctgccagatgcccttattggatatggctgaatggggattaggaaagttaggacaaaaatgaataaagtgaaaacttagctacttgtagttgtagagaaacaaaaaaagcaagcttgcatactctctattgccacatgaaaaaaaaaagaagaggctttgagcactgaattcattccattagcctggatgaggtgcatagaatatctgttagtggtacagaaagagaatatatgggtgttagcaagacccacagggctatttcaattcaaagaaactcagaagttttcaacaaattgctgagaagggattttggtgccaagcttagcaattcagacaaggcaatttaaaaaaagctaagaatttgtggagaaggtacttagttgtactttagatgttcatttctttaaaagttgatataaaatataatctttgtgatgattcatttaaacatggctattcgtgtctcacatatggaagacaattttctttctacttagaattttcattctgaaggaatttatcttagaggacaaggaaatgtattattaggtaactgcaagtgtagctatttttgatgtgtccatggtagagaaaatgagttagtaaagaggcctaataagtctctaaagagaaaggtgttagtagagatctacttttgaatgacaggcaaagccaaagtgtttattatttagatcaggtgactgtagcaggactgccacttggtggcagcatgcttaaaatgtgcctacaaatttttgaggggggtgatgaataaagttcttttaaaagttgaaactgtgaaataaaggttatgaagtgacaaaaacattgtagcagtagtgcttggatggcttaaacacagccaagaaaatataaagtatctcttgtactactaagaaggaacacaaggctggaagagatttcttgctatattctgtgtagatctttaaattgtgtctgtttactttggggttttgcctcaaatttttaattttgcatatctataggtcttacatttgagttacttaaaaagttgtcacttttcttccttttttagaagggtagggagaaaataaaacttgagttatgattaatcaaccttttgtggaccaggggaaattattctctcttttggcactttaatcactgaatagcagaatttaagtgaagaaaaaacatgaatatttactttactttcctctagagaagaaaaatatttcaatgttgcttgtttttgtttgttcttaacgtggaaatccatgagttgaactaaataaactattagcttgttttaggcttagctcaaagcatattttgttgtttcatacatttctggttcaataatatgagaaaaatatataaggttaatactgactgaatcaatttatggcactgggcctaaatttggtgaaaaaatatttcagttggtgactttactgaaaatgttaatatttgtgtttgctgtattttatcctagcttgtattgttagtttggtagacttaagtccattttacgaaataacatgaatgttgaaaatataaatatagagccataaaaacacctttaatttactatgtcctgaaaaacatgattttagttttgctggtatttatcagaatgtacttagtgcctctcagcctttttgtccactgtaccacgtgatgcatctccaagtttaccgggctcatttagttcctcctcaccctttaatgaaggtgagcctgaggtgcagagtatcagtgcctggctcacagacagccacctccttcctggggcaacagggtcgggttgacaaattctgttcacaaatcaagcgtggaattattatctagagcaagtagttggatgatgatttgttatgtcttgagaacctaccataccacgtaagtatctcacaatagagtaaaaacctgaaaactctctcatcttctgagatcaagacatggtgccttagtgacaaatgccctctaaaatagcagggaaaaatgattatttaaagccaatgctggctttggcttcttctgtcttttgtgtgtggggggggtggcttaattcccctagctgagcctgatggggaggcaggaagagagaggcctggagcagattttacagtatgtgcagagatttggggtctgacagggtctggcatggggcaggggctacagacagtggagttattctgcaaaacaaaatgaaaggattctgggggtcactagagatggggggagactggaaggagagaggagagtaaagcatcatgacagggtggccaaaaaaccttcaagcaatggggatctcacgttcagctgtgtaatttgcaactctgagctgtaaacatccattatcgctacagatcttcagtaaattctgcaatagatacaaattctctgtgtgcatgctttttggttttgtttttttgtttaagctttgcggaaatcaagaacagtgctgaattccctaccagggtcgatgcaaagggtagagaagggttcagccatagactcagggctggtgtgatagtgagggtgatcagctcacaggagaaggccctcaggccagcagtgcccatataaaccccagggaatgtgcaatccaatcttgggggtgggagtggggagacaggaaatagaagccctaagcttcaggtttctctctctgtgtgtgtgtgtgtgtgtgtgtgtgtgtgtgtgtttgtgtgcgtgtagatggatggatagatatggacagaaaatttccaccagtatgtgactgtcacgtgttaattaagaaccctcactgtccttagccccatgttaagtaccggtaatggcataaaaagtataatataatacttgggcctttccctgaagagaccatgagccaagatgagaaaattgatttatcacatgtgatatggtagcaatatcgctttatattttcttgtacagtaaaaacagaaagtgctgaaacaaaaacagcttgaaaaaaaatggacacagtactatctttgtggctttcctcgaagtagaatttgagtcagcaaaatgatggaaaactttgttcagggtcatgaatgaggctttgcatctctgtaggacttgcctttttgcccgcatttccttaacaaactctagcaaagaataatcagaattagcaatcatttcagactgaagaatgatgacttagagtatcatctgataccaacccaatgataacagagtatcatctgataccaactcaagtgtattggtcaccttgtttggtcagtctatgtccgtgattcttaacagaggtggcaccaccctctaagggacctttggaattttgcaggaacactttctggttgtcacagtgatcagcagccaggagcagcctgcaatgtgaagacagtcctgtgggacagtcctaggctacagggaactgtcctgcatcctgcatgtcttataaacatcctactggacgtcgatgtttgtaagtgagacatttgttcatgattatatttgagttgctaaccaatatatctgtatcactgcatttgttgctgtcacatcctcagcagtttgctctatggggcaagcatctgacaacctcactgtgttttcctgggtggttgtgtcccagcatttacatgttgaaatacatatatttttagtataaagtaccgatctttacttctcctttatattatagctagaacattatatttaaatttttgaattaggtatataggtaggttatgttatctttaaattttagcttatgatgggaaggaagatgtttcaaaatatttgttaagaaaggggttgctactgatatctgtgaccaagttcacagtgccctggaggccaccactctcaggcgagaggttgccaacagatggctcccaaggccaattcagcctgtagacatgcttggtgtgggctccagaatattttgaaaggaattcagatgtgctgccaacattcagaactagagattcttcagaaaatgtctgcatttctgacttcttggaaattctgacaacccagaaatacagggcctatgaatggtcttggtggccccatcccctttggagggacaacatctctccaatccagcatggtcttaacctagccaacttgactcactgaagtgtctgtctcgtgcccatggatatttacctttttgacctttagacacagggtgacttgttagtaaaggtgaccttgctgccagtcatctctctttgttctgcatggtgtaagttgtgctgagaagactagaacccaacttacttcatccacaaggtaaatgctccactacaagcctctctcccctacctaatgtacccaactactccaagtggcttctgtccatggagatttggcctcacttgtggttcaggcttgagaggtgttgctatttgtgcctagtctcctgagtcatcctctcccctagagcccccatagttaatacattttgtaactacttgtcccctttgcttttctttgttatactaatttggtgtttgggttttgaagttaacatcaaaagaaataaagcctaatagttaagaattactttttaagcaagaggaaaaacactgctgagaaaggaggggggagcatgagagataccctaaaatcatttgccataattttctcctgcacacgtttcagtgagtgtattttctggctgtacagatgatgaaataattaaggtctaaaaagtggactgtctagaaggaattaccaatgttacctgtctgcaataaaactagatgcattttggaatcacattcgtggagtgtagagtaataagaggctctgaaagcttgtgaagtaaataataaggcaaattattttttgttattttctttcccagcccccaaactggtcttcggcctctcgtgatgttttgtttccttggaggcagggttagttgggggacagtccctccactggtggaatcctgcacacagcaacagacaggcttggggagagcctctctctctggcctaaggagaggcctggttggtgtggttgccagcacctcctggtttgcctataataggtggcttagtcacctctggagcacacactctaccctacttgaaaatataggagaggggaaaagcatgctgttagagaagaagttaaaactccatttcagtaaatgccatggcagctcaccacattccatgggatcttcctcactgaccaggtctgttgatcaagaaatcatttgtagtgagcacactgtgtcttcctagggcctgtaccacctcagggactttcataaaataagcacttggtaaaatctgtgcaaggaatgaatggcaattgaattttggttcactctaatctactctcaggatattcattttttcacaccttcattcactcactcatttatttatccattcaacaaatatatgctaaccatatagtccatgccaggtgctattctagctgttggggatagagtggtggataggacaggtttgtgatctcacagatctatagtttagggacagagacagacaacagaccaggaagcaaatacagatagggagaggtgcacagaggaaagtaagacaaggggtgtgggaacaaatgactggagatggtgctaatttggattggggggtggggctcagggaaggctgcagaggtgatatgaatgaaatttgagaagatttaaataaaaagaaaggtccaagaatgcaaatttctgggtagagtggtccagggaggaacaccagggagtgtcctaaggtagaagtgtgtttgatgtgttcaaggaacccagagaaagccagagaatcagggggactgggatgaaatgagatgagagaaagacagggtggaccactgggaagggtctaacttactgcaactgcagtaggaagcagtggaggctcaaggcaggaagcatgatggtgaaatttatccttgtttaaaatcaatccagattttaagtggataaacaaattatcatgtatccatagaatggaatatatgatagagaaaacaaatgggccataaatctgtattcatagcaatatggataaatcttaaaaacatatcctccagtgaaagatgcaagtcacagaagaacaaggccaggcacagtggctcatgcctataatcccagcattttgggaggccgaggcaggcttgaggtccggagtttgagaccagcctggccaatatggtgaaaccctgtctctactaaaaatgcaaaaaaaaaaaaaaaaaaaaaaaaaattagccaggcatggtggcgtgtgcctgtaattccagctagtgaagaggctgagcccggagaatcacttgaacccaggaggcagaggtggcagggagccaagatcacgccactgcactccagcctgagcaacagagtaagactctgtctccaaaaaaaaaaaaaaaaaaaaaaaaaattaaaaagaaaagtcacagaagaagatacacagcattatctcatttatgtaaagttcaaaagcagactgaggtaaactatacattttggaggagcaatttgggttcactaaaatatgacaataagtagcctccttctttagtatttccatgtgatataaatggagagcgaaaggactgtgctgataagaaaataccttaaaacttaggagagtggacaccccagatgaggggaatggaatgaggtgggaggggagaagatgattgagaggtatttgaatctcatctgtgatttttcaattttaccttcataatgcatgtattagtttcctctggctgcagtaacaaattactacaacttgttggtttgaaacagtacgtatttattctctctcagttctggaggccagaggtctgagatcagtttcatggggcagaagtcaaggtgctgatagggaaatctgttccttgcctcctccagcttcctgtggctgccagcatccttgactggggtctgtattgccccaatctctacctctgtggtcacactgctgcttcctcttatgtgtgtgtaatatccccctgtctttctctcaccaggacacttgtgatgccatttcaggccctccaggtaatccagggtcatccctccaatacaggatcctttcacatctgcaaagaccctttttccaaatgagatcacatttacaggagcagggcttaagacatggattatcttttgggggcttattttcagacgaccacagtgcatttatgtgcttgttgtataattaaaaagaaaaggtactttttgaagggtgagtagaaaacaatgcccctggctgctgggcaaagactgtgtagaaggtgattggatttgtctaggtgggatggggcagtagcctggattaaggaggtggcaacagagatgacaagagtgaatggaatcaagatacagtctggagatagtttttaggagtggctggtgggtcaaatgtagagaaagaggggcataggaggagacaagaatgacttttaagtttatggcttggtaaagagaggtgctatatgctgagttgagaaactcacaggtaacttcagctacgtcatacttgccaaatgctaaatatattttctgccttttgaaaaatgatcaaaattactaaaccaagagtgtttagaatgttaataattgagtggtttctcatttggagctatcaagatctgggaaagagatttagtaggatcacaaggaagacgaaatgtttagcccatggtttgcagagcacctagctccttcagcaaattgtgtgacacaacgaagcattagagacaatgactgcctgaatgacagcaaatggaaatgagccgaattgggttctgaggtctgggtacgtgggtgtaactcccctgcacctgaccactgatatttgctgtctccatagtgactggagctcttatgtgatagcttccacctgtatacacaactataagacaaaagaatattctatatgcatcttttcacttttcccccaaatagcaataacactctttatggaaaacaaacggttttattttacaaatactgaactgctctttggcctaccagagacttggagtcagaagacactggttgcagatctgccacttgccatgtgaccctgggcttgttacccaatctctccaggtctgtgtttcctcctgggattgtggtgaaggtcagagtatgtgctcagtaaatgtctgatattactactattaccagcttggtttcataggctttggatgtctcctggtagtttacttttatttggaaatgttaaaatataacatttcctttataataaaaacaagccaaaaatgattgttatcctttttttcccctctaccctaggtagagtctgcctttaaagattgcttataagttaacagttgtaatattctttcaaagtccttcaaacagaattcaacattttctgttctaataggtatttttttttactctgttcagatacactcaactatagttatctggaaaattattgcaaaacaacccacctgctttagccagtgttctgtagatccccgaggcaaaaatggggataattactcaggaggattgtcagggaacagtgatatcatcacttaactctttgctaggattcctagtgcagactttgcaaacaaatcaacagaaagcctgtgaaattccatctggtttgagatctctttgtttctaaagctaaatgatgtcctgataatctctttggcacccatccccattcccatccctaaaatgtttgtaaagaaagcaaattcagcaaacaaattccatgcaaccattgctgtcatatgaattagcaaacaagatttggccaatgtctgcaaatgaagaacatccaaactaaatttgtaaacttcatttttatatcatatttctaaaagttaagtggctgaaatacataactaagggttgtttaaggataaaagacatggtcacaggaagggcttgagccagagccatcttgatttgttgttcctgttttttattgtttgttgattttctctcttctagtgagatgagattgtattttccttatgaatttgccggctttaacaatttggtgtctttagctcccacccaggtactaactgagcttccaggctacttcccctttcagttacgagcactatccttcccttagccatgtgggttggggcttcacaatgcaagcaggctcctctaacaggattgcttctttaaatgaactctagatttggccttggagagacttagcgccgccccatttcctcctgagacttatcccaagacagccctgatggagcctaagaattcaaagtccttcaggtcataatttctttttccttctgtctaaggaaacagaagccatagatttagctcatgggttctctaaatgcagtccctagaccagtagcatcagtatcacctgggaacttacgagaaaggcaaattgttgcgtgcaccctagatctcctgaaatcgaaattctggagttggtgccggacgctctgtgagtctaatgtatagtgaggtttgagagccatatgtctggttcaagcttgtccaacccacagcccatgggccacatgcaggatggctttgaatgcaacccaacacaaatttgtaaactttcttaaaatgtgaggggttttttttagtattttttttttctcatcagctgtttttagtgtattttatgtgtggcccaagacaattgttcttcttccagtgtggccagggaagccaaaacattggacagccctgatctagttcttccaaaaattcagagaaattcaatcaaaagttatgtgttctctcacctcctctcagttctattttagagatggttaaatcagacaagttgagtcaaatgtcgaccaaaatacttgattctggcagatacctgataaggctgtcagaaatgcccatcttggggtctgacctcaaaacaagacaaacatctggaacctttatttttgtatcttcagcttggggatgtgggtggtagaggggaaagtaactatcctttttccgatggaaaatatttagcttgagtgatgtgaagatttcagtagatctgtgacaagatcaaagaccataaattacttaacagtggttctactttcgtgggattatttgaagtatcataattacaattcagcttcctggctttcatttttgagtctggaattctgttgggagctatcataatcactgaagagtataatattacagactgggtataaaaatatctttttaatgactagcaaattagtgaaatgcctcaacttgggtggggaacaaatagaagacgctgtttttatgaaggaaggggcagaaaactaaattgtcaccacgttgttattcttgttgaattctccactccttaaattgtcagttgattagatagaatttgtaacacagtacatcagtataagtgatgaagggctgtgtggcaggcagaggtgtcttggaacttctgcagttgtggtttggtttgaattttagcaggcacaggctgaaaattaacatcaggtgagtcattatattgatcccaggtgtacagttctacgggctcttctcacctgaccaggacagtagcaacagggcttgtagaccaaaaacatttaaaaaattaaaaataagctttctaaaacactaggttagtggggccccattacaatattcccctgtaaatcagacaattacttgctgcacatattttccagtttgttataacttctgtaacagttaacctaaggagttataaattctgcttgtggatcaaaatcacagtctgcttgtgtagatttatatttcaaaatagcatgtgttctgttcacagcaaaggcagagcaggttctgccaagtttgtaacctcacaggtttagagtttttgaaaccccaaattgaaattcttgtggtatcaagtccattttcaaaagcagcttagagtctgaagagatggctcttgacatcaattaactctttttgaaccaaggccttagtgaattaattttaaacccaaccgcagatgtagcatagttcttttctagtacgcaagcattcaaaagtgcagggtcaaacacacctaattaactcatgcagtgcatttgaaggtttattgagtctgcattcactttataaaacatcaaaaataatatatacaaaacatgtctcatgttcagtgagtcaaggacaagcaagtaagaatttattgtaaagctcacacaatgctgtctgtatgaacttttaacccactgtgcctatgccttgtgaatatttattcaaggaagagactctgtgctcacaacaaggacattctgttaatttccccctccaaaatctgatgttgttgtgcaaatgggtagttttctttctttaacagtttagtgtgtttagctcccacccagatactaactgaacttcctggctacttctcctctcagttaagagcactatccttcctctagccatgtgggttggggatttactgtgcgagaaggcttctctaacaggattgcctctgaaaagactgtcccactcctgccctggacctgcagacagcccttctctgacaatgaagaagaccgcacctccctgccctttcaattccttgttaagcgagcattaacgcctctgttagccacagctggcaccaggaatccagacacaggtgggtcttgtttaccttgagtcagtcacgtgcttctcacacccacatgggatgatccttggctcccaggagaggaggggcttggtagttcacccagttcactccgttcttttaaactggctcacagagattatccagagagccttagaaagcctgtggtgactcattcccaaggaaggacttgctttcccccctacccattatacaacagtagctctgtatatgtaagtagctgtgttgtgatataaggcacccacatcatctcaattaatccttttgtttacatatttcaactggctaatggacaacagatttagaactagggactctcattctgtttctcttccatgttctgctgcctctcaatagggccttaataataacaattactgttttgagtgtgcctcccagttctggagcactttcttgtatatggaacctgatgtgaccctcagaacagccccatcaggtaggtgcactaactttgttttatagattaggaattggaggtctgagaggttgaattacttgaatgagatcactcagctatagggtgaatttaggatttgaacccggcttattcttgtggcaattgcaaaagccatttttccttctcatgcttacacaggtctcttgatgcctatcccaaagctcatctgcattattgtttattcttgtcctttcttgtatggattcaagatgtgctcaggatggaagctttgggagctgagtgtccgtcacttgttcatttactacttttatttcttaaatgaatgaattaaatctatttaattatgtatatcaattcattaaatatatattacatgtataaaatgagttcatacattgtgcttagaacaatgcctggtgcatagtatatactcaataaatgtgagttattttcagccacttatacatcatttcttgagttcttgctctgtgcccatcactgagcagcctctactggggaaaccaaaataaataatgcatgtcaccttctactgtcctaacattgcacttgtccatctttgctgactagattgcagcctttatggggttaggacatatctgtatcatttacctttatatctccagtgtttagcacagagcctgatgtgtctttggtacagaaaaaatatttattgaacaaatagatgaatgcttggacactggagatttggtaagtttccaaaatcatctcaatttagaaattaaatcataccattcagcttgggttgtcatcattattttctttgttttgttgggtgtctggatgacatctattcacatgtctggtggacatcctcttccttctgtgctgcagagacaaactcacccttggcaatgccagggaggtggcctccaggctcaaatctcttaaaggcaatgacagccatgggaaatccacgggtccttgtgtaattggggcctcaggaggtctactccgggatggaggagtgcctgggagtcatctgtttggagttttcagcctctccctaagaggaggacactgtccttccttccccatttctgaggcttgagctccatttttcaactcttccaacatgttgctttataactctaggccaacaacccagacctcctggacttccccgtttgccctcttgggaggggtggcggtactctcactccttgtagtttggtgggaaagtgtagggtgtggagggaagatatatttctgactgctttttcatactgggtacctgaccgaaggtcagattgctgctgctggttggttgttgtcaaggctagggtctagcttgagctcatatactgcagtctttgccagcagtgctccaacttgcatatatagtgcattgctgcataattgccacatagcacagattacaaaggccaaaattcacctagggatttctcccaaaatgcagcatggtttaagtgagcaaaggaggtgccagtccccgcttatagtcaggatctgtggtacagggaggatgacttgtccaccctggctcagacaagggaggaagcccaggaacacactctctaatctcatcattttaaaagctactatttttgagtacctaatgcatgccacgccccttacacttttgtgtcatttaaattaatcatttttgccagtcttgtggagttaaattaaaaacccttcccctctcccccatgcattttttaaagctcaagtaattaaacttggtggaactaagtatttttcctgcagataataaagaagagctggaatctgaacccagttttaaccccaaagcatgagttcttaaccactttaacatcccacttcattttccatgctgctccccagtgtactttgaaagctaatatagctttcaaagagttgaggacagacatcttcatagctaccttatttttccacgacttccttcctaaaaaaaaaacaaaaaaaacaaacaaaaaaaaaacccagaaaactgatgctggctatgcaaccgatgttgcacagactgcaaatggcagagaggagttgtcatcttttatgttttctctggattggcttccaacaggtcccgtaggaactcttattgtgtacatgagaaacaaagctaatacatttctcccctccactacccctcagcctccgaaaagttaagatataaaagtgagagcagaaacagtatcaagcgtgtttctctggatggtccgtgcaaaaacaatggaattccaagtggagactgagtgagttctgacaggaaactgggtttaatgtataaggtctccagatttcctcatgccactccagccaatcagaaactgatatcaactctcttctcatggtttagctgttgtgctgtcatagtgacaacttcaccttctgcatttcaaactctgaggaaaattaggaaaaactcaatcttgctttcttcaagaaagaaaattctggttacggttgagcagattggaaaatgatcacacaaccagaaggtaatgtcaaatgtaaaacatcaccttctctttttgcagttggtttagcttccaggtagtgtgaatgtatggagttgaataaaataaaaattcaattactggagcaaggaattgaatttttattaggacaatacaagacagaagaaattccaaaatgtctagagctgatgtgagactccactccaagggtcagatggcacagtgaggaagtggggaccatgtaggtcttcagaaccaagcctggggacaaagggacagagcttacttttgctatttgctgcctgctgcatattatgaaattaattaaattctctgagcttcagtttcttcatctgcagaatggagatgataccttctttgcagggttttgatgaggatcaaatggtgtaacataacaatgcaaaacccttgaaataaagtatgttttcaagcaatgttagatccttcctgatatggtttggatctgtgtccctgcccaaatctcatgtcaaattgtaatcctcaatgttggaggaggggccttgtgggaggtgattggatgatgggggtggacttcttcattggtgctgttctcatgttagtgagtgagttcttgtgagatctgtttgtttaaaagtgtgtagcacctcccttctctctctcttcctctcgcttcagccatgtaagatgtgcctgcttccccttcattttccgtcatgatcgtaagtttcctgaggcctccccagaaactgatatcaccatgctccctgtacaccctgcagaaccgtgaaccaattcaaactcttttctttataaattacaccatctcaattgtttcttcatagcaacgtgagaatggcttactacacttcccctcattgcctttcctctcttctataaaataacccatatctctcagttagagaataacccctcagagtgtattggtttgtgagggctgccataacaaatatcacaaacttaatggcttaaacaccagatttgactcatggttctgggggctagaaatccaagaccaaggtgtcagcagggttggctccttctttagccattttatcatcacattgataacctcacctttctcgtagtgagaaagaatctattccaggcctcttcccaaagttctggtagtttgctgacaatctttagtattcctcaacttatagaaacatcaactcgatctctatcttcatcttttttttttaaggtatcagattgtttttatttatttattattttacattttttttaatttcaataggttttgggaaacaggtggtgtttggttacatgaataagttctttagtggtgatttctgagattttggtgcagccatcacctgagcagtatacactgtatccagtgtatagtctttttttttttttttttttttgagacgcagacggggtttcaccttgttagccaggatggtctcgatctcctgacctcatgatccacccgcctcggcctcccaaagtgctgggattacaggcgtgagccaccgggcccggcccagtgtatagtcttttatccctcacaatcccctgccctttccccctagtccccaaagtccattgtatcattcttaggcctttgcatcctcatagcttagctcccacgtaagagtgagaaacaatgtttggtttttccattcctgagttacttcacttagaataataatttccagttccaaccaggttgctgtgaatgtcattattttgttcctttttatggctgagtagtattccatggtttatatatactacattttctttatccactcattgattgataggcatttgggctggttccatatttttgcaattgcaaattgtgctgctataaacatgtgtgtgcaagtatctttttcgtataatgacttcttttccttcgggtagacacccatgagtgggattgctggatcaaatggtagatctacttttagttctttaaggaacctccacactgttttccatagtggctgtactagtgtacactcccaccaacagtgtaaaagtgtacccttttcaccacatctgtgccaatatctattattttttgaatatggccattcttgtaggagtgagatggtatcgcattatggttttgatttgcatttccctgataattagtgattttgagcatttttccatatgcttgctggccatttttgtatcttcttttgagaattgtcttttcatgtccttagaccactttctgatggggttgtttttttcttgctgatttgtttgggttccttgtagattctggatattagtctgttgttggattatagattgttaatattttcccccactctgtgggttgtctgttaactctgctgattattattatttttgctgtgtggaagctttttagtttaagtcccatctatttatctttgtttttattgcatttgctttggggttcttgatcatgaagtctttgcctaagccaatgtctggaagagtttttccgatgttatcttctagaatttctatggtttcagatcttagatttaagtctctgatccatcttgagcttatttttatatagggtgagagatgaggacccagtttcattcttctacacgtggcttgccaattatcccagcaccatttgttgaacagggtgttctttccccactgtatgttttgtttgctttgtcgaagatcagttggctgtaagtatttgggtttatttctgggttctctattctgttccattggtctgtgtgcctatttttataccagcactatgctgttttggtaactcaactctggccttgtattatagtttgaagtcgggtaatgtgatgcctacagatttgttctttttgctttctgccttcatcttaatgctgtgttcctcctgtgtgtctgtctccaaattttcactttttataaggatgtcattcattattaaattagggcccaccctaatgaccactttttaaattaatcgcctctgcatagatactatctccaaataagttcattttctgaagtattgggagttagtacttccacatatggatttggtggggggagtacaattcaacccataacagagggcaagtgggtatgacactgattggggaaggaatgatatataatggattggaatttgaatgtccatctggggattttgtctgttagctgcaggctgatttagctacatagtgacttcctttgtatcatgacccctttgggaaaaatggagttactgcaacaacagcaggaaataagtttctagtgagccacagggacaagccttatccctgcaatcagagtattaaggctgactttatatacacactgtaagatggggcagccagaatagatactgcttctatggctcaaggaaagggttggaggtacgaaattatacctccagatagaggagaagttgaaaacacttggttttggcagaaatttttggttggcatcatagagttatttcccattcagtagtaaaatcaaggcattttatagttggtactttttattgctcaccatttgacaataacatgtatgttatgttgtttgattcctaaaacaagttgtaaagtagcttttcatatgcccactttacaaataataaaactgatgcacagagaggttaggagacttgtaggttttgggcctctgacatccagcactccttcttctttcatctgtgccctcattgagggactttccccctgaaagtccaggaacaacacactcaagcacagtagctctgggatgtagcagccacctctgccttgacaaaaattacaaggccttttgcatgtggcagtttagcccactggagaccattccagttgcaactaagccaatcttatcatctgtggtttgtctacacagtagcacaattggcagaaacacaggagtattggttactgtgcttacagtgactttgggaaccatgactgatcagtttagaccaaaattctaaccacaatcgttctggaaacttgcactgccatggcgaatgtagaaacagtcacagtcagaaattgtatctatcacacagacgttttgtttacaattggaacctgaatggactggtggttttgactttccgcagttatcattacacctaaggcgagagttccagcctgctgcagagtgaaaacatccctttgagggccttaaagccatggcatggtcttgaaataagactatcagtgacaggcgtaataataggtctcctttagatttctaattgaggtggtggaggaagaaatctcccttgtcctaacacctagtgaacaaggttgctgctgctgaggacttttccattgttcttttctagaactttctagatttctcctttgtttggagacttaaatgcatgaggtttccttgagaagtccttatcatcttgaaaggagaatgctacaaagattgtcaactgaagtttgagaaactgaatcactgagcactgctgtgttgaatatagcccaccttgtcagtgtctctacatagaagaagaaagggtgttagacataatgaaatagacctcaagtcatttttcttttcttagattttaagtttcaaaaagaacaattgccccaaagcttggatatagccacagaacttattccgagtcacaggggcaattttttattgcttacttcccaaacatggcactttggcattttgtgacatagttttggctctggtgtatattgtatcctttgagatttgacaaaggtatggggtaggagtggtcacatggggtggctcaggtacacagaatcctgccatttctcctttgcttgacttgatctcagagttaggctgacattcctagccacatggggtccttgcagcagctgcagagcccagatgtccagctggagaaatgtggcccatgtcctgttaatctgacagacatgtgagtctggaacaggggaagttggcagctgggttgtcactcctcatattccttagagttggtcaggagtgggtatgttgggagtttccaatctgtttctttcacacccagagagatgcaatagggaagaagagaaatgaatgttcatactcagacataatttgaggtagtactctaggtgttttttattgcggtgatggttaagtgtgaaaagcagatatgatgtaacttcctcaaaagtaattggctgtccaaatgagaaagaacagcatttgagttagtaagaaaaacaaatctaacaaataaatatgatgtgagccagaaaggaaaatgtaagcagtaaatctgcatatttggaactgatcaatgatttaaaatatttctttatgaatgaagttaaagacttgaactctagttcatgcaaaaagagactcagtcctagaaaccaaagtcccccaaaggctgaaaatgttttcaacacttgaggcctaatggcaccctttcactctaccacatttcactgcctttacagatttttatgtgcagtaaataagagggcatttttcatttatacaaaatttttccagatgaattttgtaacatattttttagatctttattgatttgtgagtctgtccatttacctatcagttacattgaaatcttttgtctttaaacaagttttattaatgacataacaaagaggagaatataagacttaaggttatgatttagaattgcattatccaatatagcagccactagaaatatgtggttatttaaattaaaactaattaaaattaaattaaattaaaaattcagttcaggtgtattgtactgcttgaatattaaaacttacccatcactgcaggaagttctattggacagctctgctctagaaagcacctttcctcttttgaatgtagaatctttgaaaaaagctaccttccttcagtagccagaatttttaagaacagtgcttcctgctttgtccagcagataactaaaaagcaagtctgtattgtcaaataaccttttcttgtggaaaacctgattctccattgtgattcagtgtttgaatggtttggtgacaattagtgtgtgtcaatctgtactaatattgagaactggagtctgtgaatcttttaggtggtccctgctactctaaatcagaggtcagtggactttcctctaaagtgggtagatagtaaatattttaagttttgtaggctatactagctctgttgcaactcgtcaactttgccactggagtccaaaagcagccattaacaacaggtaaacggatgtaggtatgccccaataaaactttatttacaaaataggtgtagtgatagtttacccacccctgtcttagaatacatttaatgactccctcaagtctcaaattttgattaaggcaattaatatattgactaagattaactaatgctttctcattatggtgttgtgattataatgtggacagccagctattttcaatttgtctcctttgggatctgcccagataaatacatactgttaacttccttacaatattagataaactattttattattacttgtgcatatgtcttagaatgcccacctcagaatagcaataatcatagaaaaaaatgggccttggagaatgtgcatgggtatcagggtgaggaaggtttaaaacatttattttattttatttattattattattgtttttgagactgagtctcaccctgtcatccaggctggagtgcaggggcatgatctcagctcactgcagcctccatctcccaggttcaagcaaatctcctgccccagcctcccaagcagctgggattacagtcatatgccaccacacccagctaatttttgtatttttagtagagatggagatggggtttcgctatgttggccaggcaggtctcgaactcctgacctcaagtgatctacctgcctttgcctcccaaaaatgctggtattacaggcatgagccactgcacccggccagttgtttttatttttggttttggttttgttgttacatcaagacctatgttacatgatgatggtacttcaactagtaggactaatcctaatttaagatgttatttacataaatggctactgtcctgcaatagcctctataattctttttcatcattctccctgggtatcagcattacatggttctgggagtcattccagaaggcttgtccagaacctgctcctgcagccattccagtgattttgaaatcacttgattccttgtattatatttcctccttcttaaaatacagagtatctgtttgctaccctgagtcctgactaatgctatggcatatattaatttttataaattctgaaatgcatgtaaagttgttagcttttttggaaggctgtgtctctaagtgagtccccagctccatttttttgaactttagatttaccttttccccatctcttttgagtgtctagtatggtgtgacattgtgctataataaatatatattatgctgggaactgtggctcatgcctgtaatcccagcactttgggaggctgaggtggatggatcgcttgagctcatgagtttgagaccagcttgggcaacatggcaaaacgccatttctacaaaaaatacaaaagttagctgggtgtggtagtgcatgcctgtaatcccagctacttgggaggctgaggtgggagcatagcttcagctggggaggcagaggttgcagtgagctgagatcacaccactgtactccagcctggatgatagagccagaccttgtctcaaaaaagcaaattaaaaacatatatataaatgtatgtgtgtatgtgtgtgtgtgtgtgtgtgtgtgtgtgtgtgtgtatgtatgtatgtatgtctatttggtcttctctttggttcctaacacaaaaactttttttttttaattatactttaagttctggggtacatgtgctgaacgtgcaggtttgttacataggtatacatgtgccttggtggtttgctgcacccatcaacccaccatctacattaagtatttctcctaatgctattcctccctttgccccccaccccctgacaggccccagcgtgtgatgttcccctccctgtgcccatatgttctcattgtccaactcccacttatgagtgagaacacgcagtgtttggttttcaattcttgtgttactttgctgagaatgatggtttccagcttcatccatgtccttgcaaaggacatgaactcacccttttgtatggctacatagtattccatggtgtatatgtgccacattttctttatccagtgaatcattgatgggcatttgggttggttccaagtctttgctcttgtaaatagtgccgcaataaacatatgtcctgacacaaaaacttctaaagcccttggaatttcctgagtgatagaagtgagaggagtgtctttgattatccataataggctcctttcaaccatacctgagtgtatgctaatgagatgaatcttggtgggcccctagatagcttccggatgggggctgattgccagaggaaccaaccatgtgattagagggctggaattttgaaccccatcccctgacccccccaagaggagagaggggctagagattgagttaatcatcaatgaccagtgacttaatcaatcatggctaagtgatagaccctacatagatattctaaataaaggggttggaaagctcccaggctggcatacacatcaaagtatagtagtatcttggtatccactgggggagttggtgccaggaccctcttcagacaccaaaatgtagaattctcaagtcttgtatataaaatggcacagtatttgcctataacctatatacatcctctcatgtactttaaatcagctctagattacttataatacctaatacagtataaatgctatataaataattgttatgctgtattttaaaaatttgcattattttttattgttgtattattatttttaattgttttttcccaaatatttttatctgagtttggttaaatctgtggatgcgggaaccatggagggctgattatattaggagagtggcatgcccagggaaggcatggaatctccatgaatccccccataccttgtcttgtgcatctcttctattggctatttctgagttgtattctttataataggccagtaaatgtaagtaaactatttttctgagttttatgagccagtttagcaaaatctgagaggaggtcatgggaacccctgatacataaccagttggtcctaagtatgaaaggcctgggacttgtaattgatgtctgaaatgggagcagtcttgtggcactaagcccttaacttgtgggatctaacagtaactccaggtagatagtgtcaaaattgagtacagttgaattatagaacacccacctggtgtcagggaagtagctggtgtgggggaaaaatcccttatacatttggtgtcagagtgttctgtgggtagaaacaaatcataatagataataattctcactcacttcctagatgggaaatttttcactgaggattgagagccaatctactttccagagagtcaagaatgattacatcctatgaatactagctctggactagataggaataatgaaactgagtactaaggtcatatgatataagatggccattaaaactgaagaaggctgcaatccacttaaaggaagcacctatcaatcttcagtaacatgtatccaatacagtcccatggcataattatgtggtgagcttcaaagcctttgctctgtttgcaaaatgcattaaagagaaaacccatcacctgacttttaggttttcaaattagattgtttctgttcactgggacctagccagcgcatgtgtgtttttcttctgatctgcttaacatttcctgaaatgccatcctgaccctcttatttggatccctaaaagaacagaggtgttcgacatgctccttgtgcagccttgtccagaaaggattcccagcttgaaggttgaggtgatattcacagtgcattgtggatagctttttctttttaattgtgattcagtggaatgccaaccagaagtttaaaaaaaaagcacattacaaggcataaagctttatgattaattatgttgagttcagatataatttaaacatattgacttgtctgaaataagtgccagacagtggggctggggagacaggaagtgcctggtgagactgctgaaacaggctggaagggaagtcaaggggggtacggacatcatcatttaactgttctccacggccgggcagaaaatggccacaactgctgatggtcagtggaatcaaagagataaattatggccaaggcattcctttgaaatgaacagaatgttagtcgatacttcaactttgcacaatcttaaaaaactggttcggagacaatccattacaaatgattttttcccttcatacatatgacctgtctagagatttctctgaggaaccagagctgctttgctgattcccagtctcgtcattctgaactggtggaatttcagactccctgctttgcggtggctcccaagctggaggtagaatggcaccagcagtggggaaaggctgcaaattcttgcgcgtgaatgaggtccaggctatcccgatggtttctgtagccgggctgagtaaaagaatgaaactgatttctatgcagcaaactgggaccagatgcgtttctctgtgtagaaagtttaaaaatctgaccagctgctttcagtttttaataatggattatgttgttgaggggcctgcacttactttgatacttatgcataggaaagcaaaatgtgagcgtttgggctaacctcaccggtggattttgaacacacccagggcatacgtgattcagcgtccccttgaagctgagcctaactgtttaatgtcgtctgagtgacagcgacgtcgtccaaagagtcctggccacagactcctattcatcccacagcgtgtccccatgatcttcatggaggttcctcaactcagctgaattctgattcatatctcagaaatttctggaaagcttgggatccagcctgctgctcttcatcctcacactcagggtccttgaaacctgcagctgtgcaaaaattttacacatgctgggagagtagcagcagttgcctcttggctagcttttcagataaactccctgtctcatctctgatactgaaactcaagctccaggctgtgggggagaaggcatgcttgtaggtgaaatcacctttcccaaatgaagcagcaaaagagaaggaaggaggggtcgttctgctccttgagatctctgatgaggggtaagtgtacgtgtgggcttctgctgcctcctctcattcaagacaaagagcccagaaaaccatgtaaaactcagagaagactctaggaggataccatgaatggattaaataatatcacgtaggatttagctaccttatttgatttaattttggggaagaggcctgtattagggtttttcagaaaaacagaaccaataggatgtgtgtatgtgtatataatatatatctgtgtgtatatgtgtgtgtgtgtgtgtgtctgtgtatttcatgtatatatgcaattttggaggctggcaattctgtaatttacagggtagcctggcagcctggagacccagggaagagatgaggctgaagctggagtctgaaggcagcctgctagtagaattccctctttctctttaaggccctcagctgattggatgaggcccatccacattatggagggtaatctgctttactcaaagtctactgatttcaatgttaatctcatggaaaaaataacttcccagcaacatctagacttaatctggctactttggtctagccaagttaacacgtaaaattaaccatcacaaaaccttagcataagaatatttatatttgtgtttttccttgaggcaaaagaactgggatgcaaagaaagaagtctccatatcagaggaggcagtagaactaaatgcatttatcacacatctatatatttacacatacacacgtacatacacacacatgcacacatatacacacacacccatgtgccccaagcacatcgacctaaaagtgcaaatgagcatcggggcaaaaaagcaatctggaaataaaggaaatcagaggtacacagcccctacgtctcacacatttcctctgtctggctaagaaatggaaaaattggccctggaaactcttcacaaccttctctctttcctgttagaatttcctaaggtgaaagtctgattttttagaaaactgttgcagctcaaatatcaatatgtccagggaagaaaactttgtacagtgatactcccatctgttcatgagagtctttgagaatgatggatcaccataatgagaattttcttcagtgaatcccaacttaatgttaaagtgcaacagtggtcctcattccaattccatgattttccaaggcagtaaaacttggtctaagaaatgatgaagattgtgtccttaaagacacatatgtctttatagaatttgatatactttatattaaaaataatgaataaaaaaggccaggggtggtggtttatacctgtaatcccagcactttgggaggccaagacagcagatagcttgagcttaggagttcaaaccagcctgggcaacatggcataaaccctgtctctgtaaaaaatacaaaaattagctgggcatggtggcacatgcctgtagtcccagctactcgggaagctgaggtggtaggattgcttgagcctgggaggtggaggttgcagtgagctgagatcatgccactacactccagcctgggtgacagagtgagactccctctcaaaatgaacaaacaggaaaaaacaaaacacaacaaaacaacaataatgaatgaaaagctttttcttttttccaagcacctagaagaaagtacagcaaactttggtgatgttgaaagaaagtgatctgacaggtgttttttcttcctctgactcttggccagtgttgggactagtgttctgtatggtcagcctctggatatgtcttctttgtccagaaacaagatacatatccgggggactatgtccatgccctggagtggagatttttttccatcttgttacaactaagccaccactttggccatttctgtaagattccttcagagtgtgggattagatggcttgtaaggctcacttccagccctaaagccactgattctactctcaaatggtttgacttcagcctccctgcatttctgatggttgcagtagcctgaggtctttactaccagaatcaggccactgatggagaccctaaagtgggaggtgacctctagtttatttcctctacattagaaaaaataaaactcggtcaggcacggtggctcacgcctgtaatctcagcactttgggaggctcaggtgggtggatcacctgaggtcaggagttcgagactagcctggcctacatgacgaaaccccatcgctactaaaaatacaaagattagccaggtgtggtggtgggtgcctgtaatccctgctactcaagaggctgaggcaggagaatcatttgaacctgggaggcggaggttgcagtgagccgagatcatgctgttgcactccagcctgggtgacagagtgggactccatctcaaacaaaaataaataaatgaaaagaaaaaaaataaaacccacaggttgccaccaatcactggttagttgtcccttgagtagggttgccagatttagcaaataaaaatccttagcactagttaaatttgaactttagattaagaaggaatgatttcttagtgtaagtatatcctatgcaatacttggaacatacttatgctaaaaaagtattccttggttatctgaaattcaaatttcactggaaattctgtattttatctggcaatcctattcttgaggagtcccattttgactgcaccccagggcaatgtggatcagagatttcattttattccctgtgggtttgtctcccaagtcattctcccatgacaacatttcagcttcctcctactccacagagatgcttgcagtcactgctgtttccctatcttgacttgcactttcttgcttcccagtgattgcctaggcttcacttctacccgaaaggtttacattaccaatttttgttctttcttagtttttcctgagtactgtgaacatttcagagcatcagagtttctgtgttgtgaaaaggggctgtacatgcaaatacattcaggtgccataaggcaatattaatgtttgaagcaggcctggtgacactagaccaacagcagagtacaggctcttcctaaagacatttccaaatgctctgtcaatcactgtgctggctgaacaaggcatgtctgcagcatatgtgctgccatcttgcatcttctggtttagggcaaagtgcttcccacttttcctttggaacacttgggtcttgcaaaatattgaaataagtctgagaaacaatgagtatcgctcttgaaaagtgtccatgccacactcactaactagacctgagtaagctccaagaaggcaggaaccatgtctgttatgttcactgctttaacctcagagcttaggctacagaaggctcttaatcagtatttcttgagtgaataaatgaggaacgaagccttagtcatttgctatcttctctgtcttactcatcatgagaaaccaatattttaaatctgaattttggatgaaaaccaagctgcgcaagattgttatcgattcttgtggttgagaaattaatgtaacataaaacaagacacctaaactttaaacctgagccttgctagctgaatctggccctaggatgtattttatttggctaacacagtgttttggaaacgtgaacttttatgccttgagacagacataagttgatagctcaccaatgtcttcactactccctattgtctcattagctctctccccttacatcacttaccttgcctctagaggcatttgagtttcagtgtctgctaggggatgattcatcaactttaagaacgcagattttgatgtaagacagttttagatgtgaattctcgatcttgcacttactaactaagtaataactttagacaagttagtaacctcttggagcctcaggttgttcatcatttgtaagaaaaaaatgctgataataatagtacttacttcttagagctgttaaaagtatcagatgatacaataaatgtaaactgcttagcacatacctggcacacagcaaatgtccaacaagtgctaactatttaataataataattgttgttgttacttctgttttagtttcacatgtatggagaccaggttttgaaatgagcagagtggctttcaagaaattcagaaatcagaaaatgtcaatctcctctgtaccaaatctagagagaggacagctgaggaatggatatttctcagtccatttgcactgctataataaaatacctgagagtgggtgatttataaacaacagaaatttatttcacacagtgccagaggttgggaagtccaagatcaaggtgccagcagaattggtgtttggaaagggcatccctcctactttcaagatggtggcttattgctctgtcctcacatgatgaacaggagaaggacaaaaagggaagagtgctctcttcaacctctttataaggtcattaagtacatttatgagggccctgccctcattacttaatcacctcctaaaggccccacatctgaatattttcacatttgtgattaagtttcaacatacgaattgtggggatacattcagaccatagcaatatacttgcttattattgtgttttgctcactgatatgtttctagcacctagaaaagtgcttcacatacagtaaaggctccataagtatttagtcaaattaatgaatgaactgtagacttctggatggctctcattatggtcatacctcatgaatgtaagcggcttgtctttttctaatgaatccctatacttgggcaatcaactgtctgtgtgaagatggtgcacagcctcacaactggaattgcagccaagggctatctataaaatacccagtaaagcctttaagatgatctccatggattcttgtgacccctttgtaaaccctgtactttaaatcagggctggttggtgtgaccaatagaatatggcaggtataacagtatgtgactttcaaggcccagtccaaacaataaaaagaaaatgtattggagtttacgccttggggtctcttagattgcgtgctctggaggatgccagtcaccaagttgtgaagatatccttgcagttctgtggagaagcccatgggagaggaactgaggccttctggcattagacatcaccacttgccagccatgtaggtgagttaccttgggatcaaatccaccagccccagttaaggtaggctaggcccagttaagcctaggctgatgtctgatgcaacctccaaagggatcttgagcagacttgctcagccaggccacacctgaattcctgaccctcagaaactgcgagcaatgtccagaaaaacaattattatttttgtaagccattaaattttggaataatttgttatgcagcaatagataactaatacacaaggaatttgactctgactggtgtttcggagtgtattcctgatagattatcatttaagtacaataaatactgacataaaatagttttatgtgcattattgacaagtatttcatagacctttgcatttatgatttatcatagaccttcattttcacagaccttgttacatttgtcactaccctcaagaggttcttagatgcacacggcttatagggagcagcccgaccatgccgatcctaactcctcaagcctgttctttggaaaatgaacatatgaagcatatgaagggctccaaggaacaatgagaacagaatattcctgggctgggcacagtggatcacatctgtaatcccagcactttgggaggctgaaacggtgcttttgcttgaatccaggagttcgagaccaacctgggcaacatagcaagactctctatctacaaaaattagaaaaaaaatcagccaggtgtggtgccatgtgcctctctaatcccagctacttggaggctgaggtgagaggatcgtttgagcccaggagttggtggctacagtgagctataatgggaccactacactttagcctggacaacagagtgaaactctctccaaaacataaagaacatccctgaacaaatgagtcagatgatcaagaaataccagtgaacactgagcatcttctattcacaattcagtgtgaaataaaaagagtgatgagtcatttagaatccagaatctcccagaatcttccagaatctggtgagggacataagacgtacctgaggagtgaatgaacaattcatggtgttcagtcagtggccagcccacacctgcagtactgtggtccattctgcctgtgacatatttagaaggttattgacaagtaagaagacagcctgaggatgttctctgtgagcaaatagggtcattgaacgtgcaggagagaagctcaagcaaaatggaaatgactgccttcaaatatctaaaggctaccacaaggaagatggatgcacctgctctgacttgttcttgagcacagagcaaagaccagtaaatgaatttacaggagggtcaatcactgctggccagcacagcagagaaagctgctatcactgatgggttgcaagcagtgggtggtggccgtggctcagagatgctgcagatgggtttgctatgtggtgtaaaagatcatctctgcatttcctcatcactccatgtgagaaggcatcatagaaaaagaatgggcttcagagtcagacaaaaggggtgtagctcctgaatccaccatgaaatgccttgtgaacctaggtaagaaactgaggacagtttcctcagtttctccatctgtaaaatgaggtataacaatgcttgctccattagctcactgtcaaagcagagatagtgagatcacacatgtcaagtatgtagtacatttatggagctcacccaatccaatctgagtggtgtccttttaaggaaagaaaatttggacacaagagaggcactagggatgtgagtgcacagaggaaagaccacatgaggaaagagcaagaagacagccatctgcaaaacaaggagagaggcctcagaagaaaccaatcctgatgactacaccttgatgtcggacttcctgcctccagaactgtgagaaaatcactttctgttatttacacctcccagttggtggcattttgttctggcagcctgagcagactagcacaggaggggatgcgctttatgctctatcttagctccagctctcaggagcaagtcttctgtgggtgaaatgggcatcatcatccaatccggcagcagggtgtggatggcagaaacttgacctgcacatggtaaagacaagccaagtacagatcagaatctgggccaagtgcacctgggcactctattcttgggttgaaaagacagtacagtggtataggagatgttggtgatgaaagccctgaattttttttcttgtgtcaaagtgctcctatctgagctgcttgccattgtatctagtattcagctgttatcctagaatcctccttcatcgtcctcctgaactttcttgttgggagcttatgggatccactttctatccctggtgttctgaaattttctagtgatgtgccttgatgtggacctgctttccctctatgtgcctgggacttagtgacccttttagtctcacaactcatatcctggagttacgaattttatattgtgattattttgttgatgatttcctctcatctattttattcttcctctctttctgaaactcattgttaacatgttcaattcccagaattggccttttgtctgttttccaactcttgctctgttttctgaaagagttcttcaactttatattccagcctgtactttgaattttaaaaatttctgttcatatatttttaatttccaagaacctttgttaaattttataaatgttctttttttataactttctagttttgcttcatagatacaatatactgtcttatctgtctgaagatattattgattttttttgaaggttcttcaacatgctagtgtgtgtgcctgtgtgtgtgtgtgtgtatgtgcctgtgtgtgtgtgtgtctcacctttcatattacaagctttctttagaaatttggtaattcatgtctatcttcccatgcctaagattggggagctaaacagatgataacaattctgagcatgtgggtgtggcttgtgcactttgagtttgactgtagagtaatttggcctgttctttggggaaaggcctgaagtcagcatcttgtagatctttcctcttgggctgatccaattccccacagaggattttctaatctcctgcatggaggacaagagtttggctaccagcttctgggatccagtagggaggaaggctgggtctcagcagcagcactgatgtgtttcttttggcccagcacccatgtcctcagctgccatggcagctcacaatccagagaccctctgttacaccttccccagaaaactattgtctgtgtgtcgcaccagttgcggaaggggatccttacagcaccttggagtattggaaggaaattagagattataatctaactcaaaaaataaaacaaaaaaaatttcatcaaacagcttttccccaatcttccttacattaatcttctctttgtcctcagttccagatagacctggagctgcactttgctgaatattttgacgattttgcagtataaataaggttgggtctcagctttcccctctgcctgttttaggtctgttcgattgctgactggctttctagctttcagagtttagttgtcattgtctcctcttcctttacatcctttgcaaaacatattcctttactatggtttagggtttctgaaaggagggaagtcagatgtacattcaacccactatgtgagctcagtagtctccctgtttcctgtctctgttctcttctcacctggattattttgctctacctttgctcattaaaatctcagctattataaagggtcagctccaatgccatttctccataaagtggtccaaagtgtgggaaatcttacgatttttcttttctcttggcacttaccttactctctgtgataccctcctcctgtatgccaacacacacacacacacacacacacacacacacacacacacacacacccactacaaggtggtaggtaaataaataataaatgacatattaatattacattaagatacatgatcaagttgtatatgtttctagatcttatagtcactctctggattataaattctggggctcatgggcagagcttgtgaattgggtctggttcccagctctggcagtttctctttgtgagtccttgggcgtgtcattttgtcctcaaaacagaatcagcaaaattaggagatgaacaccagaacctatagaactagtcataatggtcgaatgcagcaacacatggaaggcatgcctcccatattgtttacctactgctattattattccctttctccctcacagtgttcttttgaagctcaaggattttattgaatgtggcagtcatcatgtaaatgtaatgtactgtgagatatcagtgggtatttttgtgactcatctgggtgctccctgaagagccctgcagagtgcctttcacacagtaagtgtctgaggaatatctgttgaaatgagcaaaacatgtcaatatttagggagttgtactatatgaaggcacagatgcacagtcatgcatgtgtgttttggtcattggagaggtgggtatgctccatttgttccaggatattgaaaaaataaaacaattcttctggcaggttagcctccttctttctgaagacccagtggctgtgtgctttcggctaaatgttgtcatcctccaaacccagagaaagcaaaaagcaggggttggaataatcatgtgcaaagagggaatgatatgtcgtctcattgttttagaagttttataagcctagaagcattaaagacgagttgcaactttgaaaaccaccctgttgaatcacgatgatctcaaactctttcttggcctccccttttcctgtgtgcatgtgtgtgtaatgcttagtatttatgtttgcctgtttacttaggtcatttatatgaacacaggcgctgtgctgtgtaagagcacatcagctcttgctgctaacccttcacctgcaatcttaagtctcagtttatgaaatcatagtcatttgccagggaggcaatcatgatgtcacaagccaagcacagtgacttcaggtgggtaatcaactgaaggagcagactgacttctaagcaacaaagatcccattatcatgtaaatgttcttagtaaccaaaattacagaaggagagacatataatgtaagacactggcacatcagcctcccctgtgctgctcaatgcgatcattctccaagcgttccaagaaagatgtgtcttgtaaacacagctggtaagaggtagaagacgaaaccacaacaaaatgatttttctttttaagcagcgaaatccaaacactgtcttttaaagggtctgattagtgagtttgtaaaatatctaaacctcttgagttgtcaaattttaacacttggttttgtttctccctgtagggccttgaatcagtgcctttcaaacttaaatgtacatttgagtcacctgggaatgttgttaaaaatacagattctgagtcagcaggtctggtgtggggcagcaatctttttttttttgagacagggtgccactgtcacccaggctgaagtgcagtggcatgatcatagctaactacagccttgaattcctgggtttaagtgatccttctgcctcagcctcctgagtagctgggaccacaggcatgcgccaccgcacctagtgaaaggattctgtatttctaacaagctgtcaggcaatgcaaggctgtcagttcttggacttcactgagcgatagcttgttttgttttgtttttgagacagggtctcgttctgtcaccgaggctgaagtacagtggcacaatcacagctcactgcagccgcaacctcctgggctgaagcaatcctcccatctcagcctcccaagtagctgaaactacagcgccaccacagccagctaatgttttaatttttttgtagagccagggtttcaccttgttgcctgggctattctggaactcctgggctcaagcaatcctcccgccttggcctcccaaagtgctggaattacaggggtgagtcactatgcctgccaaactttttaaagtcagaatccaaatttaaagttaaaataagaatattatggctgaaaaggtgtcagggacatttaccctctgtgtaccaacattaatactgcatttctcaaattctaagctatatgtttctttgcatgttcacttttctgaaattggtgtgtagcaatcatattaacaaattgtatagctagtaagcaaagattaatttgtgacatctgagttgttgcctgaagatgtgtgaaatgtgtggtctgtacaacttgtttatccatttgtcacctcagttgtctgtactggggtaccacatagaggtcaaatttcctcactaatactttcataaaacacttgtttccacattgaattcatctggaaagctttaaaaactttggtgcctaagtctcagacccagagattctggtgcaattgttctccccagatgattctaatgcacaacaaactttgagagtcactgtgtgtcagtatcttcacaatgatcatgaattacagaccacagagaaatgcattattgtgtacatatcaggcaatgtaaaggagacatcatcacatgtcttatggacatcatagacttctcaaagcttggaaaagtcatttaaccagtttgtgggttgaacaggaatctcagccaggtggcgactgtctctcagtgaagagctttctaactacactccagagatgttgtttcacgtccagtgagatatcaaaactatgagtttacccaagtcacaaatgcagacgaaatcctggtttcacttggtttgcctccaattcctgctaagcctgaggatgcagaggtcaaaggcactagcacgggttaggaaagccccatttcattgtgatactaagcatggctgcacgtggccaagagtgggtcccaaaatttatttcattcctaatgtgaaaaaatcttggactcaaacttaaattgcactactaaagttatgtgtcattgccaataaatatactaatatttgttaataacatacagcatttactttttgttaaatcaatcatgtggctttagacccctggaatctttgatttgaggatacaacaaggagcacaacccaacaacatcatgtattctgtattagggaccaagctctaattttatattgcagtatctcatttgattcttgtaatatccctgctatgtaggaaacatccccagtttatagaagcaaaaattagggctctggggatccatttacattttctattaagtgtccagaagcaagccatgcaaaaagtgtctttctgggtggctgggatctaccagctgatagcaaagaatctctctgtgataaaatgactaaattagggctctgcaaatcgtgtttaccagaaccctaagatttagaagaggcctcaaggacccagagaaagggcacatggagcagagaagggcattgttgcagatagatagaggagaacttgcttgcaaacacttgcaaggcactgacttaaataactccagtcagacagcgatcaatcctcaaacacctttaggtttttttcaaaatccaaggaaattgatgcctggcatctgttagcactatgattattttgaataaaactagttaaacttactgggtgtaagaaagataattgtggaaaaggtacttataaaattaatacaaataatgattattgaaaagtaaccaaaatttacttttaatacaaataataaatgatttttttaaaaaattaaccttagagattatagagtcaagagatattcaagcttatattgaagtggaatgcattttgcaaacgaatctgatgtggcatcctaatagacaaaagacataaacttgataagatgcacaactctgccagattcccaacccactctccactgccatttatattgaagtggaatgcattttgcaaacgaatctgatgtggcatcctaatagacaaaagacataaacttgataagatgcacaactctgccagattcccaacccactctccactgccattaaggaatgggatccctgtccaaaaacacaagcctcctctcctctttcttgctaggctcctggtgcttaaaatcagaaccattttcactccttcatgaagcaaaggtaaccctccacccacctgacagtccatgaaaaaggttgtattgtttttcactaaagagcccttgttataaaagagatgcttcgtgagtcagctggagacgaggtttcagctgtcgcaagcacccctgagccctgtctctgtgtccctgtgacaccatctttgacaatctgacctctatcctccagagaatggctgagaaaaatacatcataagctggagttctcatgagataatgttcaaaactagatttgctgatctcaacaatcacaactggtttctttgggtgggtcaggtgttagttcttacagaatagaaatggcaaacactaaatgtttcttggccaaggattccatggtcagtccaagcctgtgatacaggtgccctaccagtcattaggcttgggcatatatatatatggcatatattcatatattaggaggaaacaaactggttttaggatctcattctgcacacacacacacccttggaaggagggatagttctgggaggggaggacatggaattaacttgtttgcaagttaggccatgggaagaataaaagcagcttgaggaggaggagtattggggagattccccaaagaaggggagagcacttggtttggtcagattggcatcactgaggcccacagtcaactcctctatcctggttatgacccagggctgatggacctcaaagtggaactggtacatagagagtagcagggctgggccagagatgcaggggtttcagccgcagcagactcatataaggagatgctgtggatgtactgccccagatgcccccagcccacctctaggtttgcctgtagccactttggacagttcacataaacactgacaagctcccatcttaagtgcctgacctcatctaaggctaacttctcctcttgtacgttttatcagccatctcctcagagatttcaattctgcaattacagttgacctttaaacaatgcagaggttaggagcacagtcaaaaatccacatgcaacttttgacttccccaaaacttaactacaaatagcctacttatcttagtctgttttgtgttgctgtaaaagaatacttgagactaggtaacttataaagaaaagaggtttatttggctcatggttctgaaggctttacaagaagcatggtgccagcttctgatgagagcttccagcttcttccatccatggcagaaggcagaggggagccagcatggagagaggggaagcaaggagaggggaggtgtcaggttttcttaaacagccagttctcatgagactaatagagtgagaactcactctccctctttctagggagggcattaatctgttcatgaaggatgcatctccatgacccaaataccttccactaggtccccacctccaacattgggatcaaatttcaacatgaggttcgggggacaaacatccaactatagcactaccattgaccagaagccttaccaatagcataaacagtcaattaacacctactttgtatgtttcatatattatatactgtgttcttacaataaagcaagctagagaaaagaaaatgtcattaagaaaatcataaagaagagaaaatatatttactattcattaagtggaagtggctcattgtaaaggttttcaccctcatggtgttcatgctgagtagactgaggaggaggaagaagagaaggggttggtcttgctgtctctggggtggcagaggcagaagaaaattcatgtataagtggacccacgcagttcaaacccgtgttgttcaagggttgactgtactatgattcaccttcagtcatcaatttctctctatgtattggattatacccattagcatataaaagccttcacaggattaatattttttttaaaaagaacactccttttcacattaggttcaccaataacttactttttaaaaaactaataatcagtacctgttcttattttagtctacttttaatactttttgacacagtaagccacactgtctcccttgaaagcttctcttctctagattatctatattccacattcacctggttttccttctgcctcattgatttcctactcttttcattcctcccaaattccaaacctcttactattaaagtgctggatagctttgtccttagttcttttctcttcactgtctccttggaaatcttcaattccctcaagtccaaatcccagctgtatgtaaatgactttcaaatgtaaatccctgagcttcaaactcctatatctagtggcctattcagcatctccacttagatacctactgggcatctcagaattaatatggcccaaatcttttgtgacctctctaaattctaaaagtactccacctcatcacactcccactcatgccttttccatcttgctaaatagaaccaccacactctctaaaatctcagacctaaaatctaggttaattccattattctctcacacctcccataagtacatctcatcagcttcacctcaatacatctcccaaatcatcatccctactgttacaaatctagctcaaggcatcatcatcttcttcctaaatcattgcaatagcttcctaattgctctccctgcctcttcctttgaccctgcttcccttttctccttttgcagccagagggatctctctaaaacgtaaatcagacccacattactcctttcctttaaatccttcaatgccttcccatggccttaaatccaagtttcttctcataacttttaagactttacataatctgtttttttttgttttgttttgttttttgagacagagtttcactcttgttgcccaggctggagtgcaatgtcatgatctcggctcactgcaacctccaacttctgggttcaagcgattctcttgcctcagcctctcactgggattacaggtgcctagcatcatgcctcgctaatttttgtatttttagtagagacagggtttccccatgttggcaaggctggtctcgaactcctgacctcaggtgatccatccgcctcggcctcccaaagtgttgggattataggtgtgagccactgtgcccggcctaatctggtttgtacctcttagtttttgttctttttcctctgtatttggagactgttttttaagaaaaccttctcctgttctacttgtaaaatttttgcgccattgtattttaagtgagtctcttggaaatagcatataactggattttgttcttttttaaaaaaagtcaatctgaccaaatctattaaaaattgattcatttattctacttcttatcattataaatgtatgtggattaatttctaccatcatatgttttgctttttatatgtccaaatttttctatgcatattttttcttagattgagttgtttttgcttgtttgtttgttggatttcccccatttttcttgtttggaagctgtctactctatgtctggtcaccttaacaggttctgaaagtaagttttattaaggtacaattcactgtttttaagtatacaattctatgaattgtcatataaagtcatgtaagctctaccacaataatgatgtaaactacaacgagctacaactaatcagtttcctgtacctataattttgcctattccaaaatatgacttaaatggaatcagagagaatgttaccttttcagttcagattctttcacttagcataatacattcgagatttattaattcatgcttttgcatgtaagtattccattgtatagatgtgctactgctatgtcttgaatctttgtgatccctccccaaattcatatgttcacatcctaaatgccaagctcatgatattaagaggtggggcctttggaagattattaggtggaggtttgagggtggagccctcatgaatggcattaatgctcttataaaagaggtctgagggagacccattatcccttcttccatgtgagaacacagtgaaaagtgggctttccctagacactgaatctgtccctttctaggacttcccagccttcaggactgtcaaataaatttttgttgtttataagctacgtagtttatggtattttgttatagcaatctgaacagactaagacaatcacagtttgtttattcgcttaccagctaatggacacttaggttgtttctgatttttagtgattatgaataaagctgataaaaaacattttcatacaaatttatatgtgtacatacattttatttatcctgggtaagtaaatacttaggagtaagattgctggattgtatagtaagtgcatgtttaaggttataagaaactctccaattgttttccaaagtggctgtaatatttgcattcccacccccaaagactgagagattccaatgctcagcatacttgacaacacttagtattttcaggactttatttttttagccattccaataggtgactagggatgtctcattatagttttaacttgcaaatccctgatggttaatgatattgagcatcttttcatgtgcttcactgccatcctatatcttttctggtaaagcacatctcagaaatttttgtatattatgttttcatttaatttaattctgaatattttctactttcccttgtgacttccattttgaagcatgagtatttatttatttatttatttatttatttatttatttatttttgagatggggtctcactctgtcacctaggctggagtgcaatggcttgatctcagctcaccgcaacctccgcctcctgggttcaggcgattctcctgcctcagcctcccgagtagctgggattccaggtgcctgccactacacctggctaatttttgtaattttagtagagacagggtttcaccatgttagtcaggctggtctcgagctcctgacctcaggtgatctgcctgccttagcctcccaaagtgctgggattgcaggcacgagccaccatgcccggccagcatgagttatttagaagtgtattgtttaatgctcaaacactaggagttttacaaatatctttcttctgttggcctctagtttaatttaactgtggtcagagaatatacattatacaatttcaattgaacaattaagtttattcaagtttgttttattgcccagaaaatggcttataatgacaaatgtttcatatttctttgaagagcatgtttattcttcttatatttggagattcatttctgccattaatcttagaaaattttctcttcaaaaatttattctctcacatccactatgatggctataatcaaaaagtctggtaataataagtattggcaaggatttggaaaaattggaatcctgcacactactggtgggaatgtaaatggtgcagccactttggaaaacagctgggcagttcctcaaatgaaacatagttaaccactcctaagtatattgccaagagaaatataatcatacatctacacaaaaacttatgtgtgaatgtttgttggagcactattcataatagctaaaaaatgaaaataactgaaatgtccatcaactgatgaatagataaatgacatctagtatatccaaagcataagatattatttggccgtaaaaaggagtgaataccaatacatgatacaatgtgaaagaattttgaaaatatactaatctataaagacggaaagtagattaataattgcttagggttggtggggaggtattagagggatagggagatgatagctaaagaatatgaagtttctttttgaggtgatgaaagtgttttaaaattgactgtgatgatggttgcatatatctgtgaatatactaaaaacagttgattgcatactttaaatgagtgaattttatagtctgcaagttatatctctataaagctattgcagaaaattattctccccttttctctttagtctcttcttctgggactacaaattgatatataaaaaattggttacaacatcttactggttacatcatccaataagaacactaagaataacttaatgctttaatttgtagtcattcttatttcatcgattgtcagtaacatgtttttatagtgctttttaaaagccagaatctaatcaaggttctcaaattgcatttggttatcatccctttttagactcttttaatctaaaacattcctctctccttttattgtttgtttgtgtgtgtgtgtgtgtgtgtgagagagagagagagatactggcctttattttttaattatccaggtgactttttcatggaaaatcatccactgagtttttaatattaactattaactatttttcatttccagaaactgtttttttttcaaattgatcatttgaaatgcttgttctttgcttatgtttttctattctatttttccttgtttaaatattttacacacagttagtgcatattctatttctaagaattccatcatctgaagttcatggaagtctaaacgtctgttgtttctgatggctctttcagtaacttactttcttacaaactcagtaatttttaatcgggatctcctatttcagtgaagtaagatccagatagacctgcatagaaggtacatccctctaggaaaatttgtgtttccttttatggggatccgagtacgcaatagagggccattttagtttcatttctcagtttgaagtttccttactctccgggatagaataactttgaaccccagactagtattttctccagctggaattggaattgcagaatacaagttttcattgtggctaccttttctagcctgttgtttcactgaatgtgggggcctcatcttgtgtgtcttcccccaatcttgtgtgctctcagtgtagtctctcctgtgccccctgtgaccactaaccccccgaagcgctagacttctaacagtgtttgcctcagggcagacccagcttcaccattagcttaccaggcgaatgcatcagttcaccaggcggctcttgactcatgtggatctcccctatttttaggcaacttcagctatgcattaaaaaataggtagcaattgattctgcaccaggggttctgcagcaggaggattttcagagtaactgatctgccacattactggaagcaaaatcctctacctaactttatgacctcatctccctggaccctcaccttcttcacttcatgccagccacactggactatagctcaaacatgtaaaagctcacagctgtctcagagccttttcacctgttatttgttttcttgaaaagactcttttcttcaattcttcacgtggtcacgctttatcaccattcaggtcttagctcaaatgttccacctccagattctcccctggtcactctcagttattaatacgttctcttatctcagctaaatatttctgtgtagtacttcccagaacctaaggttattttgtttattgatttgtttatgttttgttctctagaatgtaactgtttaagggcagggaccctgttctagaaaagtgcttggcacacatagacactctaaaagtaaatatttgttgattggttgggtaatatctctgttctttatctcctgctgaaataccttcctattctctcttgcaggctggaaaccagggccatgttcatagtcccaatagttagcttactacagcaaggtcaccactaaaatgccatcctgtgtgttctaacaagcaaatactcaacctgtgtgtatgtgcaaatatgtgtgtgtgtgtgtgtgtccatttacatgcatgcacacaactgtgatgtaagtttagaaaatatatctagttgtacaagccacacccagaccccctgaattatttaacaaacaaaagccatgatttaatccctcccttagcaccccagggaaaccttagggaagggatacagtggaatgatctctttttaagtgtatagttcaatgccattagatagtttttaaagcattctatcagcatggctacaagggaatctccaaatttcttttttgtgtgtatgtgtatgttaagaaatattagttttatttaaccagttttcacagctgaatatttattctataaaaacttcccagattgtacggtttagatacagttcaaactactgaatgaaaaggtaggtcccacagatgcaaaaatactgtaccaatcaatccaaggtaaaggcagatttacacactgtacagctctccaggtggctggggagttggtcaattctaagtataaacttcaaaactgtaaaaaaataaggatttggttttattttgctcttcatacattcagtatgattgcaagctcagaagcctaactaataataggcatctgtagtctggaatcagtacccactcctggaaggagtgcacatatctatccatacagggcactcttggagaccatactgaactcagtatattgtatagacataaaagcagagaccaagaacattaaatgttgaatataaggtagttctttttttgttttgaaaggagtttttgcatttaacaatgtgccaaaagaattttaacttattaaataaatatattctaagtgaacctaaatatactttataaacataaaaatactttattttggtgtaatacatcaatcgtatctgcaaatagaaaaccaaaactgtctataaagtagtatttctcacccagcaacaagaagtacttatgtagttatttttcaaaggggtcagaaaaactttaaaacccactaaagactaacttataacttagatagtcatacttaagctattcagtgattcactaataccgcaaaaaaaagctttcttctagagacagtggtttcttcatgttaactgggtaagaactggacatatttaaaaaagaaggggaaaccaactgtttccctctcaatgctcacaagggtctttctggctgcagggaagcaattaattcactgatggaagtgtctttgaaacttacatgtttggttttttactatgaatgaaaaaatgattacccttttactgaaagtgctaaatatttttgcaggtttgtaatatgacagcaatgatgttgatgatcaaaggccatttaagcatccaagactttcgagtcaggatagatgtgtgattcatgtcttaaacaggggcgatattaaaaatattaaacaaccatcatggcatagatgccagccacagcacaggacacggagcctcctgtcgtgccaggtcaggttggtggggtggcatcagtggactcaaagcagcagctgttcaaaactgatatgggaggacttcaatattttaacaaccaatatgtattggctatgtatcagccttgatcttatgggactgtggctggtctgagcttccagagaccttagaaagcatctagtcctgaagtttccatgtttattcttaacctacagaatctaataagctatagcttgtttgtaaactagtcttaaactttttgaacaatgcctcttggtccctttcccgtatattaggattgatttcatccatatgtaatcatgaatttcagcaagtgtagctgttataaacagctttcttagaagcctgtttgctttcagaaatctttgaaaaatgacttctcatggagaactatctctgcagagaatgtctcatctatcaagtgaagaaatacaacctttctctttccccattatcggggaacacctcttaaggttccatctctcaatactgccacatggggggttaaatttctttcttttttttcttttcttttttttttttttttttgagacagagtctcactctgttgcccaggctggagtgcagaagcacgatctcggctcactgcaagctccgcctcccaggttcacgccattctcctgcctcagcctcccgagtagctgggactacaggcgcccgccaccacgcccagctaattttttgtatttttagtagagatgggctttcaccgtgttagccaggatggtcttgatctcctgacctcgtgatctgcctgcctcggcctcccaaagtgctgggattacaggcgtgagccactgcgcccggcctatgggggggttaaaaaatgcgttttggagaggataaatgttcaaactatagcagaaggcatgactatacatggtcctgttcagagtgcgctatgccttattttttaaaaaatttctacgtatcttataaaaagcacaatttaaacacaaatgtataaaatatataaaattttctttaaacttatttcagcatttcttcctttatgtaatatattccaagctccctacacacctgccaccaaaaaaaaaaaaaaaaatacataaaataaaggaagaaagaaagggagaaggaaggaagaaaagaaggaaagaagaagaacacagaatacagaagaagaatacagaagcaggtccttgtggatgcacagttaattcagaagcctcattttggccataagtttctgtttggccctaggcttcttcaagtcttttaccagaactgcacataaattcatgtgagggtcaccttctttcttccttcctcttgaccacctgggacaggggttgctgtgatataatgggaaaaggctgacttttagaatctggagacttttggagaagacaaattaggcaattcctagcaagtacctacaatatacagtagctgctcaaaaatgtctactgaacctgaggtttttagtgggcagggaatggtcagccaagaggaaattaaagaaggcaggagagcctgctaattcacaatctggataatcagacacaatacttaacgtccacaaattcattcagtctttccatggaatgcaggcacatagtaggcttactatcataccttatcataccttatctgaatataaaattaagacacccttcttagggaccttctggagatcttctccaaaatatttttaacatttcaattacagcttttccaaaattttggccaacatgggaattgtttagcaaccacatcaaggggaaatataaatatctttttaataattcaactagacattcagttttttaaaaaataaccttttcacttcatcaagtgcaaactgtaatgagaaaaagagatggagatagatttggcattttgcaatagggaaaaaaaaaacaatgaacaaaaatactgcatttgcagtaagaggaacaacagttgaagtttgggaattattgggagggggtgtaccaacaaaagggcaggaaagaaaaactgttttacaagtgagatttcttagcttccagaaatagagaaagtagtttatatactcctgcacatttgtatagacttgcaagatgtgctttgcttaattcttaggttatattgtttatgctgttggtatgcagaagaccaatgctgttttaatatgtatgctgttaacaaattcctccagtctcagcctttgcttatgatggtggatggagacaagcactagaatttcaaagatgttgagtttagagtcagaagggacattaaatatcaactcctattctttgggctaaaaaatgtatgtatttttttttctaactgcagtgtaaaatgtttcttattttctaagagatgtcagtcaggaatagggtcacaagccatattgaagggaaattctctatttgaaactacaaaattctgtgttgaactctgggcttagatattcagattgaaatatattgccaggttattgtaagtatgttccatgtgagaaaatatctcctcccagatggaatgtacctcttagatttttcccaacttgtttttgctattgttggccttttcaaagtttccaaatattgcagacttttcaaattcttattgtgtttctcccctcccttctggatgtcttgactggagagtcatgttcaattacttgtacacattcatctgttattaccttctgctcattggagggttcattgttacacatctttcttgctgatcataaaaaatcctttctcttgacctggagtttctgtgacagcaaagctggatcacttgtccactgctcctgtgcatccaggaccctccttgggaatgaagacccttccgtggtccctcctgtctccctatctccttgaccattctaccatccaaccaactgtacacctctctaaatatggaatgctgcatgggcaatgcagccactctattcaaaatgacgactttactccctttttgtgttttcctgtgatttcttatggtgtagctagagcttccacttcatttaaaattaacttttgttaaaaaggaaaatatgctgaactgcttaatgcatttatcagttcattttaattttgattcaacaattatctgcaataatataacaagcccatattatctatttataaagatgtgtgtgtgtacagtgaaacgttgtctctgggtggaaagagctgaggatctgagcagcactcatctgctccaggctgcatttgaggctgggggaccatgtggggccggaaacacactctgcctcatctgcatggcttgaattctatttcacacatttttgaaggttgcacatttccacagagctcctcttcaatccagattcccttttccctgtaatcccctgttggtgctttatctgtgaataattttttaaatgaataagaatagaagcaaggcaagcaggtgtttctttttcttttttcttttcttttttttttttttttttttgagacagagtctcggcccaggctggagtgcagtggtgtgatcttgactcagtgcaacctccgcctcccagattcaagcaattctcctgcctcaccctccctagtagctgggattacaggtgcccaccaccacgcctggctatctttttccttttctttcctcctcttcattctcttatcttgttttccactccctttgtgatcaccttctctgacatcttaattcttcctctgttcagaatggaaaatgctgtggtgtagataaagcccattccaggaggtctgggagggaagcaacaagctgagttgagagggtcatgtcactggccttgcatccccatagggctcaagttcagagattatccccagatgaggtcatatacatgtcacagagctacaccgaaggactgaaagaaggtgtcttagttgcttataagggaatccctgaaactgggtaatttataaataaaaagaacttatttcttacagtcatggaggttgagaaatctaaggtcaaggggtcacatctgatgaaggccttcatgctggtggggactctctgcagggtcccaggtggcacatggtatcacagagcaagagggttgagcatgctagctcaggtctcactcccatttcttataaagctaccagtcccactccatgataacccattaatccatgaatggatgaattcactcatgatggtagagcccttgcaactgacccaatcacctcttaaaggtcccatctctcaatactgccacatggggggttaaatttcaacatgagttttggagacggtaaatgttcaaactatagcagaaggcgtgactacatatggtcctgttcagagtgcactatgccttatttttaaaaaaatttctacgtatcttataaaaagcacaatttaaatacaaatgtataaaatatataaaattttatttaaacttatttcagcatttcttcctttatataatatattccaagctccctacaaccctgccaccaaaaaaagaagaaaataaaggaagaaagaaatggagaaggaaggaagaaaagaaggaaagaataaaagaaataaagagagaagggaagaagtagccatagactggctctctctcattctgagaggctctagctatggaacaaaagaaagaggaaagggttggctgactcatggtcctcctggctccaccactgaccagcctgggaccgtgtagatactaccctgtgagcgttgccgtgctcagttctgtctgaagtgacagactggaggtcttcatggtcttctccagaggcagcaattttccacaattctgatggaccctttaaatatgcaacatgtttaaagttagggctttacactctagattttttatgaagaaggggtaaaaaaagaacctgaacctgattacttttccctgacttgccctggagacccttagagagaaagcacttgtcaaacatcacttagagcagccaggtttagcaatatagctaagtcaggctaccaggagtgaagccaagcaagggattgaggacttaactaaattctccagcagaggcctgggagactcagtctttagagaagcagtgactgtatcaggaatggaaattagctgaagaggctggtgaaagcaggatttctcatgacaaatgtagatgtgaccagcaaggggttgtgcctacaggaagaatacagaagcaggtccttggggatgcatccatcatacccacaaatacttccttaaaagctacctttaaataatggaaaatgcatttcaatgtatggagacagtgggagcccgggataggcctagcgtatgtagagtagtgagtgagcctcagtgtctgttgagaggccagatgtcttcacaggctgaagctgactgtgaaatccgggcctgcttctcactttgtccatcacagcaactctgatagtaaataatttccctttcccctttcagagcttgccaattctacactctttatactttcaaccagtagtgggtttcagcattctaataagtgctccatgtgagtcaaccagcatgccctgggatccaggctgtgggaggcaaacaggtttcagcgaagggatatagcagtagatggggtggtatcatctgaaatgcaaacccttgtgcagcatactctagtagcatttatactgatattttactaaattaagttgagcaatttagtccatccagaaatctgaaattcagaacaaaatgttgataaaataaaaaaaaaaaattagcacctgagcatgaatgactgttgtcatcattgtgtcattataatcacaataaggatgataccctgcttgtttggaaagcaagagctgaacctgaagatatgtatagtcctttaagaatgacgatttaagccttgacctctactccttaggccagccagtgtagacagaggaaaaattgtatttctgtttcacttatctagggctttctatgtaccaggcacttcacccactttatccccttcattccttaatataactctatcaggcatatgcagttattctctccatctggcaagtgacagtactgaaggtttgtcacttagctggtaggggaagatgcaggactcatattcaggcctgactacagaactcttgctccatcctttgtatactattaccccaatcttgaatcctggaaatccttcagagttaaaagatggtggatgagaggacgttggctgaattactgaagtatatgcttgtagaatataacaagcaatgaaagatctgttatattagaggttattgtgtcagaaagtgttcatattagtagaagacaaaagcctgcatgcgtgtatcccacttatcctgtgtcttgtaggattctataattctaagatttgaaggagcttttttttttttttttttttttttgagacagggtctccctctgtcacccaggatggagtgaagtggtgtgatctcacctcactgcaactttcgcctcctggcttcaagtgattctcctgcctcagccccttaaatagctgggactacaggcgtgcaccaccatgctgggctaatttttgtatctttagtagagatggggttttgtcatggtggccagactggtcttgaactcctgacctcaagtgatctgcccgcctcggcctcccaaagtgctgggattacaggcatgagccaccactcccagcctgaaggagcattatagtatttaattgaatgctctcatttttaccaaggagaaaactaaaacccagagaggttggcttgcctcagtttaccgtctcatcacagcgtaagttgcactttctccttcctcacccattctttcctccagacatcgccaatgcaggaccataggctaacagcatccttaacaaccctggttatttccttgattgagctctccctaatcaaggcacggccctcatagaagggaatttccaaaaggctgcctgaggctgctgatcaacaattcatttttagcgtttctttttaaatcactctaagttgttgcacctgggtcacagtgacagctgaataagggggctgagcggcaacgttgttctgggcaccaggttggtgagccccctccgccatgtatatgcatgagttctccatttgcataaagcgcaaaagcatcactcccattaatcactgcattcatcttaataattagtggcaataatgttgaagagtggtggtctccacatcgatttctgaggcaccatgggctatttctgttgcagatgaatgatcatcaagagtgacatgttgatgtctttggatcgaccaccccaattccacgtgctttacagcctggcagctggtcaggaagctctggtgatctgtggggctaatgctgtccctctaacaagaacagtaaaaaggagtgatgtgacacctgggaggggggtttaggaaaaagcccctgaccactttaaggggtgctctcttagccatatgcatagtaaactagctgtaactaactgcaaagcaagaggctatttgtcatagagattatgactccatggataagtacttgaaaggctaccacttgctctcagaccttctccataaaagattgtcttggggtctgtaatttgccaatacttctgggtcaagagaaagccatttcagatcagaaatgtaatagaaagttttaaggcctgtggtacagtgccaaagaggatggaagtattaataattttcatggtttttttaaaaaggccctatcaggtaaaaaaaaaaaaaagaaaaaaataagtcacaaaggaatccacttgaagatttgaaaagaaactacaaaggacttcattaatacaaaagggaagaatagtcagagaacaaaagaataaggaaggaggaaacgaatggaaaggcagggaaggaattataatagtgtcagacaagggaggctggtgaggaaaaactaaggaggaattaaaacaaagactcctcaactttctagatccacgagatcatcctggatatttcccctttgaggagatgaagacgaagtgtgagtgacagagaaattcgggtgtgaggtgtaaatgttttaaaatgtggtaatttatcttgcactctgggttagcagaaagccatcagcacagcttcaggttgatttaggaaatttgataatacgtatttttttgccttctcaccttatattcaccggtaaatgacagaccctacttttatgatctttcgttctgtcttcttcaaaaggtgaggtttatgcttttatgaaaattaataaaaatctcctaaagagagtgcaggtgtttccaatggctatttatttctctaggagtatattcaaatacaactgtccttcccccgacgtgacataaagagaattctctgcatcccctccactgctgtctgtactagcaccttgtctaggagaaggacagcacattgaatccagttggtgtctgcacataaatcattctgaagaaaaaaagttttaatttacttaaacaattgggtattttgtacacaactagttgatctcaacaattatttttccaagatgtatgtggggtgtgtgtgtgtgtgtgtgtgtgtgtaatgaacagctttgtgtgaaacacagctgactaaacttttgggacaagataatgaccctcaaaactgagcgctttgagaatttgtttgttgctatacctccttttctcttctttgcagcattatctgtttttggcatctagagaggctttgttacacctccatgctgggttctgaagggaagggtacaattgtaaaacatcgaataaacatgtgtgcaaataaacactagggctgacacttgtcctcctaaatgaagtccacaaagatgagctcttgcgtgatcctctgaaccagttccttcctggagataaagggtgctgaaaagaaagtatgtcttacatacaggtttggagacaggggaaggatgctgggctgtgaacaatagcatccccaaggagcccttgcaatgtggtagctggagggcaaaggaggggtgctaagtgatgcaggatctggccatctttgaccccaggaattacagcatttgaaccaacaaaggaggagcacaataggcctctacctgagggtctggtgtgcccattctggccttagagtaggttgaccctgatcagccaaaatgccacaggcctaggatgtggagtccttgcagtgaagtgtttgtcttgtgtcatctgagtaaggtctgggcattttgcaaagctagattttccctctggacccttctcccctctgtgtcttgctgtgtctggtttctttgccctatcgctcagtatctggcatgtgtatgggtgtttttaattggatcctctgaaatgcatttctgacactgatttggttatattctattctattctgttatcaaacaaatttgctgtcaaataaaagatcaatgttattgtaatgtcctacttgatggattaaatagggtattattcaactcttattaaacaatcaagaaaaacacactgggacatgctttcattctcagctgctaacaaatacagtgtatctgatctgtgattaagaaacaaagcaggagtagttattttcagattaattaaacaaacgagtaggatttagggaccaggatttttaaaacccagtacaattctttgaaacatgtttgaaaaaggacataatttactttaactacatgagtgaacacttaagaatataaaatctttcaatgacgcaattctggattaattgcccagaactatcgcggtgccataaacaaaaccgttccagggacagacctttaggaagagtttttttttttttttttcttgtgagtaaatgtccatttagagagcttttctaaatttagaagcaacgttcatcaatcatttataataagcaccgaagaactgcgctcgcctgcctgagacgcagccccctggtgaagagcggtccccgaccagggctgtgttgccggaccggcacccactccattaccagcgtctgacctttgtgttcctccgacttcactctcgagatgcccagagaaagcaaatattaaatcagtagaaatctccctcttatctcaggctgcctggctctatattatctttagactcccccttccccacgccaccacccggctttacatacagttggctacattttggctccttctgtctgatgctgtttccgctaatggctgaagaaatggaacattacaccatttaacgtgtgtgggtcacattaatcacagaaaattcttttaatgtctcagaagtaactgtcaaactggacatactgaatctatttaaactaaagcatgccattttttatctacagtgatctttaattcccataaaagggtcaagaaaatgtgattaagtgacagttttaaaatgtactataatattaaatagcttgattaagtgacaactataaaatgtaatacaatattaagtatctggctatgtcccaaaagaactttaaagtatttttgaacggtttgggaattcactaacccataatgggttacgaaggaatttttttttcttttggtgggggacataaaaacagttgaactgaaaacacacactaaaaacaaaacaaagggaaaaagtcctcagcatttacagagaatatagagttgcagagcctctctttggagggccaaagactgggtttttggtaatatggagattaagatcatttgaagattctgaatttgccagtgcttgaccagacttgtaatgcctgtgacacagagaatagaatcaaagatagttgtggtagggggacctcacagctgaatggaaaggccacagactagtcagtgacctcccgggtgacctccaaggggctgaccatcagcaccccagattcctgacttacctgtgtattgcaactcagttcccatcagggacagcataggaaacaccaacctggcttggtcctccagctcggtctccagtagagtaagccagtggagacaccaaaatacttcgcaatgtcaggactataatgggagtcagtcatggggtccccattagggagctgaggttagaaggagacaattctatggaattccgaggagaaatgtctggatcaggtgcccaggccaaataaccaaagacattcatgccactattcagacagtgtactaactcttctccaacaatcatttggtcacattttagcctgggatcccccagaaagcataactttagtcaaagttgttgtgctattattctgttagaaggtacagtctcagggagcaggggtgaggggacagggaaggaaggagagccagtattaggatgtcttacccctctggctgccactgaagtctgactaattgcttgttcttgcaggactgtgccccaaggaagccacacaaactgtgtagccagacagtctgtctgggaggagaaggaaggaatttatctaccagctcccatctctcatggaccaaattcttccccactgtacataactccatatcactttcagattgcataaggtgggtgtttggtgggctcttgggcatcctgcttctctgtagcaacagggaagccctgagacaggaggccaggtgggtcaggtggagtctgcagagtgttaggtggagcccaggcagaacaggttgctatgggagtgcctggtacaagaagagtctgggaggaactgaaggagcacattaagaacttctctatccgggtcagaatcagatggaggcactcagtaggtagtatagttcaccagaacatttccatatgcccctgctgacagaacatcaatggaatcttgatgtatcctggcttttctccgaagcataagccactctccatccccagcgagattttggactgggtaccatggacaagtgcattgtctcctctaaaaactgtaaagtagatgataagttttggcgatgtttagcaagtgggtgagcctagaattgcagacatgtgctacgctccctttaagagcctctcagagcccccacagagatctcagaaaagggttgactctgacttttaaggacactcgtcaagagaaagatagaaagccaagctaggtatcatgactggtcccacagtgacagagatgaatagccgtgacacatttatgtaggctcgcctttttctctgggtgaggatgaagcctcatttggaagatttgctcatctgtctaataaatcagtgcagaaagtttccctgatatttactcaggactttctttcccgtcttcatttcattccatgcctctgattgctcatcctcagaccaggctacataaatctcttctctttcttctgcccttttgtcaaccattagcctgctccccctctgtcattgtttcaccagactatagatgtaactcttctaatcttccctgataaatcaggctctcagaatcactccttgttgctccctcaaactccctagagctgggatatagggctctgagggcctggtgcagacgtttcttttataatgggccctgaaaggttgtcagctgcagataattaggatctcacttgccgccatcgagctgcatatatcttccatgcaaagaacccccatcaccttcaaaagaattaacacatacagaggagatatacgaggggctggctgaccggaggatggggccagctcttctgaaggccaaaactcttcgtgtttcatgttgagagagaggcattctctcaggagaggaacctcgccctcctcacacttcttcatggtaaaagcctcacactgtgtgtctggactgtgcatcatggagtagtgagaagaatatctttttagctaaattattgaataatagtgctgtccctttatgctccaccctattctctcggtctccctattgagacaaactttagtcttgcactgagagctcaagtatattttgtttgctgtctttattttctaactctgataataattggctcacatcacttgtaaacacgattcagtctttcttccttccttccttcctttctttctttccttctttctttccttccttccctccctctttctttctttcttccttccttccttccttccttccttccttccttccttccttccttccttccttccttccttccttccttccttccttcctttctttctttctttctttctttctttctttctttctttctttctctttctttctgacaggatctcactctgtcacccaggctgtagcgcagtggtgcgatctcggctcactgcaacctctgcctcccaggcttaagcgattctcctgcctcaacctcccaagaagctgggattacaggcatgtgccactaccgtctggctaatttttgtatttttagtagcgacagggtttcaccatgttggccaggctggtcttgaactcctgaccttgaatgatccacctgccttggcctcccaaagtactgggattacagatgtgagccaccatgcccggcccacgattcagtttttctttagtagtttctcagaactaacaggtatatagcttcaggaaaactgggtgggctgtcaaatggatatgacatcagaatgcaatgttgcccccaaagttagcctggcacagagaaattcttctcaggcaagtgatccattagacctcagggtccagcatggttggggttggagatgatacccagagggagggagaaaagtggcatgggttggagattctccctccacaaggagaagagcagttttatttttactcatattatatattaagattccatctaagattttatattttttaaaaggggaaaacaagcttgaaaactactaatgctatcaccttgtacctgaggaaagaggcccagagataggaaggacacatggcttgctagtgccaagccaaatttagaatccacaatctccagtaccttggtttttcattgttcttcaccgaccagctgcaacataatcttcataataatgttcttgagtattgccttggaatcattaggaaacagacaggcctatatattcccagggactagcgttgatgataaagtgctctttgtggtctgagatgctcctgctgacctgtgcacttggagtgatttttctggtggtggagacagatgggcactgagtcaccgtcacgatcgccatcctttaggaggtaattggtgagtctcaggggtgtgatatttgaccatgaacctcagcaaagggaactgacaccttaagggagaaagtgcaatgtggcctggatctcattggggtcactgtgggggctaaccatagaatttcagacctagattgggtcatagctgtctcccagcctaactcccttttttttaaaaagctgaagacatcaaggcccacaaaggtcaagtgattttcccacacagaggaggagggaattcagaactagtgggcagcaggcattggttcttgtttcttggctggatggagcctaattagtctactctcctattgccctttccacccggtccagtttaagacagggttgtggataaaggtgtctgctctgcagactaaaatttccttgagtcaactgttcctgggtctaaataggagagagaaagggacattgaggaagttatcaaaggtgctcggttctcaccctaaagtatgtccttctcctgggtcttttcatcaatgaggatggtcgttgagcctccaaatattaactggtttttcttatttcatttgattcagcacttgggggaggaagaaaaatattatttattgggtgccctcatattcaagtctcaacattctactttctggaacttatattaacagcagctgcctgctggaatctccaggaatcttagtccatttccccgcagagaatggagcctgttggagttgttcttaataagaatcctagtggtcggcatcattccttgaaatgggtgaacgccaaagtcatagtgggttttgactgagattccttttctaagatgggtctttataaacatttttaaagaataaaacttgaaacaaatggaaggcctcattcccaccaggacttcaaataccaacatatgtatcaaggaatctattctatttgataagtcagttcaaagtgaccaggaaatagcaacaaggagccaggcatggaaaccagcatttggtgtttagtgaatattacacaccatctgtatgtgggttgctctccaaaatccttgagttctgaaacatctctcttccttttctgggttttttttttttttaaatcagacatttgtctatttttagagattcagagggctttccctgattaggtcaaagtatcacaggaaaaaaaaataataaaacactgaaaggaatccacctatcaagaaagcatcttggccaaagataggagagacgagggaaggaggtcctggaggtcatgagaagagtgagcaattaatcagaaggtcaaaggtctctctgagaacaccatggtgctgtgcacagagagtcacttattattgagaaaggcaatgatttaaaataagcttcctcatctggaaggatgagaataatatccacctcatagagtattatctcggggtaacatgagataattacgtttaatgctcatgaactggaaaacgctttgaaaatacaacataggattaagagaggttgttcgaaaccctgaaaactgcacagcctcctgaaagagtggaaactagatgcatggcctgttgtagggtattctgttaactgatttgcaagaggcttcttggtctgccttcctctttataacttcacagaaggtacaaagcaccagtacagccccctctaagagcaggcatcagttctgactggctctgttatcttaaaacaaaaacaaaaacaaaaacctttctggctgggtgtggtggctcatgcctgtaatcccagcactttgggaggccaagatgggcagatcacctgaggttgggagttcgagaccagcctgaccaacatggagaagccccgtctctactaaaaatacaaaattagccgggcgtggtggcccatgtttgtaatcccagctattcagcaggctgaggcaggagaactgcttgaacccgggaggcggaggttgtggtgagccgagatcgggccattgcatttcagcctggccaacaagagtgaaactccatctcaaaaaacaaacaaccaaacaaacaaaactttctaagagcaaataatgtaaataatgtatctgtcacccattgcacagtgcctaaccttccaccaccctctaaggagcatctccttagggcccttgaagatgggaaggattcttcacaagtgcaaatgactggaaggcagccagtatctacagtgttgaggtttctgtccagctaaaaaaaatctagaggaaaagcactgagtgttggaggaaatgggtggtgaagatttcccttgaatggttctcacatcagatcagaggggtgttggggaggaatgttaattttttgcctacagactaaaaataatggcaattattagtgaattaaaatattcttaacctttaacagaaagggaacctcccagaatgcagatgttttttcactccaccaacatttattgagcatctagtatgtgttgatctctatgatgggagctgggaagacatagctgtgaagaagggcaagcatctctgtggacctatttcctagtaggatgacaagaaggcaggcattgtctcaaaccagggcatgactctcccacaaactctaaaggaagctggtcagtggttctccttttaatttgcataatctgtatggtttgattctgacatctgaggcaggtaagatttttcattttttgcctgtcatgccacttgttctttgtgtttattattattttttaataaaaaaattgttgctgggcatgatggctcacgcctgtaatcccagcattttgggaggccgaccacggcaggcggaccacgtgaggtcaggagttcaagaccagcctagccaacatggtgaaacactgtctttactaaaaatacaaaaagaaaaaattagccgggcatggtggcaggtgcctgtaatcccagctactcaggaggctgaggcaggagaattgcttgaacctgggagatggaggttgcagtgagctgagatcacgccactgtactccagcctgggtgaaagagcaagatgtcgtctcaaaaaaaaaaattgtttactttccagtgtcattttaacttgttactagtgagcatctggcctgggtgttttccattagcatgaaaattcagaaggctacagaaggaaatacctataattgagcagcgagagagccacttcattctgtggccaggcaatatgtcttgcatttctctagtgtaaataaaatgatgattcaaagaatggtccccattaatgagtatctgatttagaataaaacaaaatccatgctgggaagttgatgagcttgattttgctgaattgctttgagcttgcagcttatatttattggttctttcctttcgacaattgtcaccagttgtctgctgttctttcgggagagggcttgaaggttgattttagttccctgtaactggaggtgacatgtgaaagctcaaagctattgaaaaggtaggtgattattaaaatgtaatgtgtttctgttttcctgattatgacctcccagtcttgcaatttgctgccaagcacgtgccaaagctggagcacaggtggcgaggtgtctttcaggctttgggagagttttagatcatattaactattgacttattcctttttcctaatccttttcaatagtagacatgctgaaaaattaatatacagggagaaagagatgcatggttatctacgaggctgtctgtgaagagagagaaggaaacggagtgagagaaggagaaaaaaaagagaaagggagagagaaaaacatggagcgggggtcggggggagagagagacgacagcacataattaagcagaaataacacttaaaaacaattggtgcagaagggtattttccagaaaagcaatagagccctgtttgagcacatgctccacttgcattaaccatgcattaaaattagaggcaattcacttctgcacattctctgttggttccttgttaggctccaactcaccactccaatgtgcttgatcagatgagaatgactggagtagggggctctggaaactctaaatgcctgtcttataaaaagcaggaatcacagtcaagtgagaaaacagttttattggaggtaaatgctgggtgccctacacaggggactgggactcatgatcattagggcacagacatgatgccttcaagagagctgatggaaaagagcggttagttttccagcacgactgttagaattaggcaagctgggtcaattaaaagagcaggtgctctgtagctagttagctgtgtgaaggatttttttggcttgcgggagcctctgttttctcatctatcaagtgggactaatacctatgtctaaggaataagcaatgtccctatgcacccacaataattcctagcatactgcgtgtatcagttatggaaaactgggacttcatcaatagataatatagatatttaaattagggtagactccaagagggaacatattctgttacatgtaggctgtgtccatagggacaaaacaaaagaattcatatcccaagcctcctgcctttatgactgttttctattcttattcatgtgatgactaatttatgttcataaatctcagacccacctccccttttctacaccccctgcaaagcaatattgaactaaaagctaccaaatcattatcccttcttctgaactggggaaggtatacaaaaatatagtctctttacttaaatgcacacagagactgtggtgaaaatgacacgacacttaatccatattacttcctcccatttcaggggcagaagttctcctcacacacaaaggacactggtcccttaggaggttcttgtgcagatctggatggggagtgtggggtcctcacagttttcatgggcatctgcctggactgctcagccctcccctgctacacactgtgatcatgcagcaggctgggtcgggaatccctggaaaggagcatcacgtggagctccaggagggaacaggcttacaacaaaagccaccctctccgtgaaatcagatccatctctgcccctggggggcccagtggcagttgagcatgcttatagatggcataaatcacttgcagaacctcaagaaacaattaactcagattgaaagtagctgataaggtttcactgccttgcgtgtttatgtcctttgtttcagcttttggtcttgagacggggaggattaaaattgtttcaagggccaggttgcaaggaaggaccagtagttaagtcagctacacttagctgtactggcccttagatgtggcatctgtttcacattctaagcaatttgaatactcacaggtttgccttcttaaaataaatgtacacacccaccctaccccacttccccctcaagaaacaccagaaattaattgatctttctgagaagtcaacctgacaatttagagtgggtcaatagacttagatgtagagaaaatgacaattctgtagttagatagataaataggtaagtgagtagatgggtgggtggatggatggatggatggatggatagatagatatatagatatcctaaaaatgtcttgcagaaagaaaccaggctaccaacagagaagactttgtatgtctgtttagacccaccttgtttttcagagatggaatcctgccatgttgctcagggcagtttcaaactcctgggctcaaatgatcatcccgccttggcctcccaagtagctgggactacaggcatgaaccaccaagcccagctcagctccttcactttagatttgataaggcatcactccatcactcaaccattgcccaatgcaggaagagctcatggaaatgctgagggctggagaacacttccatttgtaaagaactatgctaagagccgttgccttcattttgggaagagtacttatgtatttttctaattataaaaccaatataagtttatggaaaaaatttggaaaatatgagaagtattctacaacattaaaattatcactagctctactctctgatattttaatgcatttctttccagttgcaaaggcttccacacacaactgcagtagggagggcgcaggaagtgggtcaacgcttttggaggactgggtgaagttcaggatcctgaggccctactttttggtcgcccaggtgagacgtttcaaggctggacctaggggagacctctgttctgtgcattttttcatccagaggaggatgcttagaccacattcttcccatagtttcagtcctcaagttctgcaagtttttataagcagctgcaatggtctttagtccaaggtcttcataagcagttgcaattgccccagaggtaggggaaagctaaatcaatatttaatcttttttgtttctttgttttcctctcttagaaccctgcagacagctctttattctctttttttttttcctttttgagacagagtcttgctctgtcacccaggctggagtgcagtggtgcaatcttggctcactgcaacctccgcctcccgggttcaagcaattttcctgcctcagcctcccaagtaactgggattacaggtgcgcaccaccacacctggctaattttttatttttggtagagacagggtttggtatttatatgtttttggtagagacagggtttctccatgttggccaggatggtcttgaacttctgacctcaagtgatctgcccaccttggcctccccaagtgccgggattacaggcatgagccactgcgcctggctctaatataatagttgtacatatttagtgggatacatgcgatattttgatagctgtatacaaggtttaatgaccaaatcagtaactggtatacccatcatttcaaacatttatctttgctttgagagaattacaaatcttttcttctagctattttgaaatataaataaattattgttagctctaatttacctactgtactatcaaatactagaactcattccatttctctaaatgtatttttgtaccccttaacttacttctcttcatccctcctccacccttcccttcctagcctctggtatccacccttttgctctctacctccatgagatccactttttagctttcacgtatgagtgagaacatgcaatatttgtctatttggcattactaaaagcccctgtcttacaatgggagaaatgctttggcagaaaaagcacagagctgagattcaggggtcctgggttcctcctaccccatacttggttgtgtgatcttgggcaaattgtatcctttctggagatggggattggggcagcagggagaaactaagtcaatggcttttgcgtgggaatgggaggacagctgcacactataatcaccttgggagctttttccaaattgaaaagacaagatctgtaaaaattctccctagtcaagccctttgtgactcactagggatgtagagggagtgaagagggttggtagcagcaggtgggggcatggctgtggggaccaggaggccacaagcttcaggggaggaggctctttcttctgtttctgttgagcagctgtgtcacccaggcaacattcagcaccagccatctgagagatcaccgcagttggggagagggggtaggggagaaaaagagcaaagatgctgctatgaaccaattaggtggggaaaaaaagccaactcttactctgtcttctgttgctgtgctatgttttgcctagagacattgaccatgaaggaagaaaggcgtccttttctttttcctctggctttagtgtccatcaagacaaattatttctctattctagttttttaattttctagaaaggaaggaaagcctgtctctggagttagattattactgttcttatcatttccctgtgctcttctaacttttttagttatccatcttctttccctcttcaatagagttggcaggacctaagttgtagggaccctccatagtaagccagaaaaaaacctactgatagcacatggggaccctccatagtaaaccaaataaaaacccattgatagcatgtgagatgcaagaaaaccaggaacaaatgcaccttttcccacattattttggggccctgttataaaagtctagaccagtttgggtttagcagttagttttccactcaaaaaatatgaaatgcattctatgttcttgcaagacataaccctgttacttccactaaaataagactgtgttaaataactttaccatgtaggaggttggtaaagagggggaaaagcttttggaacttgtcacagttacttgggttaaatgcaggaaagaataactgaggaaatagagcttaaagattattttgattttcatgagcatttacactttttcttctctgaatgagaagagtttttattctttggcctcctcaataagaaattgggcacctagtggctgcttagtaatatttatatcctgaagttttatatttaaatcagaaatctttgatgtagttactcaattatgcctcatgcaattgaaaagccccaaaccagcaattggcagcaacacttgtacagatttggacatcaaattgtgatggaaacctgtgagtgacttcaagctcactgtgagccaaggtgtcaaggcaacatgaatgggtccagtggataaataaatgaatgagtcctaactttggattcagcagagtattgacttgaaaactgcattactaaatcctttatcaggttacagcatcagatagtccaaaaacatggaggaggtgtaattaatcaaagaacagtcaatagagtactgggactccaagcctatgtgaacctgagcaggttatccatttttctggagacttttacacttcctataaagtggtaatacttacattaagaattgtcctgaaggtaaaatgatatgaccaatcttctgcatttagcatcaaggctggtcaatgaatgcttaagcaaggtgactattattactgctgttgctgttactgatatcagtgcagctgacattccgtattcccaaagtagttactaatcatgatagacttacttcagagaactgtaagagcttcaaggcttccaagggtgatacagttttcaccctgcattttcatctacaaacgcaacccctccacagacttctaaaaaccaaattcaagtaagtcgcagatgctgtgctttccagcaggataatgtcaagtaggtattgacttctgagtctgtgtgagtacattatggcatgcctaaacccctcatttttatcattttattttacagggtgagagctgaatgtaggctccaacaggaagacggcattgaagcctggttgcttgttactactcagaatgccatctacaaaaggaaattatgtaaaaagcaataaagaaccccttttgttcttgcaggagtcagtgtttcataactctttctgtgatatcgtctgtataagttgaacctctaaagtaagtttttgtctttttcctttttgtttgttttatttgtttgggtgttttgacttaagaaaacttgcctttttgattattatcaccacatgttggatggttaggggtctcttggtcattaataaactttactttagtcacatctgtagttaattggaatggacacatggttgttcttataaatttcaaatacatttaagagaaatgaataagaaatctacttcaagtatccgtattagttcttcaaggtaccctgggaaaaatatttttattgtaaagttcctttatagaatggcttaaaaagcttttagttgcttcacatttggcctggaatagacttttgctcaagctagatttgcatttatgtcataaattagaaatttgcatttatgtcgttgggtttaggaaccttatctaagttgccacgaccttactcattaccctcaagaaagatgaacaatttaaagggggaaaaaaggaagtgaaaaaaatggcggatacgaggcagaactaacctgcagcttccactcgaagggacagagcagagtgtggagacccacaactggaactttttctccaagaactaccacaggaacataccaagaaagccaagagaatccacagaacctttggaggaagtggtttgtcactgcaggctctgtgggacagctgaggaactgtgagtctgtttgctttctcagttgggaggcttgtagccagctgggaggcttgtagcctggggcaagttctcagccctgctcaccagctgcttggagataaacttggggtctgggggactgagaccagccttttgggctgcgggctctggcagagtggggtggggggcgggcgggggaggcatggggactgagaccagcctcttttgggctgcgggctttgagggagctgggtaagtcctgtggctgcccgctttctcccacttccctggtgacctgtgtgagcagtagaggcagccataatcccttgggagcataactccattggcctaggaaccacccccatcccccacagcagccacagcaagccctgcctgaggaaagtctgagctcagacatgcctatccctgcctgcacctggtggtctttccctacccaccctggtagtcaaaacaaaggtcataatctctcgggagctctatggctctgcccactgcctgagaaacttgaatacttatccaaaggcgaccctaggacaagcttgtatcctccctatatgaccaccactaaagcgctcttaaaagtgccacctcctggctggaggccaaccaacacaaaaccagcacacttaacaaaaatacaacaaaggaccctcacagagtccacttcactccctagctacttccaccagagtgggtgctggtatccacagctgagagacctaaagacagaccacagcacagaactctttgcagacacatcccagtactagcccagagcctggtagctccgccgggtggctagaccgagaagagaaatgacaatcacagcagttttgctctcaggaagccccatccctagggggaaagagagagcaccacatcaagggagcacccccgggacaaaagaatccaaacagcagcccttgagtcccaggtctttcctctgacatagtctacccaaatgagaaggaaccagaaaaacaattctggtaatatgacaaaatgaggttctttaactccaaaagatcgcactagctcaccaacaatggatccaaaccaagatgaaatctctgaattgccagaaaaaaattcagaaggttgattattaagccaatcaaggaggcaccagagaaaggggaagtccaacataaagagaaaaaaaaatgatacaggatatgaatggcaaaatgtctagggaaatagatagcataaataaaaaacagtcacaacttctggaaaccaaggacacacttagagaaatgcaaaatgaactggaaagtctcagcaatagaattgaacaagtagaagaaagaacttcagagtttgaagacaaggcttttgaattaactcaatccaacaaagaccccccaaaaatgtttttaaatgaacaaagcctccaagaagtttaggattatgtaaaatgataaaacctaagagtaattaatgttcctgaggaagaatagaaatgtaaaagtttggaaaatatatttgagggaataattgaggaaaacttccctggccttgctagagatctagacattcaaatacaagaagttcaaagaacaactaggaaattcgtcacaaaaagatcatcacttatgtacatagtcatcaggttatctaaaatcaagatgaaggaaagaatcttaagagctatgaggcaaaagcatcaggtaacctataaaggaaaacctatcagattaacagcagatttctcagcagaaaccctacaagatagaagggattgaggtattatatttagcctccttaaacaaaacaattatcagctaagaattttgtatccagcaaaactaagcttcagaaatgaagaacatatacagtctttttcagacaaaagctgagaaaatctgccactaccaagccatcactacaagaactgcttaaaggagctctaaatcctaaaacaaatcctcataatacaccaagatagaatctccttagagcataaattttgcaggccctataaaacaataatacaatgaaaaaaaaggtattcaggcaacagatagcacaatgaatagaatagtacctcacatctcaatactaatgttgaatgtaaatggcctaaatgctccacttaaaagatatagaatggataagaactcaccaaccaagtgactgctgtctttaagagactcacctgacacataaggactcatataaatttaaggtaaatgggtggaaaaagatgctccatgcaaatggacacccaaactaagcaggagtagctattcttatatcagacacaacaaactttaaagcaacagcattttaaaaagacagagggacattgtataacgataaaaggactagtccaacaggaaaatatcaccatcctaagtatatatgcacttaacagtggagctcccaaatttataaaacaattattattagaccaaataaatgaggtagacagcaacaaaataatagtgggggaccccaatactccactgacagcactagacaggtcaagacagaaagtcaacaaggaaacaatggactaaaactataccctagaacaaatggacttaacagatatttacagaacattctacccaacaattggagaatgtacattctatttatcagcacataaaatattctccaagatagaccatatgataggccacaaaacaagtcccaaaaaatttaagaaaattgaaattatatcaactactctcttagaccacagtggaataaattggaaattaactccaaaaggaaccctcaaaaccatgcaaatacatggaaattaaataatctgctcctgaatgatcattggtaatcaatatggaaatttaaaaattcttttaactgaatgataatagtgacaaaacctatcaaaacctctgggatacagcaaaagcagtgctaagaggaaagttcatagcattagatgcctacatcaagaagtctgaaagagtacaaatagacaatctaaggtcacacctcaaggaactagagaaacaagaacaaaccaaatccaaatacagcagcagaaaaaaaaaaaaaaaaaaaaacaagatcagagcggaactaaatgaaattgaaacaaacaaacaaaaaatacaaaagataaatgaaacaaaaagctggttgtttgaaaagataaataaaattgatagaccattagtgagattaaccaagaaaagatccaaataagctcaattagaagtgaaacagtagatattacaattgataccacaaaaatacaaaagatcattcaaggctactatgaacaccattatgtacataaattagaaaacctagaggagacggataaattcctggaaatacacaaccctcctagattaaaccaggaagaattagaaactctaaagagaccaataacaagcagtgagattgaaatggtaatttaaaagttaccaacaaaaaaaagtccaggaccagtcaattcacagctgaattctataagacattcaaagaagaattggtaccaatcctactgacagtattccaaaagatagaggaagaggaaatcctcactaaatctctctatgaagccaatatcacccaaataccaaaaccaggaaaggacacgacaaaaaaggaaagctacaggccaatatccctaatgcacatagatgcaaaatcttcaagtagctaacagaatccaacagcatatcaaaaagataatacaccatgatcaagtgggtttcataccagggatgcagggatggtttaatatccacaagtcaataaatgacacaccatataaacaattaaaaacaaaaatcacatgatcatctcagtagttgcagaaccagcatttgacaaaatccagcattgctttatgattaaaacctcatcaaaattggcatagaaggaacataccttaaggtaataaaagccacctatgacaaacccactgccaacactatactgagcagggaaaagttgaaagcattccccctgagaactggaacaagacaaggatacccactttcaccacctctattcaacatagtactctcgaagtcctagccagagcattcagacaagggaaagaaataaggggcatccaaattggtgatgaggaagtcaaactgtcactgtttgctgatgacatgattgtatatttagaaaaccctgaagactcctccagaaagctactagaactggtaaatgaatccagcaaagtttcagaatacataattaatgtacacaaatcagtagctttgctatataccaccagcaaccaggctgagaatcaaatcaagaactccatctcttttagaatacatgcaaaaaataataataaaatacttaggaatatacttaaccaaggaggtgaaagacctctacaaggaaaacttcaaaacactgctgaacgaaatcatagacaacacaaacaaatggaaacacattttatgctgatggatgggtagaatcaatattatgaaaatgaccctcctgtcaaaggcaatctacaaattcaatgcaattcccaccaaaataccaccataattcttcacagaactagaaaaacaatcctaaaactcatatggaaccaaaaaagagcccacatcgccaaagcaacactcatcaaaaagaacaactctagaggcattacattacccgacttcaaactatactacaaggccatagccaccaaaacagcttggtagtggtataaaaatggcatacagaccaatggaacagaatagagaacccagaaaagaaaaaagccaaatacttacagtcaactgatctttgacaaagcaaagaaaaacatgggggaaaggacaccgtagtcgacacatggtgctgggataattggcaagccacaggtaaaagaatgaaactgggtcctcatctctcatcctataccaaaatcaactcaagatggattgaagacttaaatctaagacctgaaaccatatacgttctagaagataacattggaaaaacccttctagacacgggcttagagaacccaaaagcaaatgaaacaaaaacaaagataaataggtggaacttaattaaattcaaaagcttctgcacagcaaaagaaacaatcagcagagtaaacagacaacccacagagtgggagaaaatcttcaccatctgtacatccaacaaagaactaatatccagaatctacaaggaactcaagcaaatcagcaagaacaaaacaaagcatgccatcaaaaagtgagccaagtacattgacccagccatcccattactgggtatatacccaaaggattataaatcatgctgctataaagacacatgcacatgtatgtttattgtggcactattcacaatagcaaagacttggaaccaacccagatgtctatcaatgatagactggattaagaaaatgtggcacatatacaccatggaatactatgcagccataaaaaatgatgagttcatgtcctttgtagggacatggatgaagctggaaaccaccattctcagcaaactatcgcaaggacaaaaaaccaaacaccgcatgttctcactcataggtgggaattgaacaatgagaacacttggacacaggaaggggaacatcacacacccgggcctgttgtggggtggggggagtgggagggatagtgttaggagatatacctagtgtaaatgatgaattaatgggtgcagcacaccagcatggcacatgtatacatatgtaacaaacctgcacattgtgcacgtgtaccctaaaacttcaagtataattaaaaaaaaaagaaaaagacaattttcaaaagaagatatataaatggccaacaaacatatggaaaaatgctcaacatcactaatcatcagggaaatgcaaatcaaaaccacaatgtgatgtcacctcactcctgcaagaatggccatgaaaagaataataatgataggtgctggtgtgggtgtggtgaaaaggaaatacttctgtattgttggtgggaatataaactagtacaaccactatgaaaatcagcgtggagattaaagaactaaaagtagatctaccatttgattcaccaattccactcctgggtatctactcagaggaaaagacgtcattatatgaaaaagatacttgcacatgcatgtttatagcagcacaattcgcaattgcaaaaatgtggaaccagcccaaatgcccatctgcccatcaatcaaagagtggataaagaaattgtgatatatacacacacacacacacacacacacacacacacacacaccatggaatactactcagtcataaaaaggaacaaaataatggcatttgcagcaacctggatagagttgaagaccattattctaagtgaagtgactcaggaatggaaaatcaaacatcgttgtgtcctcactcataagtgggggctaagctaggagggcacaaaggcctaagaatgatacagtggactttggggccttggggaaaagggtgggaggagggtgagggataaaagagtatacactggatacagtgtacacttctccggtgatgggtgtttcaaaatctcagaaagcaccactaaataacttgtttatgtaaccaaacaccacctgttccccaaaaacctattgaaataaaacaataaaaataattttttaagtgaagggtaaaaagacaattaggtcccaaagtagagagaatctgataaaaaaattttgcccagttttttgtcacccaacattcaagtttccatgaaagaaatcagctctgctgaattaacactggagacatatttcatgacgtcctttaaccatctctcaccagataagatgaggattcgataagcaagagaaatgttttttaggactgttttgacttcgtgtttgtgtatttaaacaaaacaaaacaaaacaaaacaaaacatcactaatctatcagaccaaggtgggttttgccattaggaaatgacggtctgagccatgttgggttgagagagcagattgggtggtgtggcttgttcccgctgatcaccaacaaacatgcttctcccaaggttagagggcaaccacaaagccattaaaggccactcctctagagccaactgccatggcttatgcagctatcccccctgctatctctccagggtcacaaagaaaaggaaacaggaattctgacctgacctccacaaatgctcaaatgccatcacctgctattttgacaccaatttgtcaagtagttctcaacctaaaagtgcatcacaattgcctgggttgcactttataaaggagattcagaataggttttgactgagcaagtctggggtagggcctagaagtctgcaattttagtaacaaccaggaatagtgttgatgcatgtggtatctgaactagacttttggaaacatcagcccagcacagtggttcacaaacctgaacatgcatgagaaccacttgactggcttgttaaaaacccagattactgagtccaatctccagagtttctcattcagtaggtcagaggtagggcccaggaatttgcatttctagcaagttcccaggtgatcttgctgctgctgctgacaggggccatgctttgagaaccaatgtcctactaaaacccagaaagaatgcctctttaaagcactgtcgactaagaaggtgggatactccttgagaaaagaaaaaagcaaatggacacttactgagtatctgctaggagaaggtaactggaacagtgaaatcatatttattttcctggtcactatttttttaatgttttttgcaaatgagaaatccaaaggttggaccagttatgtgacatctttaaaggtcacatagccaactaaaatgttttaaactatttttttctttgagtttttgtagttgtacatgcagcaatttcaggtagctttttgcccagtgaggttgctttttattgcttcccaactcagcgtagacttacctagttttgccctgtggaaggaaaatggcattcctgccacacattctgtctgatagaggaacatctcttctggaaagatggctggatttcctcgcttacatttaccattgcaggggccaagaagtttatccagaaggagaaaccatcatacaattagcaagtcaagtcataaggcactgatttcatttgtttatttatttattcatttattagttcagttaaatatttactgagaacaactgtatttgctgggtattgtgcaaggcactaataataacagaaagactcctggagtgaagccaggaaatcagaactgtgtgctgtcttctccatgtgcaagctttgctcctgggtaagtcccttcagcttttggggtgtcaatcatctccctattagcaaatgcagggagggagatgagccttggtgatttccaaggctcctttatttttgtacactcctgagtttatagttcaactctcacaatgtacctaacctttgtgctgtggagtgagtgtgtggaaggaaagcttgggggatgtagaaagaacaagaggcagaaggaagagtccttgtctttggaaacagagaagatcaaaatatgcacatatgacatcactggagaaacttacaattcagcatctaaccccaaaggagctcaggtagtacagcttcttatgggaggagcggtcaaggatgggggaatataaatgagggagtgaggaatggtgaggggtggactaaaggaatggagagaggagtgaattcagcaaatgtgacctcagaagcagaaacttttctgatttcactccccttcacaggccagcgtcctctttcctgtgttggtcacatcctcaaatgcctttggggctggatgaacagtcggcttgtgggtaagtatgccaggtttagcacataaaaatataggaagcccagtgaaatttgaatttcagatcaacaacataattttttaaaggatcaataagtcccaaatattgcatgggacatacttatactttaaaattatgccttgttgatctgacattcaaatttaactgagtgtcctgtattcttttttttcaaaatggttttattcctcaaacctctgcatatgccagtcccttgttttgtatcaccggatcttatcaggttgcttcttataagaaaagctcagctagactcctaattagactagatatcctcctttttgctcccactttgcatttcttttatatatatatatatatatatatatatatatatatatatactttaagttctagggtacatgagcaaaatgtgcaggtttgatacataggtatacatgtgccatgttggtgtgctgcacccatcaactcatcaattacattaggtatttctcccagtgctatccctcccccagctccccaccccaggacaggccctggtgtgtgatgttacttgccctgtgtccaagtgttctcattgttcaattcccacctatgagtgagaatatgcagtgtttggttttctgtccttgtgatagtttgctgagaatgatggtttccaggttcatccatgtccctgaaaaggacatgaactcatccttttttatggctgcatagtattccatggtgtatatgtgccacattttcttaatccagtctatcgttgatggacatttgggttggttccaagtctttgctattgtgaatagtgccacaataaacatacatgtgcatgtgtctttacagtagcatgatttataatcctttgggtatatatgcagtaatgggatcgctgggtcaaatagtaattctagttctagatccttgaggaattgccacactgtcttccacaatggttgaaccaatttacactcccaccaacagtgtaaaagcgttcctatttctccacatcctctccagcatctattgtttcctgactttttaatgattgccattctaactggcgtgagatggtatctcattgtggttttgatttgcatttttctgatgatcagtgatgatgagcattttttcatgtgtctgttggatgcatagatgtcttcttttgagaagcgtctgttcatttcctttgtccactttttgatggggttgtttttttcttgtaaatttgtatgagttctttgtagattctggatattagccctttgtcagatgggtagattgcaaaaattttctcccgttctgtaggttgcctgttcactctgatggtagtttcttttgccatgcagaagctctttaattagaccccatttgtctattttggtttgtgttgccattgcttttggtgttttagacatgaagtccttgcccatgcctatgtcctgaatggtaatgcctaggttttcttctagggtttttatggttttaggtataacatttaagtctttaatccatcttgaattaatttttgtataaagtgaaaggaagggatccagtttcagctttctatctggaaactctatgctgtgggggaacatctcaggacctgggcatagacaataaggggacaggagccccattttattacactttggctgttccctgcttcttaaccaatggcttacttagaatgcctaattttttttttttttttttttttttttgtggccagagagtagaaagaacccagcttccctttcgtctgctgtgcaccctttcctcaggctgggattaaaagcagagaaacccttggcatcctcttctgtcataaacctgctcaccaccagggttaacctgaagtcatccggcagcattagattcctctggagcttccttcccctggtctgggaagctcctcgctacatacccgaaatctctctgcttgctctctcttgcctcagctgtattctcatcattctgcagctcagtggtgtagaaacagcagaaagagtgagaacagctggaagaggagctttctgacaccagtggggtagggactggctgggttatttttttctagttctgtttttgttttcttaagaaaaacggtctctcgctttccctccttccaagcctacacaccaggtctttgggttgatttttgtctttattcctcccatcttcctgtgtagtcatttttgccctcaccttgagatccttgagtttattgccagaaggaatttggctttgcctgctgggtgggctgtcttcaaggatgcctgcaatccagaggctgactggggaccctgtgttagtcagggttctccagagagagagagaaccaataggatagacagagagacatataaaatgatattagttataggaattggctcaggcaattatagaggctgcaaagttgcacagtctgctgtctgaagactggagacccaggaaagccagtggcataattcagtctgagcctgaatgcccaagaaccagggtggctgatggtgtaattcccactccaaaaccaaaggcctgagaaccaggagctctgatgtctgaggtcagaaacagatgtatgtcccagctcaagaagagagagaaagagagcacgttcacccttcttctatctttttgttcacttcaggcccaccttggtgagggcagaccttctttactcagtctacccaattcaaatgctaatctcttctgggaagaccctacagacacacccagaaataatgttttaccagctgtttgggcatactttaatcctgatgagttgacatacaattgtccatcacagggcctgagcagtgcaatccctgtatgcattccaggccatcttattctgtgtaatgcaagttaaaaaagattttggggacacaaagtagtatctgcactttcttccttatgtgattaggagcttcagatgggcagacaagctccattcattaatttattccaccaatacctcttcagtgcctactttgtgccacaacaaatgttttcaaatgcagctctgtgtatgattactcaggagatatcaactcaagcttattgtaattagtctgttctcatgctgctatgaagaaatacccaagacttgttatttattaaaaaaaaaaaaaaagaggttgaattgactcatagctctgcatgattggggaggcttcaggaaatttaaaatcatggtagaaggggaaggaaacacgttcttctttacatggtggcaggagagagaagtgctgagcaaaggggaaaagcccgttataaccatcatctcaggagaactcactcactgtcaggagaacagcataagggtaactctcccatgattcaattacccccccacaaggtccctctcatgacacatcgagtttatgggaactacaattcaagataagatttgggtgaaggcacagccaaaccatatcacctataatctgctgtcatgtgcatgatatggtggggtgtgacccaacttacagcaacctgatagccagcctggaaaatgccaggactgaactttggccttcctaccagaagggaccaggtgctaggaagtacaggttggtgggtaaaatatggcatcagaagaacaaggtaacagagaacaaggtaacaaggtaacagaagaacaaggtaacagttatggcaagatgtcaggtggaggaggccccacaatccagggaagtctgttagcaactcaagccttagctgtagaccaggtcaggagcaggaactttcctgagaggaagaagagaagcccacagaggagggcaggagggcagccctagagggcctgggaacaactcaggttttaggctgaggcttgggtgtaaggatcaagacagaggctgttacctggtttatggcaaaagaaggggctgggtctcagaaacaagaaaaatgtcctcccttggcaaaacaggaacaaaagttgggagccacagaagcagcaagtgattgcaagtaatcaaaatctgaagttaaaattgcttaaagtctacttttccaaaatcagaattgttcctttgggttccatgaagctgagcctgcatgtgtggattaagcggctttagtagggggcctggtgggatggatgggtgctggacagagcctaccatcgctatcaacccttgtgggtttttgtgatcacagatatttgatgagtgtttcaggcattgaaaagaatttctatttggtgaaccaacccaatcagactagattcttggaaaatctatatggcaacaactttaaaacttcatccagactggagaagcagatagaaggcactgattttctctagaaacgggggcttgagcttggtccctggggatggaagaaaaccctggaagaagccatcaaaacctgatataagctgagttatgatacacagtggtgtttgccaacctgttgtggaaacagctctccctggaaggccatgcaacggtctttgcacggccaagggctggagacccaccatggatgtggccctggagatgagtgaaggggagatattcctggcacaggcctttaggccaagcaggcaaggccctcaagtagtgatggagtgaaatgccagcaggcgcttctctcctctgagcttctggattcagcgcatgacaaagccagctgtatctctggtgatacatgactgttaccaagctgtcaggtacatggagccatctgagcagaaagatccatctacggtcgagtgcaggtgaagcagaaatgctgggtgcccagcactagctagaagggctgggttgaagacgtggaggaggcatgtggagggagtatctgcagcttcctctaacaggagagaggccaacggtgcaggaggaatctccacagattcaggggccatcgacagtgagagtgctccccagcatcttccctgagagcaagaatttgtggcagcgactaatcttcctttgccctgccttctttatcccagaaaagccatacagccagccctgggttgaaagaaggtctaagctattacacactctcagaacttgggtcaatatttttaaaggtcctggaatagagatttataggtgaggcttccctttggggctgtgaatacaacttatctggcttctaaagattctaaaaatgtatcttaagtgtgccatatacttacccacattctgggacaaacagctctaccaggtagacatcctggcctagcccacagcatgctgatggctggcttcagcagctctgggatttgaaggcaacagacatcagtgtaaaattctggaaggcagcatcactgttctttatcctctcatgctggactatcttagtgctccagattggaaagttaatgcaatgtcaaaagaagcctggactaggaaaggatagtaaggtaataattctaaatggctgcctatatcttttgactttttagaagtattaggatagccaatcgctccacttgaatatcacaataatcttatggaagtcagttcatttttattatctgaatcatctcaatgaagaaactgaggcccagaggggttaagtggctgccctgagtccacacagctaaaacagtccagggctcttttggctcccaaaatcaagggcatgtttcagatgcttgatgggttcgttggttgttcaaattgtgctttgcattctctcctatgatcattaaaaagaggcgagcatggttatttgcctcgttgcaacattgaaaccttcatgttgattatctccaagaatttcggtctctggttgcttcaacccaaggattttggttcctgggtcttttcttcaccctttctcatttcactcacagctttaatcctaggcaagaaccttaatttttatttaggcttttgctttatataaggtactgtaattagttccttactaatttaaatcatttattccttataataaccctatgaagggaaaactactatcatctccactttaccagtattgtaaaccaaggccaggaacattaagcaattgtccaagaccacacagctaggaagtggaagacgtaagagttgaacttgagttggtagccttgagagtctgccatcttaatcactgtgctatgtcacctcttttaatctagagcagtggttctccaaccacagtgagcctcatgagggtccctggggagcttgttaaatcatggcttcctctcagagattctgattcagtaggtttggggctgggcctgagaatttgcctttctaataagtgatgatgcccatgctttgagagccaccaatccgggagctcccagtgtagtcacttgagaatcagctgggagagcttttgaataatgaagactccagggccccattcctagatatattttgattcaacagattttagaggagggtgtaggaatctgtagctttacaaactctactggagattccagtgtgtaactggatacagagacttctgaattaatctcctcatgactcagtttctcatctagaaatggaaaattaacctaagaattaatctgtctatacaagactgttgactagtgcaaatgaggaaacagatgtaaatgtactttgcaaagataaaagatctatttagaaataattttttggtccactctggtggctcacacttgtaatcccagtactttaggaggccaaggtaggaggatcatttgaggacaggagtttgagaacagcctgggcaaaataaccagatgctatctctacaaaaaataaaaaattagataagcatggtggtgtgtacctcccagctactggggaggccgaggtaggaggttcccttgagctcaggaggtcaaggttgcagtgggccatgatcgtactactgcattccagcctgaatgatacagcaagaccctgtctcaaaaaaaaaagagaggcagtttactgtggttgctaagcagtttactgtgagttttggagtaggaccagcctgatttgtgttccgactcctcccttttcacctttaaatcctaaaatggaaataatgatagtcttgtcatagcagttgtgaggattaggtgaaacaattattctactgtgtttagcacatagtaagtactcagtagagtattattttatgtgttttatgcattgtttttattgtcctttcttccttgctgacagctgtatgtatacagcttgtgtgattaatgcaccttaataggcctcttcctctcttcttaagggcccatctgttccttgggtgagtccagctttctttatttgccttcttatatgctggccaattctcttttaaacatctgtacacatccatgtagtctatgaccttagagtcttattctttattttgcttgtctaattttggataaaatggtaaagaacaatagctaacatttgtgtctctgtttagagttttacaaaacactttaatatacgttgtcttattggataccaaggaataaaatgatgatgatgatgataacgataatgactataaatgatcattgctttttacaagtgggacaaacaaatcatacagagaaaaagttattgcattatatccccaaaatttaagtgttagagacaggactcgtcctgtctatgctccaatcctatactagactaaagagagaaatatttcatctgttgtatgttttttctttagatgcatattggctttttacccctactcatctcccctcaaaaaagtactgttgaaatttttagtttgaattccagtaagctgattaattaatttttgcaatattaaaactttctacccaagaacatagtttgccccaccagttcccatcttctatatcctttggtcaagctctgcagttttctttatgtgtggtatacatatttcttattaagcttattttaggtattctatacttttacattaatttggatgagctcatttttttcttttttttctagttgattattgctgacatttaggacatctatttatcttataaatctgttgattttgattactattttatagtagttactccagctaaacttggttagaagtaatcatttttttcagtaaataatcttcttgggttttaaaagcagaaaaaatatataattatcaatgataattgataattgataattttttattctttccaacaaattaatgtaaactattttttgttaatattgctttggcatggatacttttgtagaattagagacagtgaggaagttggcttaggtttactctttattgtcacaactaaatatgctctgaagattaagccacttgaataaagttaagcttcatctcctgtgactatctctagaataagaacttttgaaaggtttgcttgctttgataggtttcttaaaatatagttaggtatatcctttaagcttgttcaatattaaataggaaacaaagaggatgcaattttcacatttaagtagccagtcgttcactggcttgattgcaagaaagcaagcaaaattatttctggagcgccgacataaaattcactgactgaaattaatttactaactgaaaataaattcactgacagtgaatatgatcaagcttacctacgttttgcattgataataattggtatgtttttttttgcagcataataaagtatcaagcaatagtacattttttcataaaatataaagggaatgactgtgttgcactttgttttctgtgttccctgggacaggacatatgattgtcaaacagaaataataattatttatattgataaatatttaaatatttaaagtatagaaaagtagaactttaaaacttcaaagaaggtcagagtttaaataaggaaacagatctagagatctgaaacaacctatagaattcacctatgcagcagtggttctagttctagttcttctagttctagaaaagaactagaagccagatttcttgactctacattcatctgtattcagacaattttaaaaacatgcctgatagataattaccatttggtttatttaaaatacaatacaatacttgccattttgtttatttaaaatatgattaattgcattaatggttactgatggtccccagtcttgccaaatcatcatgacttcaaatagccagtacttcatagatcattgtactttggacgtacatttgaagtttccagggtcattcttccaggagcaaacctcagcccaggtcctgccagatcacatttgtctgcatctactctatggatggagaagatgcaggaagaattgtccccattgttctacacagggcaatgtacaatggtggaagaggagccatgtcttcttttcaagtcaaaatcagagaaccagctattagataggttcatcttgcctatctttcgttgaaacacagtagcattacaagggtaattattagttatctttagaaacttcgaattaaactctgaaaaacaaaccaaaggtttttcatctctaccttagtagatcaaacaggggctgccagacctatattttatttaataatccttatagctgacagcgttggttggctcaatcaatacccactccaatttatttagctgtttcttcctactatacacgttggaaagctaaaaactacatttcccagactcccttacagctaggatctagacagaaagccttggttccaccaattagagccatcccatttgtgacttggagaaataaaagcaagtagctgtgcaaagaaaaatgggatcttctggataagaagatttttttgtgagacagcagtggcaaagcgcttggagtccaatctcaaaggtgatcagtgcccagagatgggcagtggtatttcactataacagccctggattcctggatgctttggttctgcctgtctgatgaacaaacctgggtctttgattatcctagagagtctatgttcttcctaatatcctttaatattcctttctgcttaaattgtccagacttgacttccttattgaactaagagcaataatttatataaccttagtacttctacttataatcatagctaatcataacattacaatgtatctatgtaacatttttacatatacaaaatagtagtgacactattgtgatgttttaacctactatgtaacaggtagttttctaagcactttacacatattaacttatctaatcctccattttaatgatgaggaaacacaaatgtggagaggataagatgcctgagatcacaaagcaagcaagagagggaagctcaaatgtaaacctaggcaattcagctctgtaactccccgagctctactgcctgacaatcttatgaaaaaagtattattattattattactattttatagaagcagaggtgaagtacattcagagacattcaatgacaggagtagttcagctgttaagtgacaaggcatagtggacccaagatctccagaatccacatccaagggtctttctgctacatgccactgctggtcagactttcaccctattgcttattt

SEQ ID NO: 5635 - DNA, 78835 bp, Homo sapiens
  CREG2 gene - 101423741 - 101462575 of chr2; NCBI Entrez Gene ID: 200407; Build 35; sequence includes 20,000 bases upstream of initiation codon and 20,000 bases downstream of termination codon of the gene
ctcagcctccggagtagctgggattacaggcgtgtgccaccctgcccagctaatttttgtatttttagtaaagacggggttttgccatgttggccaggctggtctcgaactcctgacctcaaatgatccacctgcgtctgcctctcaaagtgctgggattataggcgtgagccaccgtgcccagcaggatccctgtgcttttgtactctcattgtcccttcaacataaaaccctctgctgaacactgatgggaagagctcctcccaagagtccatctcagatggtgaggagcactgaggaggaggatgctactgaaaggacctcacgtcccctgaagctcagggccaccttctggtgtgccaaggatttcactggggcagaagggaaaagaagcaatgacaagaaagggcattctttgtttgtagccaagttctctatttcttcctcaaagacatgtggtggagctgtggtgggtccacaggcatgtgactgaggatgagaagaggcttggagcatgcatatcaacagatgcatttgaaatccatgactcatggcttacagatggcttcaagtgtggcccaaggctgctctctgtctgggtagagggaatctcttagtctgcatgcagcagcatcttattggtacacagtttagtgccaatgaggctgtcagatgaccttggttccactgggtttaggggctgggactttgcagtttggagcttggttacacagcaagcatgacgaccagcttttccaaataggcaccactgcttttcattattatgggattctgtgccccttttccacaatcagatttgacatgcagaagtgcaggaataaaacagcccctgcccctcttgatggccattccaaagtggacttcaatgaggctgtccctacggtgtttctgtgtcacacatcacaagtgacctcttttttaaaaactgtgtggtgctgggcatggtggcttatgcctctaatcccagtgcctttgggaggccgagacaggaggatcacttgagcctagaagttaaggccagcttgagcaacatagtgagacccttatctctacccaccctcccccccaaaattaaattagtcatgtgcagtggtgcatgcctgtagtcccagctactcaggaggctgagatgggaagatcgcttaagcccaggagttcaaggctgcagtgggccaagatcgtgccactgcactccagcctggggaacaggaagaccatgtctcaaaaaaaaaaaatttgctttttttttattttaagagaaaaagtgagccaatttcctacctccctccttctctccaccaactttaaagggctctgccctggaaccgtctccatggaagacagagaaagaccagacatttgccccgctgcctcagttcccgcttttgttatttcatcttcctcttctttggctctttaaaaatgcgtgtgcatgacaaatgtgtgcatttgaaaacatactatgcttcttgattttattacaaactgcagccttttttctcacaaaaacttaacagacaagcagaagcaaagaagagtttaccaaattggccgccagcttccagctgagatggaatcttcttctcactgctgtaagcaaagccatgaccctctgccacagagatagttttggtaagtcagagaataagaaagtattttgtattctaccttttaaaaatgtcattatggcataagtattttgcgtattgctatgtagaatccagccgtcttcttttaacctttctatgtaaaatataacatagatacagcaaaccatacaacacgatagtaatttttatttttagtgtcagtgtgatagtctgtcaaacagatggaccatgcttttccttcctgtttcatcatcgttagacacactctccttgttcttgaattatgagctttgtgacatttagagaaaagcaccgagagagacaactgagatggagaacaaaatgggttctttgaagcactcatacttaactctcaggaataatgattaagttgccattgtatgcgatggtagagagagtgaagtaatgttcattttgcaaacttcctggtcaaatcacttcctctgttggggaaggtcacatctttgatgcaattgccttataaaaagggttgtaggggttgggtgctgtggctcacacctgtaatcccagcactttgggaggttggggcagatggatcacctgaggtcaggagttcgagaccagcctgaccaacatggtgaaaccctgtctctactaaaaatacaaaaattagccgggcgcggtggcggacgcttgtaatcccagcaactcaggagcttgaggcaggagaatcacttgaacctgggaggcagaagttgtggcgagctgagattgcaccaacgcactccagcctgggtgacaagaacgaaacttcacctcaagaaaaaaaaaaaaaggattataggaagggaagttcaccactcagcccaccagcttcatggaatggatcattccttcaaaaggtatttcttgtttcccaggcaccttcctgggcactgggcatacagcagtggaaagataaagtctccactcctgtgagtttgcacagtagttatggcaagtgatccctgcatagagagctgccagatactctcacagcaagaaggaagagaaagcaagccctattctagaccagctttgcagacaccctggagctcctgagggctgctgctatcagctgccatataggtgacactcacttatagtgggactcttcccttcactgaagtccaaactgactctgctttatgctcctgctctttcagagcagagagacagcagagttcacatgcatcatgggaagaaatctagccctgagccgggtgtggtggctcacacctgtaatcccagcagtttgggagactgagggacacagatctcttgagcctgggagtttaaggccagcctgggcaatatggtgaaaccctgtcactacgaaaaaaaaaaaaaattagccaggtgtggtggcccagtagttccagctacttgggaggctgaggtgggaggattgcttgagccagggaggcagaggttgcagtgagctgagattgtgccactgcactccagcctgggcaacagagccagactctgtctcaaaaaaagaaaagaaatctagtctgtagttgttacttttcccagtctaccttctctgtacctccatatgaaatcaatgtattcacaccagtagtttgaacaatggtttcaggacttggactatgatttttcaaggttaaataggaaagacgatgttgtcaggctcacttcaggcaaggtcatgccttccacgggggcaatgatctctcacccagatccgtggaggaatagaacactactcagggaaaaaactgtgaagggcttttgaaatggatgaaaagattacttgaaatggacaaaaggctttgaaatggacaaaaggttggcacagccttctgggttatctctaccttccattgtctttgagttatttttacagccctgtaagttgcagcaaactgataatgcagatgaccctcatccacagaaatacaagctagttgtgtcaggtggttgtgattgatactaccctgaggacagatcccttttgcatctatttgtcactgtcagcattattttctgtctatagtatatagttagtactttgaattctcttttgaaccagtggcaacatcttactgatgtagcaataagatgtaatacatcatttaattaatgagttaaataaaacctttgatatgtccttttttcttttttcttcttgagatggagtctcgctctgtcacccaggctggaatgcaatggtgcgatcttggctcattgcaacctccgcctcctgggttcaagcgattctcccgcctcagtctcccgagtagctgggactacaggcacgtgccaccctgcccggctaattttttgtattttttagtgaagacaaggtttcgccttgttagctgggatggtctcgatctcctgacttcgtgatctgcccgcctcggcctccaaaagtgctgggattacaggcgtgagccgctgtgcccagcctgatgtgtccattttatatctgtataagagtcatggttttacctttatttaaaacttatcttttaacaattgcaataggccagatttccccctctgtttctcaagcaaacattaatgattgttttcctttctgggagcacaaaggccttgggatttggagcattcagctaagtcacataccctcctgtctctgatgacagcacttgcaggcccacctgagaagacgcctctcacaggtggaatgccagctggcctccttacccacttcccacacaaagagctgcagccacagggtctgcaagaggggcaaggcgctacgtttcaaacaccacaaaacagcagcagggttccctctgcacactgcccccgtttcctcccaccccttctggacattcctgtggatcatacatggggcacgatgaggttgaggggtaccctctccagctctgggagcagcacccagttccctgtagggtttgcttttctcccatctcacaccggatggattttaagttccttttcatgacttaggctatttagctcttggtcctttctgtccaaaagctgccctgccaggggttttctactgatggatgctacgtaagaggccgacccaggcctcttctgggtaagctattggaacgaggctcacgtacacaggtgttagccccagaaaagttgttagtttcacaatgatttgtttattgtctgtcgatcaaatgtattcatttttggttattatctaaatgtaggctcctggcatctgtttcacttgttgcttttggaatatatgattcatatacttcagtcatgcctagaggaggaagaggaggaggaggacatggggactgtcaaggaaatgctaccagatgacccgactctcggccagccagaccaggcacttttccattctctgaattcctcactgtcgcaggcgtgtgccagccccagcatggagccactgggggtgatgcccacacacatgggccagggccgatatcccgtgggtgtgagcaacatggtcctcaggatcctgggcttcctggtggacactgccatgggcaataaggtagggacaccaggacccccttccacacagctgtttcaaggggaataagagccacaggtgattagtaaaaccctcaagatcactttgtccaaacaatgataaacgattctacagtcatctttaccctaggtgattttgccaggggtgagtttaattcactatctgttgattactggtcagctcaggtttgtgggacattgatagatgcctggcatgattagaagtgtgaccatctgatggcctgggtatttcttgccttcccagagtgtgcctggcctggttagactaactcagcagtagcacaccactaacgtctgagtggcatgcactgaaaattcccctagtgttcaaagacggaaacgtcgaatagtctgaacagaggattttgaaaagattacattgggatacctgttgaaagatacaaaaattagagttactatttacctaacacctactatatagcccttatgtatgttatctcgaagccatgccatcctatagaatatttgttcttgtcattgtcatttgatggatgaggaaactgaggctcacagaagctgagtgacttgcacaaagtcacacagcaaggaaatgcgaggaaatagtggaacagagattggagccccagcctgcctgatctcaagtccattcttcacctacaaccctagacaggaggttgttttatgccctgaggagtgcaggacgcaggttgtagaggtcggacatggacctcagtaccatgaagcagagctggactgatggaggaacaactgaaatgcctccattgaggagtggggagtgggctggttaaaaaaaactgacagcgattgtcttagggctaatttctctgcacatatttgatgtttagccgctatccgccttcttctttttgtgcccacaagttccccctctcgcacagatgagttgtgcttagtaggaaattgaggcaggtgcgatcattcaacctgaagcaagttgtggcagtgagtcacagcctaaaactcttcatgccttagagtccgcagaataacaggaaccttccagggccctttccttcttgagcagactctcattgcgagttctccgattgcagagatcctgcacacctgttactgagcaatgcttggacaagacacctccctagaccaaaaaaacaaaacaaaacaaaacaaaacaggagccggggaaatgcatctctcaggtttaccagttctctatctgtatttggtctttgtttctcactttgagatagtaagtcacgtatccagctgcattcggtgctctctgtgaggtagattccaacgtttgtctgtaaatgagaaactcacctcctccacgagtgtccatgtgaaaaaagcagacatggtcgatgaaggatgcagcagcgaaacactgaccccaacttgggggtgctgatgagagctgggcctccttagctggcagcagctaaggcgctttcaggaagcaggtgtttccagacagttggcagaaagaaggcccagttagatctgaagaggcgatggcttggctaggctatacctaggaggatggctctccctgctgctgtacctggcggcagagccctccaagggccaccagtggaaagcgcctgagtgtactctggagcattctgtagagccctagcagggccagcattcatgctgggctgcagtgttcagctccaagtgaaagcaaattctttgcgctcaccggctggagcaagaggtcggagtgtagcatgacaacttgtgaaaggaaaaacaaaaacatcttgcagtgacactcgttaaagcaccgtaagggaggctttatctgtaaggaaggctttattcagtaccatctccacagggcttttgcaaccggggagggagattgggcttaactctgagtacagaagggacagggtggcgggtgcagaatttatagcctaggagccaggtgggggtcaatggatgggaatttactaagaagaaatgtcagaggtaagggggattctgctgaacccacctaagaggattcttgtagaagtccagccagctggggtgaccagacatcacctggaggctggcagaggatgaggaaactgatcacatatggagatggggcattctcgctaaagtgactcagcagggttcttgctaaaactggattttataaggaagtgggcgaaggagaaggttcaggagccagactaaagttcagccaagcggagaatgttagtcaaattatatacacatgcttcctagtcagcaaggtaaccaggagtaagcttttacgtcttcagccacagttagaaggcgtgaagagcagacgctgacagtctcccggagctgagcgtttaaatgcatcttttcatctcaatgaaataggtgttatcatcaacctcattttacagctggcataactgaggatcttgaaggggttgggtaattttcccaaggtcacctcactaatcagtgggagaacaggaatttacacctccacagatccttccaagactgtccttctcagcattctctctctccccaacagtgttttctaccatctgctttaattccaaaattggtctcttgggactaattactaaaaataccttcaaatctgataagggcaatcctggtacatacatttctgggttcaaattctacttcttccccttattagatagaacactggacaaattgcttaacttatggggatactcatgtctaattctacaggaacattatgaggtttaaatgagttaattgttgtaaaatgcttagactatttcctagaatgtagtaagtacccaataaccactggtcatcgttattatttctccaccacggcctcctaagctgagcacttcctcttaacactgttggcccaatcccttagctcctctgaagttccttgcaaagaggtttgacctatatttaatggttggaaacaatagagaagatattacatacttaattgaactacagaataaagcaatacaagcagacaaatgtcaggtaatccaaggtaatacacattagagattaattaaacctgcttctgttcattcatgcctgctgaattagctataatgacttaaacaatcacaccaaaaagttacgctcatctgattttcattgcatccattattcagcacttgcactcatcatcaacaaaaaagcacaccctgcatgtcccatctgcattcatctgccaccgtttaacacccattcagctgcacagctgtggcagcctcattccctgaacaatttagcgctggcctgcacctccggtaacaactgaagtcagcattccggattgccatacccatctgtccctcttctacattctagcggcgttcaaaatagtcagatgccaaggcgtgtttaagaacaaagtgaaaaactatactgatattaaataacgaatttaggtcatgtactccaggattacagcagagcaaaacaaatttttttaagtgtctcttcacctctaagataaaggtgaaaacaattttttgaaaaagaagaaaaacaccttttcactgggtggtgatggtttttgtcgaatttagagaaagagtgagacatgctttcatgaaccttgcatttgaagttatggtgcacacatctctgtcaaagtatactagcttataggaggtttattgatgaaatcagaccaagtgaatacatttctattggttttaaagtagtcatgaccaagtttcctggagctaagggagggatggtacattcgcctttctctgataggaagacttgctcgtcaggtgaagtggctgaggagagcttcagctaacttagaacctccccacctctcgaatctgttacttcccaattgagtcaccaataccagattgctgttttcataggttttttcccccatttagtggtttatttgacggatgggggaaggagagcctgtgtgggaatttgaactgactatgtcagctccagagacttgttgagaatgtggggattagtacccgtctggagactcccaaattgatggggggtctccagctacatggagaccgtgggtgcctttcacaggctccctcccgactttcatgactcatcttctttctccagtgtctgttaaggaagagtgttggtttgctctcacgaggacatttctcacaaactgcctttccctaaagagagcccatcagctccccgcccctgcaccatccctgccttgcaaagcctcccactgagtcctcactggaccctgagtgttttcctgagaaatcaggagttctcttagaataaatgcatgggctgggtgctgtggctcacgcctgtaatctcagcactttgggaggctgaggcaggtggatcacctgaggtcaggagttcgaaaccagcctggccaacgtagtgaaaccctgtctctactaaaaatacaaaattagctgggcatggtggcacatgcctgtaatcccagcaacttgggaggctgaggcaggagaatcgcttgaacccaggaggcggaggttgcagtgagctgagatggcgccatggcactccagcctgggtaacaagagtggaactccgtctcaaaaaaaaaaaggaataaatgcatgaacttctcctttacatcccagggtgggagcacgggcttggtagaagaattcaaatggtagttcctgcaacaaggaatagtatctgtctctttttatcttttcccttaaaacatttccctcttgcagctcatccaggtgctgttggaagatgaaaccactgaaagcgcagttaaactcagccttcctatgggacaagaagccctcataaccctaaaagatggacaacaatttgtgattcagatatcagatgtaccccaaagctctgaagatatttatttcagagaaaacaatgctaatgtgtgagattatttatttgaatagagaataagaaaactgatagacttgcattcttaaaaatattaaatactaaagtttttctattgacgaaagatgatgttatgtatataatagatgtagcattgtctattttatgtttatatgtatttcaaggaggtggtttcgataaaatatgtaaactgatttggagaataatttttgcctctgttgcttttcttttggggctgtctgagtatttctattttgagacatggcagaaaagaaatttgagaatgctttttgggagtaaataaatggttaaggctccagagaaagaaaaagttcaaagaataccaactggtgcaagcagtaaaatgccagtggtaatatttttcctccccttggtggtgcctcaatcgaaatagaatttgtagatagatcccctcaggcagtgaggaacagaaaaaaaatcaatatgatatcactgttaaactcattcactggtccattaaacacctttggttcactatcccgatttccttaatgagagaattttggatgcaacaatgtctgcagcagaggctaatgtcctgctttgaatcactctttagttctctttttgtagcaaaatcctaaaaactgctgaaactaggaatagatcattgttacagaaaatccacttttatgtaactgattataatatttaaaaggaattttaaaattcgtgcttcacatgatttccggtatacatggaaaaaatagataatattttattgatctcatattacatatgaaatgaactaaatttcctgtatctttacatagggaatgaattaaatttacttatgaaatgaattacatttccccaaatgcttggaaattttttaaaaaaccacaggagctatatgtctgtagattcattaagaattactcatctttatggataaaaaagtaatcatatttaagagcccttttcaactacatttaatatattatctcaagctatctgggaggagttgttctttgtcgaagaatgagtcagagagacatttattcttttgctcactgctcagtgactttgcatgtcatgtgtttgctcataagtaagtagacagttggtggactgagtcacggaacacaggcaacaacaggatctgtaagtctgggaatggtgaattttgtttgcatgttttgggataaactgattagctaagagctagcagaagtcattctgggcattctgtccttgaatgcccaagtttaccaaagaaaacaattttcattgtttctctgtagcattagacgttaggataggggatgaggatgggtagtaacagagaggaggagggacttctgggactgttgcgatttgtattagtatggtttctttcttagttgatcttggggcctgtctaggagagccctgattgggtgggtgggggagagagtaaggtttgggtgtgttggtgaaactaaaatgcaagaagcagaagtttattgctcacagacccagagaggttggggcaccgaatcactaggagggccaggaggagtctggaggcagcagggagctcaaccagcctgtggttgagcctgcgggacctgcctttattaaggcccagggtactattccttaggctttcacttgggacttgtggatctgggtcatttaaagaaaacatacctaaaggagggaactcatttacatgactccagtgttgatcattagattttttccacagacagcagctgtggcatgagctggatttggcatcagtgagatgaggaataagcaggctctattgcaaacaccacacagagaggagaagtctcactgaggacaaggatgacagggttcaactggatttcaaacagcttatgtcaggtctaaaaatggctgtcaaggctgccactccatgaaatctatgccaggaaccctcatggtgctcccgttcttgggttgggggctggccatacagtgtagtatgctcaccttgcaaaaatgtgtcacgaagtttgtgatttgacttgattacatttctgcatatgttatatatgaaagtgtatcttaaaaaatgcaaggtggccaggcacggtagctcacgcctataatcccaacactttgggagatcaagtgagaggatcgcttgagcataggagttcaagaccagcctgggcaacataatgagagcccgatctctataaaagaaaaaaattagctggatgtggtggcacgtagctgtagtctgagctactcaggaggctgaggcaggaggattgcttgagcccagttcaagactgcagtgaactactatcatgccactgcacttcagcctggaagacagagcaagaccctgtcttaaaaataaataagtaaatggcattgcccactttatgggaattggattggaggttcctggtggaagaaagactaaaaagcacacaggagggtttcaagagaaagcaagctgggcttgaaaagtcaccaggtgcagtggctcacacctataattccagcacttgggaggccaaggcagctggattacttgagctcaggagtttgtcaccagcctgggcaacatggtgaaaccctcatcttaacaaaaaatataaaaaattaggcaggcatagtggttagcgcctgtagtcccagctacttgggaggctgaggcgggaggatagcttgagtccaggaggttgaggctgcagtgagctatgattgtactgctgcactccagcctgggccacagagcgaggccctgtccggaaaaaaaaaaaaaaagaaggaaaaaagaagaagaaagagagaggagagagaaagaaagagagaaagaaggaaagaaagaaaaagaaagaaagaaaagaaaaagaaagagaaagaaagaaagaaagaaagaaagaaagaaagaaagaaagaaagaaagaaagaaagaaagaaagaaagaaaaccaacaagctctggtgtgagaacagagctgcacctgcctcataggcaagtctttgtttttaactcccaatccccttccttgatgagctgagacacgaggcccagcaaggagaaaaatgaaaaagaatacaaacacatctgccttgcccacctcagccctcaaatcctaaagcagctagcaggagagaggagaagatgtcaaccttcataaagtttgacattttgattattacactgacgttttaattactgaacagagatggttcccatgattgaaagtaactggtggtctattacttgaaagtgagcatgaatgtgaacaggaaatccccctatccccatcccaaacttagatttttcttcaagagccataaagaatccacatagcaggttgcaaagattgttttctgcttgtaccatggatcagttcactattacagcgtaacaaactaatccttcatggcggcttaaaacaaccactgtctatttattattccccaccagtccgcagtttgcttgggtagctggttctgctgttctgggctggactcaacaaatctcagctgggatcactcagacctccaaggttcctgacaggtatgtagggggctggctagtctaggatggcctcagctgtcctccatgtggttcccacattccttcaacaggccagttcatgcatgttctcatgacaggagggagtccaagagagcagacgtggaaacacacaagcatgttttcacacctccttttgcatcaagtgtggtcttgtaccattgaccaaagcaagtcatgttgccaaactcagagttagcaagataaggtacacctaatgggtatggatgcagggaggtgtcagacaactggagttgtcaaccacatcactcaccacctaccttatccagttcaactcactcaaaataacatctaaatcattatcccaattgctccgttcccaggtggaaatgacctgctcagggtcctcaagcagcagtgagatcctggccatctgcagattccacaatcaatcacccccatcaattgtgacattattacagcactgccctccatgcaacttaactcgataggaaacaaacatttgatccgttagtatgcatagaagcaatattattttctgaaacagtaatttgaaataggaataataatgagaaactgtacagacagatatcccccagggcacattactgattgtcaatatggtgagtacagaaagagaggcacatcacacttctcttcacagtaataatagctgcacccacatgtatcttggaacataaatgttcactcatgatgataagtcggaagcccactaacatgctggcagcagacagatttttcagaaacacatatctgatcaaaaatttacagtgatgttttccaaaattaagtatttgtcgtgtattttttcttttaccaggtactctttaaacacttgggattgtaggggtggaaagctgtgatacctttcctcacccaccatgagggtcatggccaacactcctgtagcaaaggaaaaaagagaaaagcataacaaatgtatttaatatttaatccaatgtattaggccattctcacactgctacaaagaaatacccgcaactgggtaatttataaagaaaagaggtttaattggctcttggttccacaggctgtacagttagcatgacgcatctgcttggcttctggggaggccacaggaaacttacaatcatggcagaaggtgaagggaaagcagacacatcttacatggctggagcaggataggtgctatacacttttaaatgatgagatctcacgagaactcactcactattagtgagtagcaccaaaggggatattcacccccatgatccaatcacctcccagcaggccccaccttcaacgttggggattacagtttgacatgagatttgggcggggacacagatccaaactgtaccatcaaagttttatgtgacgtgaaagcctaaataaataacgactcaaagactcagggaaaactgtccattttcatgcttaggtttggtgaagaacggacaatcatgaagaaacgtgattggacaaaaagtaaatgatctaatggtaatagactgagtggggaaacccagcaaggtctgtctgttcagattctccttcctccttctgtgtgtcattcccttcccccaggtgtggggcaggaccccttctggaatgaggtctcatgacctactctcagacaaggtgagtccaagaacctctttatggccagctcctatacagaaaggcagagggagttacagtcatatttctaggctttatggctgcctttgaaggagaggggtcctaattcctatgatccaccttggggaagagaaattctagttcctatggcctgccttgtgggagagacgagagcaggagaaagaagggtaggaaaaggccagaaagagattttgcttctgaggctcttccgctgtcctttacttcaaagtactcagcatgtcaaagcgttacactctgggcatgattttctcaaccatgaataaaatagacaaatctctgctcttattgagcttgtgttcctcgtacaggaatactgacactgagcaaataaaagcaaaatatcttaagtagatataagtgttatcgtgaaaattcactatggggatggggatgctcttttttttttttgacagagtctctctctgttacccaggctggagtacaatggcgcaatctcggctcactgcaatctctgcctcccagattcaagcaattctcctgcctcagcttcccaagtagctgggattacaggtgtgtgccactatgctcaactaatttttgtattatttgatagagtcggggttttgccatgttggccaggctggtcttgaactcctgacctcaggtgatctgctcacctctgcctcccaaagtattgggattacaggcgtgagccaccgcacccagcctgatgctgcttcttatagggcattcaagcaagacctctctcacagggtgtaatctgaaaagagacctgaagaaggtaggagaaaggaaaggtgtgagagtctcctaaaaaggggaggagaatgaatcagagaagtaggagagtacaaccaggcagggctaatgcccccttgaagttaatggccataaatctgaagtgattaaggaacttaaaatcatatatattctctatatatacactgtatatatatttaaaatcatatacacactgtatataaatcatatatatgatatatatataatcatatatactatacatatatatgatttttatatatatatacacttcaaatttatggccattaagtaaattatatatatatatgattttaagtccgttaatctcctcaatatatatagaatatataatatattgataaaagaaattaaaggcaacacaaataagtgcagagacatcccatattcatgaatcagaagacataattttgttaaactgttcatactacccaaaggaatctacaaattcaattcaattcctatcaaaatccacttagtggctgggtgcagaggctcacacctcggaaggccaaggtgggaggaccatgtgagtccgggagttcaagaccagcctggacaacatagcaagaccccatttctacaaaaaaaaattaaaaattagccaggcatgatggcatgtgcctatctatagtcctagccactccagaggccaaggagagaggatcgcttgagcacaggagtttgaggttacagtgagctatgatcattaccacttcactccagcttgggcaaaagagtaagattctgtctctaaaatgaacaaacaagaaataataataataataataataataataataataataataataatcctgcaatgttatccccttacaccaattagaatggccattataaaaaataacaggtgttgatgagaaggtggatggatacattagaactcttgtgcaccattggtgggaatataaaatagtgcagccgttttgggaaacagtatggaggttcattaaaagtaaactaccttatgattcagcaatcacacttatgggtatttacccaaaagaattcaagacaggacctcaaagaggtatttacactcaaatgtttattgcagtagtattcacaataactgtaacacagaaacaacctaaatgtccatcaatgatgaatggataaagaaaatatgggcccgaggcagtggctcacgtctgtaatcccagcaccttgggaggctgaagtcagagaattgcttgagctcaggggttcgagatcagcctgggcaacatagtaagacctcatctctacaaaaaataaaaaataaaagtgagccaggcatggtggtgtgcctgtagtaacagcttctcaggaggctgaggatggggggaccacttgaatccaggcaatccaggctgcagtgagccatgatcgtgccactgcaccccagcctgggcaacagagtgagaccctgactcaaaaaaaaaaaaaaaggaaatgtgatatatacatatgtgaacccagaaggctaatcagaaactcagaagaatgcaactgtttgtgtctcacctatctgtgacctggaagctccctccccgcttcaagtcttcctgcctttgcttcaagttgtccagcctttccagactgaaccaatgtacttcttacaagtattttgattgatgtctcatgtctccctaaaatatataaaccccagctgtgccctgaccaccttgggcacatgtcatcaggacttcctgaggctgcgtcatgggagcatcttcaaccttggcaaaataaacgtcctaaattaactgagacctgtctcagattttgattttgggggcccaagatattttcctttcacacacgcaatggaatattattcaccctttaaaaagaataacctcctgtcatatgctataacatggatgaattttgaacatcatgctaagtaaggtaagccagtcatggaaggacaaatactgtataattccacttatataaggtatctaaaatagtcaaactcatagaaacagagtagaatggttgctgccaggggctggggggagggaaaatggggagttgctgttcagtggataaagagttccagttatgcaaggtacaattctagagatttgctatagaacaatgttcttatagttaacaatgctgcactgtacacttgttgagaggatagatctcctgttacattttttaccacatttttttaaatgggcaaaagacattaacaggcattttataaaagatttcgaactgggcaataaacacatgaaaaatgatcagccatattagtcattaggtaaatgcaaattaaaataacaatgagataccattgctcatccaccagatttggttggcgtgagaggggtgcgggggatgggcaaaaaaaactaacgctaatctgtgttgatgagaatgtagagctgtaacagaaactctcacattctgacagtagcaatataaactggtacaatcattttgaaaataagtttgattttcatatgatatatattttttttctatatatatatatatatatatgtatatatatatatatatatataaacatattcctacccatatctttagtacctgggatgtctctgcaaaatagatccctaaatctctccagaaagacactatctctagcttttcaagcttattcaaacaggtttggattctgcaggaaaccaggaaatccatggagaattatcttccaaaatttgagtttgagggatctgttgaatattcaggggtaaatggccaaaacaaacaacaattgctgtcattaatggagcatttactatgttctggcacaagttgtgtgatggggtttgaggagtgattattgatcaccctcttaaatcccctttgagtgtggaactaatttgggaaataaaactcaagaatcagaaagcttaatagaagtaaagctaatgggaaattttgaccaaataggattcctattaggttctgcaactgaacttactcccttagtcacagacagggcagggcgacctctcatctgctgaaggggcaggacagctcaggcaagacagaagagaagggtgaacagatcattcagaaaagaatagctttgcaggggctgagaaaagcatgttaagcttgcctttcgaaactcatccatcagatgagtcacttctcccatgaggaggcaggagtaagaaaacagccatggccgggcgtggtggttcacacctgtaatcccagcactttgggaggctgaggcagaaggatcacctgagcctgggaagttgaggctgcagtgagctgtgattgtgccactgcactccagcctgggaagacagagcaagaccctttatcagaaaaataaaaaataaaaaagggtgattgcatctgtactgaacatatattggctttttttcttgttctattccctaaacaatacagtaaacaacaatttacatagtgtttacattgtattaggcattttataagcaaatcagatattaaaggaagatgtgcatgggttatatgcaaatgctgcactatttttttataagggacttcagcatctctggattttggtatccacgggggtcctggaaccaatacccctcggataccaagggactgctgtagagcgtttgctccatgccacacactgttctaagcctcttcaaatattaatcgttcaaccgtcccatccatcatccttaagaggtagatattatctttgtcagctaatgaaggaaatgggcacagagaggttaagtggcttggcaggtctcacagctgttgagcagacgcgtgtattaagccgggatttgaacgcccaccctctggctgcggaacctgtgccatcctgcaggaaacgaacccatcccgggacctggcgcgcgaggaggactccgcaggatgcgcggcgtgtgcgtggaacctggtcttctgcgagcctggacttctgagcttcgcgcgcggctgcagggattcgccgggactcgcgcgggggaccgcgcccggggatcctgcaggggcgggaagggggctcgggctccttgcttccgccgcagtggggcgctgccgggctccccggcactagcgctgctggcggccccggcggccgggcgtgctgcctgcaagatgtccgtgcgccgcggccggcggccggcgcggccggggacccgcctctcctggctgctgtgctgcagcgccctgctgtccccggccgcgggctacgtgatcgtgagctccgtgtcttgggccgtcaccaacgaggtggacgaggagctggacagcgcctccactgaggaggctatgcccgcgctgctagaggattcgggcagcatctggcagcaaagcttccccgcctctgcccacaaggaggacgcgcacctgcggccccgggcgggcgccgcccgggccaggccgccccccgcgccacccgggatgttctcctaccggcgcgagggcggccagacggccagtgcgcccccgggccctagactgcgcgccgccaccgcccgctccctggcccatgccagcgtctggggctgcctggccaccgtgtccacccacaagaaggtgagcgcccggcggggagcgcgagggggcctggcattcaggcggcggccgggggacggggacagggacgtgctcgcgaccgctcgggactgagatccgggtccaccagacgtgcccggtgccctggatgggaccctcgacactgtacataatggaaggcgatggtgcctccgtgagcctggcgaagtcgggggagggtcggagagggacatggataaccaggtttcctgccaggtagggttgggtaccgaatccccaccttgaggtggccaggcagagagagggacacctaaccagcgtccgaccgagacctagaccagagcagccacagacgcctttggaatcgcagagtaggcggggacagcccttcccagcgcagggcacaaacccatagacctgaactccccatcaccttctgacctggagctgaagcagggatggggagagagagagcacgagggcttcgatggaaatctgcatttaagaaaatggagttcacgattttttctggaaaggaggcttattatgcaaagtgtgtaaatgctggaatgagctattcgctgcacttttaattgttcagttcgcaaatgctttactcacctgttagacatgattccacctagaatgacatggataagtaatgcagatgtaacttccatgcctccagaaggcttttgggggttttaagagagatgaaagagctacaaggcagtaatgtgaactcctctttacttcctacaaaaaagagaaataatattttatggaaggcataggacattggccaggttcttgccccagctctgggtctcaccaagactgtggccaagtcactggcttctccactttgctttcctcgtctataaaattaggtttagtttttaaggtccttttttgcttaaaaactacctaaatggcaactttatttcgagtttggcaatggtcttaacctcttcagtgtcaaatgcagatccagttggatattctcaacacctagatgatttttcacagctgtatcttgcactcctaagacacatcttaaaaagacataaaggttaaagatgacactgatcttagttgaaaacacaaatcttttcaagaaattaaatagtctcgtgccaatgtattagagatattttgactttcaatatcccttctcttagctttgttaggagttcctctttctaatccttattgacatttgatttaaacaataaattcagacagcatttacacaatgtactgccatggatgcaaagcatgactctgggcagctatgacaagctgaaaaatgggatatatgaacaaagttatatcaccattttggaagattccttaacgtttcatgttcctgaaaaattaaagccctgccttttataattctacacaccattatcatgcaacatttcaaggacaaagacaacccctgaattctgagcaagtaacaacaaggtgcactttgttagggataaaatcatggaaaattgggatgcttgactggaaggatttgggaaaacctcagcactaaatatttttgttggccaggcgtcgtggctcacacctgtaatcccagcactttgggaggccgaggcgggcagatcacttgaggtcaggagttcaagaccagcttggccaacatggtgaaaccctgtctctactaaaaatacaaaaatagccaggcatggtggcatgcacctgtaatcccagcaacttgggaggctaaggcacaagaatcgcttaacccaggagacggaggctgcagtgagccaaaatcgtgccactgaatgccagcctgggcaacaaacagagtgagactctgtctcaaaaaaataataatactaataaaataaataaataaatatttttgtttatatctgcagtcacagaaacatgatataccacctgtcttagtccatctgtgttaccgtaaacaaatacctgaggctgggtaatttataaagaaaagaggtgtatttggctcacagttctgcatgctgttcagaaagcatggtgcagcatctgcttctggggaggcctcagactgcttccactcatggtggaaggtgtagagccagtgtgtgcagtgatcacatggcaagaaagaaagcaagagagaggggaaggtgccaggctctttttatttttatttatttattttatagatggggtctggctctgtcacccaggctggaatgcagtggtgtgatcatagctcactgctgcctcaaactcctgggctcaagcaaccctgctgcctcagtctttcgagtaactgggactatagatgtgtgccaccatgccaagctaattttttaaaaaactttttgtagggatgggggtctcgctatcttgcccaggctgatcctgaactgttgggctcccaaaatgctaggattacagggtgagtccccatgcccagttggcaccaggcttttttaaaccttctctcaggggaactctcaaggaaactaacagagggacaattcactcagtacctcaaggagggcaccaagccattcatgagggatccacccccatgacccaaacccttcccacttggcctcccctccaacaccggggatcagaatttaacatgagatttggagggatggatatccaaactatggcaccacccttctcccaccctagtgggtgatcatgaagaaaaattggcatatcatgtttctatgacttcctttatgcaaaaagggtaacaaatcaatttctcataacttgctgagtcgtacaatgaaatattattgattacaataaaaaatgcagctaataaatgagaaagtgatgcagccctaaaagaaacaataatagaaagttcctgaagtccagagagcaggcaagacgttaaagacttaaacatcctccctaaagttgctcaaaacttgggacaggcagttaaccttgggagttaaagcggtggggctgtaacaggcagcttgtggaaaaggcttagcaccacctcccataaatgtcattgtccctccccaaaagaacatgaaatttaacaaagtgagtatatctgccatgcacaggcagcttcaagaagaatcctttcaccaccccttccaaacaggatgccactgctgagtatctcctgtggagaaattctagagccaccacggagtgaattgggcagactggggaccacctcaccttgatttactacctgtcagagccactgtgatgccatgatcccccctcatccctggtgttgtatttcctagccagaggcacaagctaagctcccagatcaagtcgagccacagctctgcactgaaaaagccttttttggtgtttgttagatccaaggactgccatttgggaactgcctgcccgtcagtgatggccccttcaacaatagcactgggattcctttcttctacatgacagccaaggaccccgtggtggctgatctgatgaagaaccccatggcctcgctgatgctgccagaatcagaaggggagttctgcaggtagacgacggtttgccctcactcacacgggtcctgggaagtttttgacagagagttgggggtgggtttctctctgggtcacatgactttaacagaactctgagatgcacattgatgttcacccttgaaatcagataaattagaattccaccactcaccaagcagtgtgctttgtagcaagttagttgatctttgggagcctcagtttcttcatctgtaaaatgggaataataatctttgcctccgagggttattgcaagtgctggaaataggtgtaaaatgctttgtgcaacactggcaggagtccagacagctcctgttgttatggaaaagggcgagggtgggagtgagggttggtaaaggaagagccagtagttgatctccccagcacggaggcgtgcaacacagagtctatatattgtctttccaatttatttctatcctgtccccagagatatgtgcaataaggagccagcattttttaattcactttttcaaaagctctctgaaagaaaacacttctaaagacatttaagcactaacagaacattgatgcaggcccctttatctgaattcaaaatgcaaagcctgaactcgcatcctccccgggaaatgtctgcatggagctggtgtgggagctgcatgtgagatcccctcgtccttcccagaggagcagcaaatgcccaggatggcctggggtgagccctttaacctccaggaccttagtcactccacctaaatgtagtgatgctttagaaaatcaacaggcctcatcccatctgtgaaattctattattctttatgcacagcacggaaaacataataaccaaacaatgtattagttcttacagaggctaatcaaagcaactatacaatgcaagatgcatcctggataagccattgtttcccctcagccacgacagaccacatggagacacttcagctgaccctgttccccaccaggttacagcaagaagccaggaaaagaaacatttcctttctcatggaatattctccctgttcttggtcagtcaagcttactgttactagaagtacatttccaggatacctttcttttcttttcttactctttttttttttttttcgagatagagtttcgctcttgtttcccagactggagtgcagtggcgcaatctcggttcactgcaaccgtgaacctctgcctcccaggttcaagcaattctccctgcctcagcctcccaagtagctgggattacaggtgtccaccaccacgcctggctaatttttgtatttttagtagagacagggttttgccatgttgaccaggctggtctcaaactcctgacctcaggtgatccacctgcctcggccttccaatccaggatacctttctaagcttcccaggctttcctcattcaggtatcctgaaagcagtcgtgctggagcatgtggctcccagaacccagagcacagccgctctggggacaggcaacagaatatatacttgggacaaagctgcggcagcactccagctgggggaggatttgtcaactggcaacccccaggcaaatggcagcaggagctggagcgaggagcagtgagaaatctgacttaggagaggtcctcatggggagaggatttcagggtgacttccttcagtcccttgggaagacttgcctgcacagcctagagccacgtatgcggaccttcttcatgacaggccacatgtaggacacgcaaacacctgtgcagccccctggctaactgggtgaggcagctcgaggctggaggtgagcaccccggggccaagggcaagagcatctcagcatacctgttactctggcctgggagaggaaggatgagacgcactcatgggtaccccttagtttatgtcttcttgtaaaactgtttctcagaactgctatacccctgacactgtttaagcttctgaagtattgaaatatgatgtaaataaatgcctacaaaaccaagtttggccttagtaagcatcacacttcaatgcaaagcttaccaagcaatggggcttttgtcaccctagggtctacgacttcccataatcggcgtaagcccagatgtgactcacctgtgtgaggttcgcattccaagtggagctttacattttaggtttcaccttcagaatcttggcaatactgaacacagggacttaacaagtcaaagccatgtggctggcattgaaaaagagccccgaataaacaagccaagcaaggggttcctagggccactggaatatagcgaggtatctggtagaagtgtccgcagctacccaaacacctgggtagagcttcgaaggacagcccggcaaggtaccagcaaggtgcccctcctgcctgtcgccgggcctgaagaggtctccagcaaaggcagagatcgtcgtcacgtgcttcagagcttcacagcatctcccacaggagcggggagattcaagaaagcgcccatgtcttacgatgataacgacaggtcaaggccacctgctcctctcagcttcagaaggcagctcatactcagaacaatgaaaactgccttccagcctgtgcactggaaaacttgcaacagcatttttttttttgagatggagtctcactctgtcatcaggctggagtgcagtggctcaatctcagctcactgcaacctccagttccctggttcaagtgattctcctgcctcagcctcccgagtagctgggattacaggcacatgaaacatgcccagctaatttttgtattttttttagtagggatgggatttcaccaggttggtcaggctggtcttgaactcatgacctcaggtgatccacctgcctcagcctcccacgcttgggattacaggcatgagccacggcgcccggcctgcaacagcatttttaaccatcccacgtggtgtcttctgggcgctcctattcctctgttagtctgtgcagctggggagggcgtgagtcatccctgtttcatcccaagggggaagacaaagccagaactgggctttactggaccataaagcaagtcctgacagggaggaagttgggaggccactgacttctgaggaaggaaaaggggtgccttcgcggccgtttcctacagcctactgggcatccctgggagagggggcatttcagctgcaagcctgcctctgcgttcatcaagttagccccggttactgcagactctgcaccagcatgggctagtgagcgccatctccaccaaggatacagcccgggagcaagaagcctccaacaactggggcaagaacagctcaggcttagggagggaggaatgcaagtctgagactattccgaggacaggctactttcagagctccctttggtgccaaacaattgtatctataatgtgtacgtgtttaataagcagatacataaatggaaaaatagattatacatagataatagatgattgatgatagatggatgaatagatagatgaatgatggatggatggatggatgaatagatgatagatgaatggatggatagatgattgatagatagatagatagatagatagatagatagatagatagatagaagctttcacacattcaactcttctctattcaaaagagcgaatattacagttgcccctgcttggtctccccagtccactcttcatcatgttgaattcatccccaatccagcagctgggatactctcttaaaatccaaatcagatcctgaggaaaagcaacagaatccttaatatggcctaggaggcccttcatggccaggggcctgcctccctctcagaataaatagcggtgtctgcctctttactgattgacttaatatttgatttatacctagttttatcaaattaaaagcatcaacctgatagcttgttgtagtcaaagctgatgtatgttctttggcatggagttaagaaagtgcttttccattagcaatccctgcatgtaggttgacaagtcatgtcactcaaaaatgatatttagatccattaacaggcctgtgtcttaaagataaagttagatccaagttgaaataggtgaaggacattgagtatccatggctccagaagtctcaggaaatttaatgaagaaaatgctcagcagatgtaatttccttaaccacagccgtgagaagccaatatcttgagaatgatgaaaggaatgaacagctcttcatattttacagctttctagggaccttaaagagtttttaaatgaatctgtcaagtccagcctgggctagttcatcccacctagttagggattttttccagatattttcattgccctgatccacagttccctgaactttccctaaaatgtcacaataaagttcctagatttaatgggacgcagttgtcctgactcccaccccagggcataataattgggcattattggcctgcccttctttttggaggagataatttggaaagtgaatctgactggatgataagtagaatgtgactttcagctggaaaagtactaggttggtgatctctcctttttcttttttctttttttttttgagatggagtctcactctgtcgcccaggctagagtgcagtggtgcaatctcggctcactgcaacctctgctgcccaggttcaagcgattctcctgcctcagcgtcctgaatagctgggattacagacacccaccaccgtgcccagctaatttttgtatttttagtagagatgggtttcaccaccttggccaggctggtcttgaactcctgacctcgtgatccccccgcctcagcctcccaaagtgctgcacccagctaggttggcgatttctgtggaacaaagttgctgggctagaatgaaatacccggccggttcagggtgtcacttttcccactggtatgacgaagaggggagaggcggatatctgagggccctctggctccatggttgactggaggtaggatactccaagaatggtgaagaaggaataggtgagcacagccatcacggctgatatagatttgatatatagatttctacatagactgttataaagtgcgaactcctgcaaatttagagtagaagagtgacttccaactgcctgaagggcaaggatgagagggacgtattattggcctggacagcttgcccctcccctaggacctcttaggggaagcagcacccaagtgatgctaacgctgctttaggataatgaggacatttaagccggtcttatatgcatttcctgggtttccagtaaaggctactaagaactgtgatttaggcccaggatggcttaagtcatttgtaaaatgaagtcaagattagagtctgacagaaagacaaatcccgcatgatctcacttatatgtggaatctaaataagtcgactcatagaagcagacaacagaatggtggttcccagggaccaggcgagagaggggaatggggaaatgttgattacagggtgctgactttcagttagaagacaaacacgttctggggatctaacgtacagcatgggttggatgtgtgaattcatttgattgtggccatgctcacacaatatatatgaacatcaaatcatcacattgcatatgttgaatatattcaatctttatttgacaattaaatatttttaaaatactaaaagattagtctaaaaagccatgaaaggaaggtggcttttccacttgtcaggcatcatacccatacaagtcggagcctaccaacatgtcttgcctaataattgttagtttatttaaagtctgttttatccaattattctgtttactcctgggtgctgtgatgccttcatttaattaatgagatgaattaggggtgggaatctatttcccagctcaggttaaaatggcaaatggagaataactgtctagtttaaaagagtcacttgcaatcagcaacgccctctcctctttatttccctctccctccatggcataagcatggacgcatgccccttgaccaaatgaatttgtgctcagccaagaaatctactttgtgaaaattcaatcaatattgattgacaaagaaaggccacccaaaaatgtctctttccctgcaatatcttcccttacagagcatgcagccttgaatagcatgagttttaggttcgcaccttcttggtgaatcagggcagcaagcctttgggaccggggaggactcgtctgtggggtgatattctccctgatcgtattggatcaattttcattttgaagatcaggatgtaaatgaaacccaaagaggttttatcagatgcttttcctgaaataaaaacatttctttttttttttaagagtagaatacatttttgttatacaacagtttgtgtggtttaaaaaaatttcttttcatagagtatattttcacattagagattcccacagtgggaaaaaaataacaatttatcacttagagttttatatttgtggacagatcgttttagtacaagtaaaacatctttgggaattaagtctcagtttagaatttataatattttgatacatctccaagggggggcctaatctttaaatggaacttctctatattcagaagctctccaagcttttcttcctaggatttagaaattcatgatgtgagaggaaatcagcatttcctaattttacagtttccctagtctagctggtgtctactgacgagagggaagttttctaaaattaaacactgtctaattttctgcaaagtttttcttcatgaattaacagtatttccctctgtccattattcccggggcaaataaaggagaaatttgatcatgtgatggtaacaaagctggattctctttaagagattattaaattaaaaggcaaaagctcgtatcatgttgagttatactgtgagtcttgtgagaagctgggaggcaaccctaccagaatacagaactcggtctcacaatttttgggtaagattcttctcaaacctttttcctcaaagattaaattctgggccaggtgaggtggctcatgcctgtaatcccaacaatttgggaggccgaggcaggcaaattacttgatgtcaggagttcaagacccacctggccaacatggtgaaaccctgtctctactaaaaatacaataaaattagccatgcttggtggtgggggccggtagtcccagctacttgggaggctgaggcatgagaatcgcttgaacccgggaggtggatgttgcagtgagctgagatcaggccactgcactccggcttgggcaacagagtgacactctgtgttaaaaaaaaaaaagaaaaagaaaaaaattaaattcggaaaataaccacgtgattaagagaagatgtctgttcaacggacttctctgttatttcctccctgttgtaagttgaatggcacaagaaagcagaggcgaagaggcagacaccagtttccctttccttcaataacataagcatggacaggtgtctcccgactacataaatgtatgcatgggtttaaagtattccatcaaaaagatcagagcttccacagcatgacagcagctttgcagatgcccatgtcgtgacagttgaaacagcacagcccagcaaagctgaaagctgaaactgccgacaggcctgccttgacagccttctgagatccacccccttgaacacagtcagtaacgacttgtccaaggccccagtgactgtggagaggaaggggtgcagccgcagcataggcccttgcagagcaatggttcagataagcagctgggagcaggtccaggagtaaaacactgtcagccctttcactagttcaggggagagacacagccttggagccagaatggtggctcggtgtcaggtgaatgtgccgcaccccaccccgtcctggggtagggtggtcccgaggaaatgcctagacgtgagcaggtctgaccactggagtttggagaagcagagctcggcctcctggggtgccacagagggcactcagccacctcactcctgagggctcctgaaaacattcctattgatagttttggacacatgctagtttcctaggtagactggtttgattatcaagaaaggaggatccaggagtactttttcctcttcctccaaaggctcttaatgaaagatggccatgggccacaccccttcttactcccccaggatgaaggcgtccctgccccaccatgaccagtggctcttggcagagccctttgattgacaggcctcggtgtggttttgcaaactgaatagattccagtttgcaaaggaatctagtttctgaggggaggtgccagaccatggaatggattgaagcccagtgggcctcaatgagacctagaatggaagcctctcagaaatgaggatccctcggaacaacttgcttgtaggggcgcatattgaagatgcaaattagcactgaggaatcacacaccagagagggactgctcacaccagagaaactgggatagtgtgcggggacgtagatgtaatccctgccctatctcataggcagtcccttatactgcagacacatcaacaggaagaggaactgcttctgtgaagcagagtaactgaggggagggtgtcagcaggcgggtcagtttgcctttatgttgtgggttcaagataaacccttagtgcacacaactaaatgagggtgcaccaagtttaattgtttcttctgtgtgaaaagtaaaaagagattctggaaatgaaaatggcctgtggccactcctcccccagcctccatctttttaactatactggtaggaagaaaatgtggaatgatagatgaaaacctcaaaccaatctaattccaaaggcaggcctgggatttgttcccctagaactggatttagcactctattcattcagtcatttttagatgagctggatcaagcgaacacacagtgagcacctgcttgcagcagctggcttgctaagagccaagacgtatctctgtctggagtctatatccacctgagacagaatgtgcatttcaaagcccagggcccagacctaatcggttatagaaactgaatccaatttctcttcactgaatcttgttcattccttttgaaaggaacatataagtttaaataaattgctctgtgttctgattcatgttacctcttctttgctgcaccttcctgtattcctagagctaacattaacctgagtcatttttgttgttgttgttgtttgagacagtcttgctctgtcacccacactggagtgcaatggtgcgatctcagctcactgcaacctccacctcccagattcaagcaattctcctgcctcagcctcccgttggacgggactacaggcaggcgccaccatgcctggctaatttttgtatttttagttgagatggggtttcaccatgttggccaagcttgtctagaactactgggcctcaagtgatccacccacctcggcctcccaaagtgtgtcaccacacctggcggatagctcttttaaaaacgactcagggcaggccgttgagtcgatggggtgaaaccccatctctacaaaaaataaaaaaattagccaggtgtagtggtgcacgcctatagtcctagctactcaggagctgaggtgggaggctccattgagcccaggcagttgaggctgcagtgagcagcgatcgtgccactgccctccagcctgggtgacagagtgtagaccctgttctcaaaaaataaaaataaataaaacagctgtctaggaagagtcagagaactttgtaaagagaaagcttgatgagccagtgttcaagtattctctttcaccttcctctggtttccgaggtcatatatcatagtaacctgcagtcacttctttctccctaattttatttcaactctgttgagctttgtctctgtggttcctgtctatttcatgaattcactaatgattgtagttcctctgccattgcactatccttttcctccatcttctgaccacctgtccccatccagcttatcaatgttttatttatctgttagacatgactccatcttaagcagaaatgacacaaataagtgatgaggatgtgacacccataaatatacatccaccaaaaagctttcagggctgttaagatggacataagggtttcatttcaggacttttagcccctggcaatcattaagcttctttctgtctctatggattttcctattctggacattaatatatgggtttctatgaatgacttcttccactttagcataatgttttcaaggttcatcatgttgtagcatgtgtctataattcattcctttttatggctgagtaatattccattgcatgaatataccacattttatttatccatttttatttatccattcgtcatgagttgatgaacatttgtttccatgttttggctctcataagtgatgctgctatgagcattcatggacaagtttttgtgcaggtatatgatttcatttcactttggtatatacctaggaatggaattgctaggtcttatggtaactgtgtttaactttttggagaactgcccaactgttttcctaaatgtatgagggttctgattgccctttgtcctcaccaacacttgttattgtctgtcttttttatcatacctgtccttgtgggtgtgaagtaatatcttgatgtggtttttgatttgcatttccctcatgactaacgatgctgagcatccttttgtgtgcttattggccatttgtatgtctcctttggggaactgtctatttaaaccctttacccatttttaaatttggtaatctttttattgttgagttgtaagagtctttatatattctagatatgaacctttttagatatatgacttgcaaatattgtgtttatgtgtctttctctaattttctcttcttttgtcttggaagaagcaggaaaactgctgaggattcaatattgacattccagttgcacatgttctctgtcaatgtccttttgtgcttataggctgggcttttcccatcagataagcaaataattaaagtaacattcctgagatgacaaagaagtgtacctaagttctctagtgtgtagaaatggtaagaaagtgtctaaacatgagaaaagatttcaattaactgaaaggaatttgggagggaaagctgttactccaaacgtataaagacgaggtagggagatactaatgataaactcaattcaattaagcatactgagtacaagacaacgtattaaatattgtgatgaaaataagacttttttccttcagatgagatttactgagcacttactataagccaggcatgcgtaggcgtgaacacttaaaggcacaggctcttcttgcctccttgcttacttgtcaccatcatttgaatcaagacaacaaggtgtaacacgtgaccacatatacaaagtcccctaacagttaacaccaaggctgtccacaataggggagctgagtagggttccacagcgtggctgccatttcccccaccttgacatcctcattccccatctgtaagtccttccatccatctacccatcatctccagctcctgcccaacctgacctggccttcaaaaataagacactaagctcctccttggtgttccctcccttctttacctctttcttctcatcttaagactatatctcagttttctagtcctacggactagagttccctcaccgatttattccccaggatttcattgtcttcctctcttgtgactcagcctcctgggacttcccagtccaaggctcctccctctgaaaagcccataccattccctggtcttctaggacagccttgctgaccttggtttgtgcagccacttccatcctgcttgtttgtccttgaggtctctgcagcacggggagagctaaggccagctggggctgctggccagtgtgaccctcgaagcagcaaagcttcccctgtaaaataagatgagactccattgtgcttagaagtatttatggcctggaagggccctggccatccactcctgcctttcatcgttcagactaggaggctgaggggctgagaatagcaagacagaaaaatggacagtgcagcagttagtcttcatgaccatatcctgctctctgctgcgtggtctctacagacagttccaatcctggctcagcctccctttccctttggcctctgctctccctgtagccaccttcttccctttaaatgaatcacccattcaaatggcaggcaggtccctttttaaatgcattgtttgtggtgcatctctaacgagatgaatagcaggcttttggaaaggacagttgaacaggcactgcagggagggcgtcactccatagcatgtgtcgcatattagactagggggcacctcctggatcctccgtgatgcagaaaaagaaaaaaggcagagcaccccctgaggcttcctttggtccatggaggcctctacggggagggggcaggggtcatgggtctattcttgacatctgccatccaggctgaggcacagggacccagggctgagtagcaagagatctgcctgcccaggacaggtcctggcagtgtctgcagaaatggcagagggaactcagaaggaatctgagacgtggtttcagagtggcctccaatcagaggtcagcactgcagcaagaccctcagcaggcggggagctgccagcgtgccccgtttcagtcccagaggatcacctgatcctgaagatgagccaagagggccctggggtgaccctgacacctgctttctcagcctggctgctagctcagggcctgggagcaggtctgaggccagcctgaccctgctgggcttgattctggaaccatttggtgggcttcagcatgactaaaccctgctcaggagcagcctgagcccaggagagccacctgattctgttgaaaatgccaattctgggctccagcagtctctgaaaataagggccttcggatctgcactttcaaggaacagccagagtactcctgatccacagttaaataagaggatcacgacattagagaaaagggcttctaatttgaggatcatcaatttgagtcctaagccctcccattaatatctgcctggctttgagaaacttaatttgtctgattctcaatctccttcaccctaaaatgggaataatagtaccctaggtccactgtggggatgaaacgtttcaatttgtgtaaagttttgagcacactctcagcaccaataaatggtagctatggtcagtaacaggtgtttcttctgcacaggactgggatggcagagaccagaaaaaaagatggaaattaatagtgccctatttatactctaaccctcctatgtataaagggaggaacagtatatggtatacatgaagagttatagaaataactcacctgattcttataagagtcccaagacagaggtacacttgttagcacctttttaaagatgaggaaactgaggcacagagggtgtgaaggacttgcttaaggatccacaggccaaatcctcatagggctgggattcactcctaggcaacctggctcccgagccggactgttacccactgtattccctgcctctgtggaatcagctgcatcccagaggcagtgagaacccccaccacgtttcagaaagcactgatgcagaaccaacaaaaacacagaagtattttttaagttgatttgaattgttcgaatatcatgtccatcataggcttgcactgcaacagaggcaagacatgaaacttgctctaaatacgtgcacgcaggtccatgcaggccacctattccaataaagcattcgcgtggacaaatactcactgagcatctgctgggtaacgagccatgctaaacaccgtcacggataaatatgaaaaaaagagagcatctgcctttgaggggagggagaaggtataagacgcacatggaaatacgcatctttcaagctgcttgtgttaaatcccctacaagttatcggcctgtagaagattggtgggagagagaagctcttttgagccagtggtgtcttctctgtctacacctcttcctgctctatccagtctaccctcaaacctccattcatatgtgccagtgactcccaaatgtatagtcccagctgagaccactcatctgagctctagacccaagtccacctgcttcctgggcacctcgaaccccgcttcttctcctccccagaggcctcctctacctgggctccctgtctgcatggcagactcagctgccagctgtggctccttctccctctcacacccccacccagtctgcagggctcacctgctctacctcccaggcttctcccgactcactgcttctctccaccccctggcccaagcccttggcatcactcactgtattctaaattctcccaactaggtctccctggatcaacccattctccattctaaagccagagggatattttcaaaacacccgtctcatcattctactgtccagcttaaaattcttcaatccttcccattgctctttggagaaagttctaaagtcttaacatatcctgcgaagcctaaatggcccaccccggcacagttccagcctcggacatcactctcttgccttgtctttatcctggtcccagtggccttttggctctcagtctgtgcaaataacagtaacaaaataccacagactgggtggcttagaaacaacagaaacttatttcccacagttctggagggtggaaggccaaggctgaggcagatttagtgtctggtgagcacctgctctctggttcagaggtggcatcttctcactgtgccctcacttggggcaaggggccagagaactctctggggcctcttttattataagacactaatcccattcaggagggttggaagcacttttgtctagcgtgctttccctgcccaccaccttatctgattcctactcattttctagggttcagccttcattgaccctcagaacttcattgactctcaggattccatgttgtaatagcaggtgatgaaatcactaattgcgtggcaagccgtctggtgtctgtgtctcctgctggagtgcagctccccagaggccaggaccacgtctttcttgctgtctgcagccctcaacaagtgcagagccttgagcacagtgtggggccatttattggttgcatatgaggaatattcatgggggcattaaggaagagcgttttcatttcccattgctgctgtaagaaattgccacagacttcgtgctttagaacagcacagacgtattctttttttttttcttttttcttttccctcttttttttttttgagatggagtctcacgctgttgcccaggctggagtgcaatggtgcaatctcggctcactgcaagctccgcctcccggattcaagcaattctactgcctcagtctcccaagtagctgggaacacaggtgcacgccacaatgcccagctaattttttgtatttttaatagagacggggtttcactatgttggccaggctggtctcgaactcctgacctcgtgatctgctcacctcagcctcccaaagtgctgggattataggcctgagccaccgtgcccggccacagatgcattcttttaaggtctagagggcagaagtctgaaatgagtctcacaaagctaaaaccaaggtgtgggctgagctgcttccttctggaggctacagaggagaagccgtttccttgccttttcagctcctagaggccgcgtgcattccttggcctgtggccccttgcttacctcaatctcagggcttgcttctgtcatcccacctcctactgctcacttgaaacttctgcctccctctaggaggatcttctgtttatattgggcccactggataatccaggataatctctctctctcaggatccctaacttaatcacatgtgcaaagtccctgttaccatatgaagtcacattcacacattccggggattaggacttctttggcatctggggattaagacatctttgggcgagctgctattccacctacctcaggatggaagtaacagtttaaatggatgtgcaactggagatagaaacatggtgatttattctaatgtatgctacagccctctttggtatgttagaggtgtcatgattgcacttatttataatacaaatgttttaaatatagaaattaaaatggctcaaacacatgtgagattcaattgatgaagataaattttaatataatctcagcatatcaaagttatacataaatgtgaaaactcaaaggaaaggggtcatcatacattgaaccgtcttgctagacagttccttgactctcaagagtggactgttcgaacacgcctgttgctctcctgtccaggaagtgggtccacatccccccttttctggtgccatctgttgtgtgtggctggccagtgtctattgaatcacaacatttgacactggataagagaaaattctaacccaagatgagtaaggaaatgtaatggaccactcttccagttaaacacatacatttatcccttggtatccatgggcaattggttccaggaaccctcctccagccccccaccaaaagacgccaaaatccgtggatgctcaagtccctgatataaaatgggatattatgcatataacctacgcacatcctcctgcgtactttaagtcatctctagattacttataatacctagtacaatttaagtgctctgtaaatagttgttatactatattggttttgtatttgtattattattattcttattattattgagacagagtctcactctgtcgcccaggctggaatgcagtggcgcgatctcggctcactgcaacctccatctcctgggttcaagcgattctcctgcctcatcctcccaagttgctgggatttcaggtgcatgccaccacacctggctaatttttgtatttttagtagagatggggttttgtcatttgaccaggctggtcttgaactcctgacctcaggtgatccgtctgcctcagccccccaaagtgctgggattacaggcatgagccactgcgcctggcctatttgtattattttcttattttgtactgtagctttttttttcctaaatattttcagtctgtggttggttggatccacagatgcaaaaatccatggatgtggaaggccaactgtatgtccaaggcttctgaacaatacacatttcattcagagaaatcagggaagtcatggatgggaacattgaattgaggagtaaaagagacatcaacagcctgaaaatgggcaagcgtcattcagagtctcaaaaatcagaggttgggaggatctgtgggtaaacacaaataacttacatagtgattctggaacggctgttgaagagatggtttctgtgccctaagagtaggaagaagtggccacctacaggcaatattggttgggaaggatgtcatgtcaaaagaccatccttttcttttatggttttcctaagatgatgaattaggaaactattgtggatttccctgaggcattcgaagaaacttgcatggtcatattctcatagacaagatggaataacgtaaactggggaataataacttgggcagatttatatttgcttatttctcttatatctaatttcacaatggttgtgaaactgtggatgaatgaacaattgggtgaatgaccaaaagggtctactggtagggcggggttttatctgaactctatgtaggaggtttctgcttccttgacctttcacaataccctgaaaagtagggggaagggttctggaagccagaggaaggattctggggttgaaccaactggaagcttgatacagtgagagacactgaaaaatacatatatgggagacatagaaatttgtcaagagaagccaatgtcataaccaggaaaatggtgccaagaaggatgaacaaaactgggaaaaaaattaactaggacagtatgaggcattatactggtatgctgtaaaataaaataaaaactaaaagcaagatattaataaaatagacaagctttttctgtgccctaagaataggaagaagtgaccacctacagacaatattggttgggaaggatgtcataccaaagaccattcctttctttgataggtttcctgtgatgatgaatcagggaactattgtggatagcatccctaggaggatggagtagagggtggtggaggtgagacgcctccccaaccttgctcacctcctgctggagtttcaagggcagttctggatcccataatttaacaggaacattgacaagctgggatgtctgaaagcagccagcctggaaaggagcagtctcaggaacaacacagtgctttctgcagatgccggaaaggctagcaccgaacaggagaatcctatttgttctagggttaccctagggaacaggaataaaactggcagtggaagctgcaggcctcaccattttcctctctgctgccatcctcttgttcttgccttcagcactgtgtggaaggcgcatcctacactccagcttctccagccaggttctcaccacccacactccagatttgctagcaaaagcaccacatccagaatttccattccacgcctcctacgcttcttgcttgtgcaaccctcctgcaacatgcttggaccacatggagctgccaaccctttgcccccatcacgatcctcccacccgtcagcatgtcctggctcccctttctctttgcccaggttagactccatggtctatctttacgattgccctgagaccacctacacctcctctgaccctcttgcctcctgcctggccatacccagcccctttaagccctgcttccacctcctctgttcctgcacccaggtggctcaggtctgcccagggaaaccatgtggccaaactgaggctgcccctttcaattcatgaaaagaatcctcacatgcattctcagcacgcctagaacatcccatttcatttccccagtaagagcccttttttaaagaacaaacctaaacgttccccttcattctctctcagttgcagatgacacccatacttatttgacacagtacgaaatcacacgaggcaactcactcctctccctccactaagtcgaaaaatttacctgcatttccaccagtggatctcaaacagggagctgagagactcctccccagggacatttggcaatgtctggagacctttttggttgttacaacttgggttggggtgggaggtactgctggcatctagcaggtagagcccaggaatgctgctaaatactctattatgcgaaggacagccctccacctcaaaaaatcatccagcccaaaatgtcaaccgtgccaaggttgagaaagcctggtctacacctaccttccttctgttactatctggctggatacatcagggagagacaaagccttgtgacatatctcaatgggttctattggcatttggggtaggacagttccttgtgtaagatcgtcccatgcattgcaggacatttagaattcctgacccctgccaaccaagtgcaaggagatagagcccctcaacccggtttctgtgacaaccaagatgctccccagatttccagttgccttttatggagaggaaacttctcccagttgagaaccattgtacaatgatggtgattttatcatttgcaggattgggtggtccaatccacttcctttcttcctgtgtgtgtgtctgtgtgtgtgtgtgtgtgtgtgtgtgtgtgtgtttgagacagggtctcactctgtcaccgaggctggagtgcaatggcatgatcatagctcactgcagcctcagtctcctgggctcaagtgatcctcctgcctcagcctcctgagtagctaggactacaggtgtgcaccacaacgcccggccaattttctctatattataaaaaaatcaaaggttaaacaaatattttaatgtcatttgttcagtatgtttatatataggtataatttctgaaatcctcaaaaaacgtaatacatcctttcctccaatatttttctttaccactgaacacaaacacataaaaataaaacagacttttaaatatactatcaagacataaagtgtttgggaaggttacatgtatttttagaaaaacgcatcccttgtgaagctcttacaaaattgtagcccataaaaatatgagtgtaaaagaaattgttgtagcaagagaaggactacttatctccgagaaggttaactatccagaaggcaagcttcacgtttaattggagatcatttgagtacaagagcactgccttattgtgtcctttatgactcctcaggtccatgtaatccactccgctgcatacaaagtgctgtgactgatcattctcccaattcagaagcattctggaatccccagtacaatggcgtccatgccttgggcatgaaacccacccgctaagaacagatatttgatcccttgactccctagattgaatcttcacataccattataggccctgttataggaaaaataaaaataaaaaggttaaaagaagctcctggctgggtatgcaagcatttcacccagcagaggccacctgttgagtgctgggtggggaccaggccagcctcgatgagtgagcacagtcagggtccggagggcagacgtcacagtccaggacagctcctgccactctccaccagggtcctcaggcaggaaggacatccctctgggctccccagatggccactttgagagcctggatcaggcttttctggtcctacccttgagacctgaatcctcttggtttacaagctgcccatcctcacagggcatgggtagctgactctaaagtcaggtgaaagggggagaaatacccaaaagaatgtccactggcctgaaggagagatgcaatcagcacagcccatgtccttcagctcccagggtcacccacaccagtgaaacacaaatgaaataagtaagctcgctcaagttgcaggaggtagagagcccaaagggacaccccagggtgcttctttattgcctttatgaaaaatagctcattgattgctattaacacatctaacagtaggtgggcacgcctccaccacatctaagaacagagacaaacagagctccagaaacttgaagccctgtaattagtgagcaacctttcagttgaaagaaatagaaaagtaagctcatatggacttaaagaattgtgaaatttaacagttcacttaactgaaaaattcagaggaaggattttcttaggggctaaacaatgtcaacgaaatgagattttttttctctctccctctctcctgtggtgtctgtttcattttaagggtggctcctttgtaatccagtgtggctgccccccaggtacggatcctcccctgtttatgtccaacaaaagtgagcatctctccaggtagactccaaagaagagttagggggatttccactctggaagtcctcagcaagcagctccttgagctttcgtgaccaaatttgctgttgtgccggtccctgaatccatcactatagccagggactggaatatgctggttggcttaggcaatccaggttctcgggacctggggatggactagggttcctgaagctgcgtgtgagagggaagtggatgcctcaacaatagatgagatctgttacccagaggaggggcaacacctcctacagcccttgtttaccaaagtagcctctcaccaattgacagcatgcatcagggtccccagggtgctcagggccctcttgcctagctggtgctgcatttgctggccatttcaggggtgcagctgccagtaaccacagttgtgttgcactcctgtgactaagggtggggctgccatccaacttcctttagatggtgtattagtttcgtattgatgctgcaaaaaattaccacaccttactggcttaaagtaacccagatttatcatgttactgtcctggaggtcagaagtccaaaagaggactcaccagattaacaccaaggcgttggcagaactatgttcctttttggaagccctggggcagagtctgtttcctgacctttctcagcttccagaggctgcctgcaacccaaggctcgtgccccttctgtattcaaagccagccatggccaggcaggtctttctcagtcaaatcacttcaacgctttccacttaatgatccttgtgattgccttgggctcagccaaatcatccaggatgatcttcccatccaaaatcagctgattagcaaccgacttcctctttgccatgtaagggaacatattcacatgttccagagattcggatgtggacatctttggggggccattagcctgtctaccacatgtagaaggaagtgataccaagtttagctgggttttccactgtgtaaatgcaaagttttctatttgccttttaaaatatataatctcctttttatttctatgtaattacccacagtagagaagcaaaaatgctccctatgtaaatgtactgtgttattattctataatgacttacatctgaaggttaatttcattgctttcatcacagaacaatttaatgaagaaattagctttaatagtgaacaaataaattgggtgcaactaatgacagtatcattcagacacaaattctaaatatttttcatatatgtgaattcagtttcttcttacaatttttacttcttttctcctatgcgtctcagttatttttacaaagatatagatttggcttttgttacatagattacattccatcattctttcatcttaactcagaagaaaaatttacaacttaacaaccacatttttccagtatcaaaactaccacagattataattttctttcttttttttttttttctgagactgagtcttgctctgtcgcccaggctggagtgcagtggtacaatctctgctcgctgcaacttccgtctcccaggttcaagctattctcatgtctcagcctcctgagtagctggaattacagctgcccaccaccacacccggctaatttttgtatttttttagtagagacagagtttcacccatgttggctaggctggtctcgaattcctgatgtcaggtgatctgcctacgttggcctcccaaagtgctgggattacaggtgtgagtcactgcacccagccctttctttcttcttttaatggagccacacagcacatatttttcttgataaccaaaatgagtcactgaagcaactgtctcaatcagttgagatttattaaggtaacctcagtgcatgtccaggaacacgcaagccacagacctatctgtggctattttcctgaagaggttttcaggaggtttagtatttgtacattttcttaaaggggagaaaggcatgtaggaagagaggcaggtaggtggtaaggcaatggttatatctttgtgagactttagttagtgcccagtaaatcaacattttacataagataaggtgaatgtttgaaagaaaaaaagggagtaaaggaagaatttattatgcagatgtctctgggtaagcagaggaatgattgatctagtcttgtctttattctgcacctgggaagataagcttgcaattgaatgtcaattccattatcagcatggaatcaaacagactttagtttcaggagccagacttagattgcagacctaaagttgcaattggcatgtccttgtttatgggaggccagcaaaaaattcttatgaatggtctctacgggcagtcatttggagacccctgaagcctttcatcttttcccagggagtctggttgatgcataatgctggtaacagcgatttatttggaagagggagttgcataactcaacctctaggcttaaccttccctttggcataaggagtttgaaggtccagagatttttaaaatttcttcaactgtttttattactgtaggtagctagtcagacatgagcaggccaggagagggcccaatcccacccccaccaggaatgtcgggtgactatcaggtggtggtcaggtggttgttaactgtctctctaaaaaaataattggtcacacccagtgccagggaaaggtagtctcccaatagatagaaaaaacctgaagttggtgatcagcgacttcctactaatatctcaggagccgggtaagtgggctcacatgtgtgcaccaagacgaaaactggcggagtttaactggtatgtgaccttatacgaagacttgactggtaaaggaagaacatctcaagtgagcatgtgtacaagtcccataaatgcactgtgcatgctcacctccaagagctggcaggccactgcacatgcagacagcccaccccaagggaagaatcagagagaagggatgcaaggccccagaagtgtgccaacatataaaaccctaggtcaaaggtcaaagcatgcacttgatctctcaagttgcccgcttggccccctcttccaagtgtactttacttcctttcattcctgccctaaaactttttaataaactctcactcctgctctaaaacttgcctcagttctctcttttttttttttttttttttttttttttttttttttttgagacggagtctcgctctgtcgcccaggctggagtgcagtggcgggatctcggctcactgcaagctccgcctcccgggttcacgccattctcctgcctcagcctcccaagtagctgggactacaggcgcccgccactacgcccggctaattttttgtatttttagtagagacggggtttcaccgttttagccgggatggtctcgatctcctgacctcgtgatccgcccgcctcggcctcccaaagtgctgggattacaggcgtgagccaccgcgcccggccacctcagttctcactctgccttatgcccccctcagctgaattctttcttctgaggaggcaggaattgaggttgctacagatccatacagattcactgcttgtaacagttttacttatatctttgtcatggacacctatagctctatctcatctattttaaaggctgtatgttatagtattgataaaacttaatttatttgtatttccccactgctaagctttttggttacttccaatttttgccatcataaacaattctatgcaacaggctcttttttttcccatgtggtagtatttttttacccccaaggcaagcttttgagaaaatgtcccagcatgatatttaaaagtttataatcagatattgggataaagaatccataaaccttggggactgattggatctgggagatagaggagaggtggagtctgggatatacccagatataagggaccagatggggctgggcacggtggctcacgcctgtaatcccagcactttgggaggccaaggcaggtggatcacttgaagtcaggagtttgagaccagcctggccaacatggtgaaaccacacctccattaaaaatacaaaacttagccaggcatggtggtgtgagcctgtaatcccagctatttgggaaacaggcaggagaatcgcttgaacctgggaggcagaggttgcagtgagctgagatcgcgccactgcactccagcctgggagacagagtgagactctgaccagatgacaggtagcctagctttttttttttttttttgagacggagtctcgctctgtcgcccaggctggagtgcagtggtgcaatcgtggctcactgcaagctccgcctcccaggatcacgccattctcccgcctcagcctcccaagtagctgggaggtagcctagctttctacttgagaccagaggacctcaggtagggtgctacaggcctggctgcacccctgtgagctccatggccctggacaacttaacccctctgagtttcacttttcttacttctaaacaggggttaataataaaacctcctagggttgtcatgaagatcaaacaaaatgaggtgatgtacaaatgtccttggtataaaaattaacaaatcttactacagcagcagatgatggaatacacatcaaagccattcagaaatactgaaaacactatgtgaatgtaagtgactaatattatcattgtgctgcctcatccttgaaccatcttcccaaacacttatggacacagcttgcaacagcataaggcacaagctgtggccaagaagagctttctcttgtggatttacatgaagccagtctctaaatgacatttggagaatcagattctcttgtttatgcttcttccagaaataggcaccctgacatgattagtaggaggtgacagctttaagttcccttccccacaggccaggcacgatggctcacgcctgtcatcccagcattttgggaggctgaggcgggtgggttacctgaggtcaggagttcaagaccagcctgaccaacacggtgaaaccccatctctattaaaaatacaaaaattgggctgagcacagtggctcacgcctgtaatcccagcactttgggaggctgaggcgggcgaatcacagggtcaggagtttgagaccagcttggccaatatggtgaaaccccgtctctactaaaactacaaaaattagccgggcgtgtggtgcattcctgtagtccccactactcaggagattggggcaggagaattgcttgaacccgggaggcggaggttgcagtgagccaagattacgccattgcactccagcctgggtgacagagcgagactccatctcaaaaaaaaaagaagaaaaagttcccttccccacatcgtcactgccaggtgacctttacagtggaaacaagtcttaggataattctgtcaccacagaaacatttcttagcaagcagtcacaaatatgatcacactactgttcttattatttctaatatgctttttgctgattaaggaaccctccagtgcaggttctgacagcaatatttgaaagcccttattccagtcactgctggatccagacagaagcgttgtactactccagggatgccattcctattacacacacatccaacacctgccaaaattttcttgtgtccatttgatgtgttttgtttctgcagttaaaaaaaaagaaagaaaacccacctgacatgagatctaccctgttagtaaatttttatgtgcacaatattattttgtgaactcttatgttgtacagcagatctctagaacatattcacaacagaactgaaacattgttccctctgaataataactccccattttgataggaatgggaggcaggagggcagggcccctggcaagggctccaccctcaagcctggaccggcagccctaaatgagaacaggcattcctgtttttgagccagaatgttgatttttggcctgccctgcccccacatcctgggcccatataaaccccagaccgcagctggcagagggaaaagcagctggacttcgagaggcgaagaagcaactgagagtcggagaggatggatagatgcagcttaacttcagacggcatgactttggagaggagcctggctgaagatggccaggcctcagggaaagatcaccttcctgcaccagccccttttcagctcttctgctgagagccacttccactgcttcataaaacctctgcactcaccagcctttaagtctgtatgacctgattcttcctggatgccagacaagaacctgggtaccaagagggcagggtgtacgtcaccctgactcgccactgagctgattaacacttagccatcactgacggcaaccactaaaagagcattgtttgtaatacatgccctctgggactccagagtttgtgggcaacttggtacagggttcattcctgcctaaaaaggcactcaccccagctcctgaacctgctcacctgtgtactccccctcctgcaagcaaaacaagcactcccacccccccgaaccccaccctaccccactgtcgcaagtccctcgagggggtcagggaactttcccgtctcaatttcctccaccctcaaatgtgcacttttgcctagggcgcttcagatgttatctcactgccccagaatgcagactgatatctaacctacataagcacacctattgcaaggcctgagtattttaaagtaactatccgtaacataacctgaatgatataaccaggaatatccataacctgaatgatataaccaggaatgtgactactatttttaagtttataaaatcgttagaattgctggctgatgttctgtccttgttctgatatacaaaaaatgtttttcacatgcagaaaaaacatcgttgatccggaagatccccgatgtgtccagttaacgctcactggccagatgatcgcagtgtctccagaagaagtagaatttgccaagcaagccatgttttcaaggtgtgtaaatgctttaaaatttatatgcccagaaatacacaatactaataagcagaggtcaggctgtgccattagatgcctctgatgcaataagtgattggtctccactgcccttcggtgggaatagggccaagctcagcctggctatggagatcactagcagtggcagcagaagccgggtgaatgcctctggagagcactgcactgagctattccaggtacaattcctacctacttccaacctttgacaatgccctgccttgccgtgaaaatagctgagccttcctcgtcaacacaacgttttcaagcatccacttgaaacaaagcccattgcctgctggggatgccagcgcagcgtttctcagtgtggtgctctcgctcttacatcagtaggctgctgacttagacgcagctttatgggcccaaccccaacctacttactgaatcaaactctccggaaatgaggctcaggaatctgtattgtgaaaggcatgctccaggaaattgatatgcatgctaaagtttgagaactactgctgtaggggtccacacaagtgagaggggggcccagcctggagtcagagcttgtgcaagcagaggaccgcgcatgcacgcgggggtggcctttccacaggtgtccatgcagggaccgccggaagtgcaggctcggagctggggtgcaggctggtgcagcaatggaaacaggctagaaggcattggtctgcagtagagggagagtaacacgaaggcaagtgttgagctggaggggcgatccacaaccccatgggaagaagatcctgcacgcagggatgcagtgaataagcaagccttgtaaggacacagaaaagggctaaaggcacaatcggagaaaactagaatgattgggattggatatgttcacatgagctcatggctttcaatacctaaagaaacagatgtcagtgtgcgtgtgtgtgtgcgcacaaacgtttttattttttatttttattttttattgctagcttttaaactcaactctagttctttagttcttctcctctcacatgttattataagcaatgagaagaggccaaaatcttccctagatcagtgggttcattaggttcatttcctattttctttttttatttttattttaagttctgggatacgtgtgcagaacatgcaggtttgttacataggtatacatgtgccatggtggtttgctgcacccatcatctaggttttaaggtcccccatacattaggtatttgtcctaatgctttccatcctcttgcctccaccccccgacaggccccgggtgtgtgatgttcccctccctgtgtccatgtgttctcattgttcaactcccacttatgagtgagaacatgcagtgtttggtttttttgctctggtgttagtttgctgaggatgatggcttccagcttcatccatgtccctgcaaaggacatgaactcatccttttctatggctgcatagtattccatggtgtatatgtgccacattttctttatccagtctattattgatgggcatttggattggttctaagtctttgctattgtaaatagtgctgcaataaacatacgtgtgcatgtatctttataacagaatgatttataatcctttgggtatatgcccagtaatgggatggctgggtcaaatgatatttctggttctagatccttaaggaatcgccatattgtcttccacaatggttgaagtaatttacattcccaccaactgtgtaaaagcattctatttctccacagcctcgccagcatctgttgcttcctgactttttaatgattgccattctaactgccatgagatggtatccattgtggttttgatttgcatttctctaatgaccagtgatgatgagctttgtttcatatatttgttggccgcataaatgtcttcttttgcttcatgactaaaacaccaaaagcaattgcaacaaaagccaaaattgataaatgggatctaattaaactaaagagcttctgcacagcaaaagaagctatcatcagagagcaaacgggcaacctacagaacgggtgaaaattttttcaatcgacccatctgacaaaggtctaatatccaaaatctacaaggaacttaaacaaatttacaagagaaaaacaaacaaccccatcaaaaagtgggtgaaagatgtgaacatttcctattttctacctaactacagacaacagcattgccaagtttgcctaccactacataatgtagatccctttacctccagctttcagtagctttttctgcttttatttttaattttagaggcaaggattttttcttttgtgcaggctggagtgcagtggcgtaatcatatttcactgcagccttcaactcctgggctcaagggatcttcttgcctcagcatcctgagtagctaggactacccacaggcaccaccttttttggagacagtccaggtctgttgcccaggctggagtgcagtggcatgatctcggctcactgcaacctctgcctcctgggttcaagtgagtcttgtgcctcagacttccgagtagctgggattacaggtgtgcaccaccacggctggctaatttttatatttttagtagagacagggttttgccatgttgtccaggctggtctcgaactcgtggcctcatgtgatcctcccgcctcagtctctcaaagtgctgggatgacaggcgtgaaccactacgcccagccaggcactacctttttataagccctcactgtcagtctcctcagggtccttccagcttccacccagtgcctgggcccagagccagtgccccatggattagggtttgctgcaccagcaccacttccaggtatcaaactttgttccagttatcagtacaaaagtaggtttcttaaaacaacaatcatgttattatcttggctgcataatatttggggtgttatggcatcagatcagcaacttttgttcaaatggattaagaaaataaaatagttttggatactgtacttccaatttccctgtatgtttattattgtttcaaaataaattattctttaaaaagatgattgactgagtgtggtagcacacacctataattccagcactttggaaggctgaggcagaaggattgcttgaggccaggagttcaagactagcccgggcaacatagtgagactgcatctctacaaaaaaaaaaaaaattttttttaaattagccaggcatggtggcacgctactcatgaggctgaggcaggaggatcgcttgagcccaggagatcgaggctgcggtgagctatgatcccgccactgcactccagccagggcaacagagcaagattccatctctaaaaaaaaaattttttaataaataaagatcatcaacctattattgcatttgctttgtaataaatgtttttcccagtttggactcggtctttgaattatgtttatgacattttttagatataaaggaaatttttatgaagttaaaaaaaagaagtaagccacagcccctgccctcaacgatactgcagcgtgtttaggggtatgcatcggggagaggcaagtcagtcaacagcacaagacgggatgtgacgttgcctgtcaactctagctggctctcacctgcctcagtagctctcagcctgctgcacgactggaaatcttcccatgaacgaactggtttcacaagctcaccattttgttaacatttcatatagagatgcataaagcctttctttatgtttccaaagaatggtaaccagcctccactgagcactcactctctgcaggtgttttctgtgtggttcattgcctgcttccccacacagccctatgaagagccgcatcagcatcactccacgtgacaggtaatgagacagaggcttgtgagtgccaacagcccactggcgtcacagctcatcagcagttgaactgagattcacaccaaggagcctggcccacgtcttgagcctctagccacatggggtaaggtctacagtccctggcttcctacggtggtcccaggcactgacactcagctccctggttctgcctctggctgatgtgagcagctgtcagcccaaatgaggcctggactctggaggtcctatgacttggcccagggtgcacctctctgataagagcagctttactgtggtctctctttattcctgcaggcacccagggatgaggaagtggcctcgtcaatatgaatggttctttatgaagatgaggatagaacatatctggcttcagaaatggtatggaggcgcatccagtatttcaagggaggaatatttcaaagcagttcccagaaaggcctgatggagtgagaagaaagtccttggtgtttgcacttaaatgaaaaccttttcagtgatgcagccagacagctattgaccactgtctctttgttgaagggttcatagcagccctgccatccctgcagcagaatgagagagggtgaacagggaactctatgctagatttgagattaaagtggtcatttgcagatctccaactcacacagatacttcacgtagatagtctttattccattgtattcaatccagactcatcgattcagaaatcatataatagctggtggtcaaaatgacatgttgagatcattgttgtttcattgtttaaggaaaaaaaaaaatgcctgtacctacaatgtgattgctttgtattgtgagagtatctttgttgcttgctctgccaaatgcagtcttggttctaagttcactgtgaccacgaagcagctgactgtgcatcacgcagtcacaatattgtttttagggtgagggtggaggactgtgtgtccgtggattactcctcctgctggtggattgcagatgcattattaggtcatactggctagaatgcagcttttctcccaccataacatgaaaacagtgtaagaacatagggtgctttgtgcatagcccttctctatgtaagcagccatggcagtcattaaagagaaaggagtagctttgacattaagctccccagatccctgctgctcatacttctggcaagggttcccctctctcatgcatgaacaggggcatccaaaataagaagctctccattctgtggtggggaaagcggagaggggagtgggtgaagctgggaaagtaaaggcagcacgttacagaaggaagaaaggaagccagtaactgagggcccactgcctgcccggccctgggccaggccctcaacagaagccatctcatttaagccctgcaaccaatgagatgcacgtcatcattggctcttacagacaagaaaactagactcagaggggctgagtccacatcccagacagctcactgcagacacaggtggagtggttcctacaagacatccagttttaacaacaaaagagttattgaaatgcatgggtagaaattgaaccaggaaaatcagtaaagtgattgtaaaaaagaaggactagcttgcctggagatgatgtttcttgcttttggaaaaaaaaaaaaagtctctgaaatttgattcttactacagatttaaaactttctacatattatatgtaggagctcctagtgtttttgagaaattagactgtacctgtgtacacttctaaggtctacatggacctatgtatatatatctaagacctctgatcattaaaacctataaagggttgagctgtcccaagttttctgtctttctgtaatggctacaaactttctttggtaggttagggaggttgtataacataaaaaacacatcactatatgtaggaaatatacatttttcaagtaaataagagtgttattaatgattatgaacttttgcttaacaaaataacatacgacgagagcttgagttgtcaaaatatattttaattatctattgctaaaaacatagtaagatgcagagaattctttatttgtcataagccagtcctcaaaagagttcctaacagtagtgatttctaatatataagaataaggtacttctgagggaattttatattttcagagtttaaaattattgctactcccaatttagaaaaatggggagaaagctggaagaacaaatgacatgctcaaatgtattgcataagtcaacctcacaccttaatactgggagcttctctgcctcctgatcctgtcttgcagataaggtcccctggctaggtttgcgtttatagtcaggttccatttagctcattaaaggtcactgctgcttcaaaggactttgcccagtggatgccattcataaccactgatgaatgttatcagctatttatccaaattacaggaaatgaaacctgaaaaggttgggtaagaatagtgttgaaaattcacagttttaagtttgatggtctccattcaggcaagtgtgtttcagcaaatctctagaaatttacattgattaaaatgttagaggctgttctggaagttctagacatggcaataaggcaagaaaaagagattaaatgcatacagatcgaaagaaaaaaaaagtacccctatttagagatgagaggattgcctacatagaaattccaaataatctattttttttaaaaaaaaactctggaactagtatgtgagtgcaacaaggtctcaggacacaagatcagcatacaaaagtcaattgcatttctctatgctaacgatgaacatgtggggaaaaaaactaaaaacacaataccatttgcaatcactccaaagtgaaatacttccgtataaacaaaacttacccaggacctatgtagtgaaaatttttaaatgctaagaaaagaaattaatgacctaaacaaagaaagagagataccatgttcttggattggaagatacaaacagtaaagatatcagttctccccatctccatctctaggtttaatgcaattcctatcaaaatctcaacaaggattttgtagacctatacaagcttattttaaaagttacatggaaaggcacaggcattgaaatagctaaaacagtcttgtaaaagcagaataaggtaggagaaatcattctatttaatatagagttatgatgtagctacagtattcaagaagtgtggtatttggtggaggcatagaaacacattgatggaacagaatagggaatctagaaataggcccacacaaatatgctcaactgattttcttttacaaaagtacaaaactaattcaacagaggatagccttttcaataagtgtggagtaagtggacatccataggaaaataaaatgaaccttggactaaacttcataccttatgcaaaaattaactcagatcatatctgtaaaaataaaatgtaaaactataaaactataggatatagaaaatcttttggaactagggctaagcaaagggttgttagacttgataccaaaagcacaattcataaaagaaaatttgataaattaaacttcatcagaatttaaaacatttgttctgcaaaagaccatgttaaaaggccgagaagacaggccacatactgggagaaaatatttccaaaccacatatccaacaaaagattagtatctagaatatataaagaactgtcaaaactcaacagctaaaaaattctaattagaaaatggagcacatgaacagacatttcactgcagaggatataaaaatggcaaataagcgcatgaaaagacatgaaaagacagtcaacagcactagtcactaggggaactgcaaactaatactacaatgagatatcactacatagctaccaaaattgctaaaataaaaaataatgataacaccaaacgctgacaaggatgcagataaaccgggtcagtcatacactagtggtgggaatagaaaatggaacagccactccgcaaaaccatttgccagtttctcataaaactaaacatacaactgccatactgaccctcaattgctcctgggcatttatacaagagaaatgaaaagaggttcacacaaaaacttgtgcatgaatgttcatatcagttttatccataatgttcaaaaacttggagaaatcagatggcctttaacgggtggctggtgaaacagtggatggtgcctctatgcccggaatactactcagcgataaaaaagaactaattactgacatgggcaaccactgggatgaattccagagaattgtgctgagtgagcaaagccaatcataaaagtttgcacactgtatgattccatttacataacattttgaaatgcaaaattataggaatggagaatagattaggggttgccagggaggagtggggagaacaagagagttgggcataactataaaaggatagcacaagagatccttgtggtgatggacatattcagtatcttgaccaaatcaatgtgaaaatcctggttgggatattgtactgtagtttagcaagatgtgccattggggaaaactgggtaaaaagaacacaggatctctgtattatttcttacaactgcatgtgaatctacagttatctacaactatctcagaatctacaattatctctgagtaaaaagcttaacataaacaagatttagggcttagcttaataaagcatttatactctctctcttattagtccctaataaaatgaggaactgagctataagccaaaacctagtacaaagagacagcatttcatttgttaaccgttaatatatccatttgcagaagaggtgtaaaattctttaaaattttcctaaatatgttcaatttaatgttaaatacaaattaacaagaattcaacaaatctgctgtatagattttaagtgggtcacttaggaggagaggacatcttcgaatttctgatataaacacgttgagtaagctataggtgtatataagtatccaagtgtgtatataatgattctccactgattttatagagaagaactatatttccagtaatcttcccctaaatattgtgggaaataattctgttttagtgaataagctaattaaagtctatccagaccaccatgtttttatttacagtgactatatatatccatgattttgacatagagtataattctgatgttacttatttcaatatgccttgtatatattagctgtttataagagagtcgctttttggttgaaaagtatttctaggctgagcaaggtagctcatgcctgtaatccaaacactttgggaggccaaggcaggaggatcacttgaggtcaggagttcaagagcagcctgggcaacatagtgagacctcatctctacaaaaaatatttattaaaaaaaaaaaaaaaaaagcccagcatggtggtgcacacctgtagttctagctactcaagaggctgaggtgggaggattgctttgaggccaggagtttgacctcctgagctgtgatcatgccaccacacttgagtgatagagtgagactttgtctcttaaaaaaaaaaaaaggtatttctacaatttttccaaaaagtctgtatttatttaaataattgaactatcaaatactgttctgaaaataaaacctctctaggataatttattgatgcttatttgattgctataacagaaagtcaattattgtacaatttgaattgtaatgatgtgattatttgtgccatgtaatgcatgtaaaatgtaaaatctgttttcaaaactagatctatttaaccaaagactatttcattcctgatatgatttgtgtgcttgattaaatgaatttatgatattgatatatagtcctttcatgtcatactacaaattaccattactagaagttctaagaaaatagacacgactgcagagaatcagcagttaattttccaatagaaaagaaagaattaggccaggtgcggtagctcacgcctgtaatcccagcacgttgggaggctgaggcaggtggatcacctgagatctggagttggagaccagcctggccaacatggtgaaaccccgtctctactaaaaatacaaaaattagccgggggtggtggtgggtacctgtaatcccagctactcagaaggctgaggcaggagaatcggttcaacctgggaggcagaggttgcagtgagccgagactgtgccattgcactccagcctgggcgacaagagcgaaactcagtctcaaaaaaataaaaaaagaaaaagaaaagaaagaattagccaggttacttttgttgatttcttaaggctctgcataaaatgcacctaatttgcagactcaaaaatgccaatgtagccatgctttggtattcccactcttgaaaatatttgccattttcaacatagttgttattcctggagttcagggctaggaaaaagccccatcccacagatgaacaaacatgcacaaggggtcacacatacaaagtgtggcaaaaaatgatgtgtgcccacgaggtcaaccctgtgtgactgtagcttccacagaccacctgccaacaccctggcttctccaggatattcttgtcctccacttagggtggcaaactggcctggttcacctaggaatggggaggttcctggaacgtggggctctcagtggtaaagtcaggaaaatactaccatactgaaagaggttggtacccctcccttgacgccacctctcagtctcccacatcctgggccaccccctggagcaggccatctccagggtgacccacttctgaccatgcactcagacatctccacccacacttctgtccttccagcctttctcccctgccgccagagcacttgctcaggaaggtgaccgacaacaggatgggattgcagtggagaacacggccatgccctgcactcaagatacaaatggtttctaaacagtaagtaaacaagcacgcttggaccccaggtcatcattatgtagattcagtgccccatcccttcagccagtagtctcagcatccccactgttttcatcagaaccacgtggcaaactccagcctggataaattcagcattcatctctgcagctgaataacattcacaaggattgctttggccttaaatccaagggctgccatccctgactaggccctccttgtagcagggctttccctgcagctgtctcccaccctctcctatatgctcccggggaaatgggctctctccaatgagcactccctcaactccctggagaattcctccagtggctgcagccccttcctcctcctgcctgccctgctggatggttttccagggcagggttccccggcctggatgtgggcaggagccggggtccagactcatcccaggtagagacaggtgtgatggaagaaggggaagcaagggggcatttaaggtgttttcttttcctttttttttttttttttgagacggagtctcgctctgtcgcccaggctggagtaggggcgcgatctcagctcactgcaagctccgcctcccgggttcacgccattctcctgcctcagcctcccgagtagctgggactacaggcgcccgccgccacgctcggctaattttttgtatttttagtagagacagggtttcaccgtgttagccatgatggtctcaatctcctgacctcgtgatccacccgcctcggcctcccaaagtgctgggattacaggcgtgagccaccgcgcccggccttttgagacaagagtcttgctctgtcacccaggctggagtgcaatggcgtgatctcggctcactgcaacctctgccttagcctaagaaattctgccttagcctccgagtagctgggataacagttgcgcacaaccacacctggctaattttatatttttagtagagacggggtttcaccatgttggccaggctgatctcgaactcctgacctcaggtgatacacccgcctcggcctcccaaagtgcgggggttacaggcgtgagccactgcgcccagccgtttagggtgttttctaagagcggatagggtgggaaggaaggtagtgcaggcagcaggcggctgtgacagccgcagtgggggacctgagaccacgatctggaaggcccaccattgtccacagtgagacatgtgaacgcccagttccagagagatgacagcgatgacaaggccaggctgaagctgtggcaatggacggtggaggtgaccgggaacatggtggctggggtgagccagatgccgcagtcacagtgaaggtgagcaggaggggcgagacgagcagagaggagggaagaggctgactgggagccatgcgggtaggggagggtgccgccatcctgcttgtcggctactgctgagggctactgatgtgaactttcaaggagcagggttgtttcgtgtttcgtgttgctttaccggaggaggaatgatctgcaaagcatgaacatagctttataatagactaacgtagcttgaatccactgtttcttagctttgtgaatttcgggactgagtgaatccttcgaatctcagtttcgtcccgtgtaaaatgggataattattatgcaatgcctggcatgccgtaaaggttacggcattataggatatggtggcattataggacttctcatttgcatatcgtatagatgacatttgtccacgtgtcagtcgccttagcaagactgggagccagtagaggggctgattttgcacacggccatttatggctcctggtaggtgctcagcaaatgactagaaagaacggatgagttcgttttctgagggctttgggccggagcccctgcccaggtctcagtgggtagccttacggacacgcttcattttttcctgctcccccgcgactccctccctcgccttcttaccccgcctcactgaggtctcccacccttctaaccacttccagattagcccctgagcctcccggagtttctgatcagctcccgggtttgcaagcctggcaatttttcactgcagccaaggaaaagaaccactgcgccccctggtggctccatcttagaaacctcgcctttcccagagcccagcatcctgccaggagctaggtgcagacattaacctcatctggtgttcacatccaccctgcaagaaagaaatgcttcagtttttcacatgctaaacctgaggttcagcaaactcacagacctgcgctcctgggcttccagggccagggaggaggctgagcaggtattaaacccatgactgactccaacctcctttctctcctctcaatgctttgggggtttccagaacgcagtcagacctattttcccctccttgagttttccctctcttccttccgttctcagcaccccaccctctccctgctctcgacagtggctgtccctggcaatggccccaggctcagggaggagcagctccagcggaccgagaccaggctccatctgcatccttcacaagccgtgtcttccctggtcctcacggcgaccctgtgaggcaagtcctcctattctcgctaattgccaactcagaagctgcccagaatcacacaggtaataactggtccattgtgagcccaggttcatgctctcaactaccacccaatagtcttaccctggcgtatttatgtatattttggtattctattgtgattgaaattttgattttaattcaatgatacctacaagaaccataacttcagtgggactcatgatggcctctagccaggctggggagctttggccccgccccggctccgccccttcctttcttgggtcttttgctttgtcgtccctaccaacctctctatagcgaatcccctggattaaatctctctctgtttgaaatagtgtgtttggtttcctgattggacgctgactgacatgcctcctaacagacattttcagggcactgatctcttagtttctcatggaatgaaggcatttgttctatcataaccacatttcacatttcctgtgtcatcttattatattttaattacttctgaaaccaggctctggatctgtcttagtatgagagccatttttaatagatccttttttttttttttttttttttttttttttttttttttttgagacaaaatctggctctgtcgcccaggctgtagtgcagtggtgcgatctcggctcactgcaacttccgcctcccaggttcaagcgattctcgtgcctcagcctctggagtagctgggattacaggcacccaccaccacgcccggctaatttttgtatttttagtagagacggggtttcgctatgttggccaggctggtctgaagctcctgacctccagtgatccgtcagcctcgggctgggattacaggcgtgagccaccgcagctggccaagatatttttgaaagaatcatgtagttgacctaaaagtgtttgggtacaaaaaaaaaaaaaagtatgaatgttttgggttttttgtttggtttttaacagaaaatttttttattgtattcatcagtggtgtactatattctgcaaaagcagctggtgatatttttataaagacccaagcaattctccttccagacattttattgagaaagtaaaaatcaagtcagattgagaaaggaaaaatcttccctgctatgaatcaggctagcctaacacagacaaaggctgctgcaaagttaactggaaacaatgtttgtcccagggtcatgctacatctgtaaaatgtcaccaacccagttttgagtgatttctgctttctgcctcagtgagaaaccttgttctgaagtcttacgcactcagaaacttagctgcttaaaatcaaatcagtaaaaatgaaatgatccacttttgcctggaggatccaagtctttcaacatagagaagcagcctcaatctcccactcagatgcaggctgcagacaagggcttctaaacacaacacagcaaagctatcttaacttcctaatttccaagaaacagagaactttgcagtttaggcccaatgctgaaccctaacccacagcctgtttgcctggactccatcaaaacattgcttcatttaaattttacctaagggcctcccttcccccaaatcaaagaaccttgtctcttctttctttggtgaaatgcccagtagttccactgacatgcagtctccctcatttccaagagccaataagcctgatttcattggacttctgtcctgtccatcagatctgtcctgatggcctttggctaggacagcatccacagacctaaatgctcgcacttcataaccagggcaccccacacaccttcctagccaccaggaaagccaagtgattattcagagttgttcgatgagcatgcaaacagaaggtactattcacctaaattcagaaacaggcaagtaagttcatctttattttccaacagacaatgcagacaagttgctctcataatccagacgtagtgcctctctcctgctaggagacagggatggggaaatgcttaatatcactgatgaagctgtatttcaagacattgtactataagccataagatactctatctccaacaatgtattatatattgatttaattataactactcattaagtcccgggatgtcctgccatggcaaccaacaatttccaaatactctgcttaagtaatctagattatatctaactgttttcattatctattgctgtgtaacaaattacccccaaaaatgtaacagcttaaaacaacaaacatgtattacatcatatagtttctaaggccagcaatgcatattatgcacattgctagaatttctagggagttcaaatccaggtaaaaataaatatgatactgtaatgcctaaccttgtttttttacgaaccctattttcaaatttccctttttgtctccttaattacctagccttgtttctcatatgagtaagactctcccttagctgggaaagccggacaaactacatttggccccttgatttacaagacattaagggctacttacccaacccccttcctcaaggagttaacctgtgtaagcagatcctcagcatttcaaaggagcccaattaactgataaggtactggaacgaacaacatgtatgaagttcccaggattttgctcaaaagataacaacataaagccttgagtctgtgtccggcatagcatccatatctaactctaataaaggatttagagccccgcaactgttccgttgctttttttgtaaccatttgtcttttaaattgtttatctctctgtaaccatttgttttttgattcttgcatgtttttacttctgtagaattattgcatttgagctcccctcccctacctaaaccaaggtataaaagttaatcaagccccttcctcagggctgagggaattttgagtgttagccgtctctttggccaccggcttaaataaaggactcttaattcatctcaaagtgtggcgttttctctaacttgcttgggtataacaatactattccttatttaatgaagatattatctacttcagtaagttcatatgaatgcaaacttgtggaagattttgttgttgtgtgttttagtgtaacagcatattcacattcctcaggttagtaatacaaataggatttatgttaggctccaatgaaacaggagaattccctgattcccctcataggacatgtgacaggggtgtcgcctgcttggttgccctgcagctcaaaaccctaaaggcagcatgcagataggcaggtgcagaggcccacccaagcccttttgggctctggccccacagcagcatctaaggatgggtgtcttcaactcctaacgcccaagtgggcgtgtgttaccaagctcttttagatttgccgtctgcagatggcttgtgtgttcatcagctcaacggaccccctgccttatcgcaagggggatatccacttccatgatccgatcacctcccgctaggcccctcctccagcactaaagatcagaattcaacatgagatttgggtggggacacacagccaaaccatatcaggggtcttgttattttgcccaggctggtctcaaactcctgggctcaagcaatcttcctgcctcagcctcccacatagctgggattacaggtgtgcaccaccactccaggctcttattttcataacatttattatagtcagcttctctatacagtatttaggttgctagttggaactaatataatctagtgtttagcatgcacattgatatcttagttcaaagaattgctcttttctgattccaaaagctaactatctgggtagttacaggatctgagtactaattttatgactcacaggaatggcaggaagaaatgaaaaaaatgcctagtgaacgggcttgccaggggaaggggaaaactaaaccagaaatatcgactctgagatatagcccaagaaaatgattagatttcaaagacagagattaaatcccaaagccccccaggcaaaaatattagataacttagaaaagcaagagaattagtctggaatcaaacatttcaaagccaaaatacaaacaaagcaacaatgggcattatttaaaaaaaaaaatgaaagaaagtatgatccaaggattttatacccaaactgtcctttaaatatcaaggctaaagaagcatagttttcactagataataactgagagaaatctgtacctatctacctttcttgaagaatctactagagaatcactgtttttcgcttgtttgtttgttgttttctgttttgagacagagtctcgctcttgtcacccaggctggagtacaatggcacaatctcagctcactgcaacctccacctcctggggttcaagcgattctcctgcctcagcctcctgacaagctgggattacaggcgtgcgctaccatgaccagctgattttttgtatttttagtagagacagagtttcaccatgttggccaggctggtctcgaactcctgacctcaggtgatccacctgcctcggcctcccaaagtgctcggattacaggcatgagccatcgcacctggccaagaatcactgttatctaaccaaatgatgactgggaaaactttagcaatcagactgatggtgagcatttaagaacatagaagtatacatctaagattaaaacaaaaatgagacaaatgtggaagactaatgtacaaatgttatatgttatgacaaagttgaaataagacaagtaacatatgggagaaaggagtgagagtgaggaaaatagaattagctcattgagtccaggcgtggtggctcatgcctgtaatcccagcactttgggaggccaaggtgagcggatcacttcaggtcaggagttcgagaccagcctggccagcatggtgaaacccatctctactaaaattacaaaaaattagctgggcatagtggtgcatgcctgtaatcccagctactggggaggctgaggcaaaagaatcgcttgaacccaggaggcggaggttgcagtgagccgagattgcaccactgcactccagcctgggcaacagagcaagactccatctcaaaaaaaaaaaaaaggaaaaaaaagatactgattttaaaaaataaaccagatagtaaaaattaagcaagaaaacaggggagcaagtgaattttaaaatgtacaagggggccaggtgtggtggctcatgcctgtaatcccagaactttgggaggctaaggcaggaagatcacttgagcccagaggttcaagaccaacctgggcaacatagtgagacctcatctctacaaaaaaattaaaaagttagccaggcatggtggcgtgtgcctgtggtcccagctacttgggaggctgtgctgagagacctcagctttagctcattgagaacagtttcagaattctgacctccaaaactgtaggacaataaatctgtgtcatttttagccattgattttgtggtcatttgttacagaagcagtaggaaatgagtgcagtactttttttttttttagacggagtctcgccctgtagcccaggctggagggcagtggcacgatctcggctcactgcaacctctgtctcccaggttcaagagatcctcccacctcagcctcccgagtagctggaattacaggcgtgtgccaccatgcccggctaatttttgtattcttagtagagacaaggttttgccatgttggtcaggctggtctcaaactcctgacctaagatgatccacctgccttgacctcccaaagtgctgggattacaggcataagccaccatgcccagccaagtgcagtagatattgatgacaaattcgttctcatgaaaaatgaataaaagctggaggataggatccagttaacaacaaaactcagttcacatgaataaattagaccttgctcaattcaattgaataagatgccctgtaagattttttttttaaataataatgctaattgacttttattattattatttttttcttcggagacagggtctcactttgtcacccaggctggagtgcagcagcctaatcacacctcactgcagccttgacttcccctagcttaagtgatcctcccacctcagcgtccccagtagctgggagtacaggtgtgtgccgccacactcagctaatttctgcacttttttaatagaaatagtttttgtttgtttgtttgtttgtttgtttgtttgttttttgggacagagtctcctgctgttgccaggctggagtgcagtggtgcagtctcggctcactgcaacctctgtctcccaggttcaagctattctcctgccccagcctcccaagtagctaggactacaggcgcgtgccaccacgcccagctaatttttgtggttttaacagagacgaggtttcaccatgttggccaggatggtctcgatctattgacctcgtgatccgcctgcctcggcctcccaaagtgcagggattacaggcatgagcccccgtgcccagccgagataggttttcaccatgttgcccaggctggtctcaaattcctggactcaagcagtctgtctactttgacctcccaaactgctaggattacaagctgacttttattctttatgccagaggcctaaatagtaaaaatggggagaaatgagagaaagtctgatgtagccaggatccccacatacaataaaaagagctcttcttgctataaattggcatcactactataaaaatgtgatttttttgataaaacaaaacaggactatctgttttgaaattcacaacctagattaaagataaaatacaaagtaaaaaggatatattcttccaatacatgagaatttaaatttccaaacaaacttataatgatggttctcataatttgacattaggaaatcattaacaacatatgaggaagagcaatgctaattctggtagacatttgttttcttctaaatagctttattttgtaaaaagaacaatcagctatatataaaggcgagaattgtgaaaaataaaaatataatttattatttcattgtaactttttttttttttttttttttgagacagagtctcgctctgtcgcccaggctagagtgcaagggcatgatctcggttcaccacaacttctgcctcccgggatcaagcgattcttgtgcctcggcctccggagtagctgggattacaggtgtgcaccaacacgcctggctaatttctgtattttcagtagtgttggggttttaccatgttgcccaggctggtcttgaactcctaacctcaggtgatccacctgcctcagcctcccaaagtgctaggattacaggtatgagccaccaaacccggcccattgtaactattttaagaaatctttgcagagtttagttcttttccaaagtccctttataatgatttcatgcaagtttaaaataggcaacttttctgagtgctcataaaaaagtgtcctgagacttttgtgcatttttcatagttgatccttttgaagtagttaggttaagtaaccagtgcagtaagtaaccagcacacatttgtaatcccagcactttgggaggctgaggagggcggatcacctgaggttgggagttcaagaccagcctggccaacatggtgaaactccatctctactacaaatacaaaaaattaggcgcagcacgcacctgtagtcccagctactcgggaggctgaggcatgagaattgcttgaacctgggaggcagaggttgcaggccgagatcataccactgcactccagtttgggcaacagagcaagactctgtttcaggaaaaaaaaaaaaaaaaaagtaaccagtgcaagtgcgtccttcacatctcgtttcatctattatgtgattaaaaatcataaactttactgaaaataaaaactgccatgatctaaaagctatcaaatggttctgggtataaagataagctgacgcaggcagtaagaaatcttttaagcattcttcaatctggtgaaattacagctaaataagtttttcaatgtgaaaaagacacttaaataatttttactcaagtaaaattcacatgaaagaaaattacccattttgaagtgtacaattcagtagcatttggtactttcacaatattgtgcagccaaaaatggtctttttaaaacacctttattttcacagaccattaagcacagagttatccaccaaatattagtacatgattgctataaagacttcaattgtttcagctacaagaggccaaatatcaaacagctatcttacagtgacaattctttgtcttttctgatgctgacaaagactttcaactcttttcagtagaaaaagtcaacagaaatcaaaggtgcggttaacgttgctgctgagaaaaaactgatgctctctttacacatttgaaaaagtcaggaaagttcaatgacctacagggtgggtaatgttacacaggctttctgagagagaacactcagaatttccagagtaaatttgataggttttaagtgactttagcagtaatgattacatgctggcatttgtattttttagtactgggtagcttagtcttctatagttccttggttaattagcagcttcaaatattagactcaaatagctggaaaagctggctgggcccgatggcatgtgcctgtaatcccaacactttggggggccgaggtgggaggatcacctgaggtcaggagtttgagactagcctggacaacgtagtaaaaccccatctctactaaaaatgcaaaaattagccaggtgtggtggcaggtgcctgtaatcccatctacttgggaggctgaggcaggagaattgcttgaacctgcaaggcagaggttgcagtgagccaagattgcatcattgcactccagcttgggtgaaaaaaaacaaaactctgtttcaaaaaaaaagccagttaaatggttcatttgaagataaacattcttaaacacttattagatttcacctatttaaaaagtgcaatttctcccttcctacctttggagctcccactagtacctcctattggtagaatctaacagtaagtctgctggcaagagagcctgggacacccagatcccacacccaagagaatttgcaaactcccagccttaacaccgcagagccaagtagaaaagatccactgtggctgtaggagacaattggccaataacgggcacagcccactgctttgactactcagcacctgcacccttcaaggtacagacagctaaaagacctaacaagccaaacgctctgccttacaagatgcagttatactttgcagaaataaagatactctcactttccccctgaaaaggggaaaccagacgtcccatcagccactgtatcctactctaggtaatattagttcctgcctcggtattctgtaaactgaagaccaaattgtaaagttagccaccacccacactggtatcaggggagaccatctctttggccacttctccatccaggaagctgggtctaagatttccttgtaggccgggcgccgtggctcacacctgtaatcccagcattttgggaggccgaggccggcagatcacgaggtcaggagattgaaaccatcctggctaacacagtgaaaccccgtctctactaagaatacaaaaaaaattagccaggcacggtggcgggcacctgtagtcccagctactcgggaggctgaggcaggagaatggcgtgaacccgagaggcgaagcttgcagtgagccgagatcgcgccactgcactccagcctgggcgacagagcgagactccgtctcaaaaaaaaaaaaaaatttgcttgttggctttcagggatgttctgcagctgtgcccattttgtaaactaagcccaagttttgtttgggtttttcctcaatgaactgatcatagaaaactccccataagaatggaaaactccccatgagaactaggttatgtgggccctaacacatcatctcacaacccttagaggcttcctgatctaaatcctggtgaaataaacgacatctatttttcatctaagtgcttgcaccattgggctcttacatagttactgtaatgaagcaggttcagaaatcatacctttacatcagctgggaaaagggggactaattcaggaatttccttaaaacacccagagcctacctgagaagtaatgagaacccaaatgagcatctacagaaggagcaggattaaaaaaaaagaaaaataaataaaaacaaataagcatcaagaaaaccaaaacaccaccgaattagacttggagaaaattagaccttctttcccatccctatccattcattcattgcttctttttttatcttattttttaaacatgtttattcatgtgttctgacatttatcaagcatctactttatgccaaatgcacagtagatgcagttgtgagccaaacgaatcccatgccctcaaggagcctctgttgcagcagaatgtgctgcatttagcagacctgccactcactagccatgtggttactcaggactttctgtgcctcagttttctcacccgtaaaatgggtcaacatggtgcctcaggttgttatgaggattaaatgagttcatgcatataaagtgcttagaatagggcctgccacatcttaagcacagaggaaatgtgagtttgtcttacattctattttctatccacaatttctcacagaaagagaaaatttgaggagggaatgagtagctattaggaggcagggaagccaacatcttcatgctagagacatggacaaggaagcccaggtaccacagagtataaatggtgggatgcagatcatctaaggccagggtaagctttctgaggagtggtttgggagatcctagcatggcactgctgagtctggcagattgactatatgtgctaacccgacactccctacctatgtaattctgggcaagctttatttacccctggggaggagaaggaggacgatcttgcgagctgaaattcctggcttctgaagggcagaagcagagcaactagctttacacaggagcacagggagtggcgcttcagggttctggcccctgcatgattcttcaacaatttccagttttgtgctgctctagttcaggttctgagagagggccctgctttgcactacactgagttacttacccaaactttgaccaaaagaaaaggaagcacttgagtgctatccatcaaaactagtcctgtgtggaagactatttccacaaagcaaaatagtcatgctcgtaccagaagaaaaggaaataggcctggccaggaacgcctagcagacacccagcacgctgagctcacccgcctggtcctgccggcgggggtggggagacttgcaaatgggctgaacaaaggctgcattctcccactgatctcagagcaggttcagagagcagggctccaaggctggtggggcagcccagccctcctcagcttggtcagtctctgcttccaggccaactactctaggaatatctatttctcagtcagagggaagggaaattgggtgtgcagacgtatttgcttgtttgctaatgatgttttgctgatttccaaatgcataagcctatacagtggctacagcaatgctacggaaactctcacctgccatcagcctctctcggcctctgggctctgatgcaaaggttctacgtccgtccaagtcctccaagaagcagactccaagatggaatgaatagggcaaggattttattatgcctgtgagagataacagagaggaagctgggaaaggttgagagaaacattagaccccatgcaagtctgacttgagtgaaggagaaagggaagaaagactagctggaggtgtcctagacccttatgtgaactaaagaagtttccacaagaccaaaggaaagccctcaagacaaagttggccatcagaagaagtccccatcttccaagaactgccttaaaatgcctggttaaagtgcccagtctttgacttagagcagccagcagccctggtcatttatgcccctgtagtttgaggtctataagatgcattctatgagcacagcaagttcaaagtcacttaaccttaagggtgtattctgcccagaaatatgaaattctgagaatttaggtctgcagactacaaatattcatacaacatataaatgataattgatttcattttatgccttccttatggggtctctgctgttttttgttttttgtttgtttttgttttgagagaagcacctatcttttgctaaaatacaagatatttatgaataggagctctaggttctatatttcttgacttcagcctcagcaatgtagaaaggtagtttctggaagaagtataattacagaaaattgcctctgatcctgatgctgatgcccagctatgcagctttagaacttgttttattaactcgcccatgagttactatgcctcccatgaactgagttcacacgactggtttatacaccatcatcacaatttattaatgttaaaagcagataaaatctttgtagcacaccacgattgtggccttaatgttacacctgttagattttcaggcagccagattatagctcaagattgcaagataagcatggcgacatacgaaagagggtggagggcttttatgcatctcctctgtggcctaggccaggcagggtgagcttctgcaggcaaaaggagagggatgcaaggttctggggccttctgtctggcaggtgctcacagggtactgactcagccttagtaataacactgcctctctccttctaatatctccttctgcagttaacgagaactttgatcttgctgcacaattcatttatttattcaataaatatgtgttaagtatgagtgtggttaattgtcttgggtattgggaacacagtgatgaataaggtatgagcctcctttttatttgcagcaataatgtgaaatatccagatggctgactagattgtatctcagggagaccccaccatctgcttcctctgattcatgggggtaatggcaccagtggtttttactgcacattctggaatttagactcagtggagttctcagaggtcttcagaaatctgtttacccatttctggtggactccttgtctcattcctagcagctgttttgctccttcccttattctgtaatcccaacacttgcccca

SEQ ID NO: 5636 - DNA, 419963 bp, Homo sapiens
  PDE1A gene - 182832848 - 183212810 of chr2; NCBI Entrez Gene ID: 5136; Build 35; sequence includes 20,000 bases upstream of initiation codon and 20,000 bases downstream of termination codon of the gene
atttaaaaactggaaatacaaataaaataattcaagacattcaacacttggaatatattagatactatatgtaatttaatatattcattaaatttacacaaatgtttaattcatacagaatgcaagatattttcatacatcttcagtgatgtttttacctaaatttatttggaacatctactggttagcagttcagaaaatctgggccttgtctctaatgttaaaagtaatttggccttaaagaacatacatagagatagctgtcaaataaaagatcaaatacatctttttgtgaaattgagcgtagtttagaaaattcgcagaatatataacattttgaaatatttaaggttagatttttaacttaaagtatatattttctctgaaatcgcataggtatagatgtataaaataataactaatttgaaaaggcaatgcttgattttaaaataatctaataaaagcaatgtattttataatcacataaaatttttaaaataggttaattgagatattttcagcaaatgtttctaaattcctgacattaaattcccaggttgattttaattttcatgctttggatttggaattgataggtttattagttggaaaaggaatcttaatattcgggcctctccttaagccagtctttcctgctcaagtcacacataaagcttcatttacaatagttaatttggaatttttaaacttaatatttccttttctaacatgtaaaggtaattaagtcacaagcagatttgcctgcaaacatgcatggctaacaacacattttcaaattttctacgttcagagcattaatactctattatcagttaaattaaatatgaacaaatatagacctaatggtcagtctgtaatgggttttaaaatagttacatgtgtaataggtttttataaaccttattagagattgagcctcacaagaaaactctaaggttagtagggcagcttttctcacagcccttcaatagcataatatattgcatttattgaatgtttccttccaccaagacccatggtcaccatgttacatgtatttcctctctgaaacctcatgacaacctagtgaaggaagttctgtggttagtcctttatgtcagaggaaactagaaatattaagcagtttctgccaggttactgagttggaaagtggtaagactgggaatagatctaagcttatcttaatctctgttggctttttatttatagatgaagaaactggaatatagagagcttaagtgtttagatcattagcaaggagtagggccagaacctgaacccagttcctgtgaatccaaatccagcactgattctactgcatcaccatggtgtgccaaaattattgtaagggtctttataaatataactttttcatttaaatcatgtgaggttagtagtgactttcagtatgtttagattagatattgttgtatatgttttgaactctatcctcttacatataaatatatcttgtttctttgatttctgattttgtagccaatcagccatcgttcctttctcggatctttccctccttccaagataattgctgcaattatattgggggttttagctaatggtaatagggaaagcagttgagttttcttgcatggaataagcataaatatacaattaggtaatgaatatttagtattttatggagcctttcagttgggggaggtcctatgcatgtatattaacatacggtaatacaagtacatagtcatgtatttgtgtcaatgtgaattaagagcaatataaataaatatgtatttatgttcattatatttattaaaactacataagtgaattgaaaattttataccagttttcgacaaactgtgtacatatgaagaaaggtaaaactgtgtaagtcaagatcatatataattttgaatgtaaaaaatatggctttacttaaatcaagaaataactaacttaaaaatttttaaatatagagaatttggttaactcagacactatttgttttaagaagtagttattctacatcagtgtggccaatttaataatttggcaagattttaaagtgggagaggttagtcccttgcaaaatagcttcccttttctgtatcccttgtctccttcatgcactaaagtgctcatgacctcttctgacttcctgctgctgctgctgctgctgctgctgctgctttttttttttttttttttctttgagacagggtgtctctctgttgcccaggctggagtgcagtggtatgtctcagctcattgcaccctctgcctcctgggctcaagcaattctcctgcctcaggctcccgagtagctgggattacaggggcccaccaccatgcccagctaatttttgtatttttagtagagacggtgtttcaccatgttggccaggctgggttcgaactcctgacctcaaatgatccgcctgcctcggcctcccaaagtgctgaattacacgtgtgagccactgcacccagccacttcctacttctttcaataaatgatttgatgtcagtaatttatgcctttgtggaactttaggtcaatgtcttatttctccaagagttatttgcattttgatatttctaagtaatgctacaataaaaagctttcttctaaatataattttagtcattatcaagcaagtgggagacatatttgaagggaaagaaatgacttcctgagcatagctgaatgaactttactccatatctgcataaaactgacaatgaagtcaacaaatcatttgataggtgtttttacaagtgtttattaacaatgcatttcattgtcattcaatgcccattgcactgaaactacagttaggctattcatactaaactataagatatccttggcactaaataatctataacatgtacagtagtggagtaacacaacgtttttttcctggcaaaatgaagactttcagtatgggatgtgatgtatataacaaaataaaattatagctttttctagctaacaaacaatgaaccaaatattcccatagatagctttaagttaggatagaaactattggtttttattcaattgctttgaaagctagtggagttatgctcacgaatgttcctttttggggttgatattcagaactttggtttataaatcctgggctgtctctgaaagctcactgtttgttctagggactcaaaataaaactaataatgcaagcccaccacttgacctagcagctagtgggaggacagggaaaatcttgaaagctcccaaggatttgtgatggctcgagagcctcttttgtttataatcttttatgatatgaatttcacagaatttaagtttgattcagataacttggaaatttactatgagtaaaataaaccatgtttgtgaaaccctatctctatgaaaccctacctgactctaagtcaggaaggaattttgtatgttgaaggaatggaaaaaaggccagtgtggctggaccaaatcagtgggaaagagagtgtggggaaaaagtcatacagaaaggtactattgacacataaatcagagctcaaaaccttcaagatcttgcaaatgagatcctttaaagatagtgtggatgtgctggcaatttctaacacaatagattgattttgacataatcttaggtatggacctgaggtagcaaagggcagagacatgaatgttgggtcaggccgtaactcattactactgtaggcttaattcatataatgttgatgtttgtttttactgaatgagtactttttaccacttaaaatcaaaatgagttttacaaaatctgacaccatatgtatttgattcacccaattttaacaaatgtcatggaatatagtagaggagtactaggcctaaaatatttccaaagatatttagatttaaaaatctctatgaatatttattgaagtttttctcttgtttagaatctattcataagatatttacataattttataattaaaagtgaaatgtgtatagtcaaacaaatgaagatattttccttatatggcatgaggctaataagaatatagagtccagcaaaaaaaagcaaaaaaaattggagaaaaaataaacaataaaattctctaaattaatggtgcatgccaatatcttttcataccttgtatttcttccttctcataatatctacagaagatattgttgttcatgcatttatctagcaaatactggtagagcacttactttatttcaaacactgttctatatttctgtacatgtatcaaaaagcaagagaggcacagtctctcttgccatgggagtttatatttgagaaggagcaacacaccataaacaagtaaaaacagggaaatgtgattggaagtgtcacctgatgtggcctgatattttaggctggataaacagaccaaggaatgtttggttcagcatccatttgaggatatgaggaggcaggtgctggcagagggaaaagtagtctcaaagacctaactccggaaagagttttgtatgttgaaggcatagaaaaaaggccagtgtggctggaccaaatcagtgggaaagagagtgcaggggaagaagtcatacagaagggtgcttttgacacataaatcggagctcaaaaccttcaagagcttcagtcttgaagagcttcaatctcttgttcaaaatccttcaagagcttcccattacacctagaacaaaattccaggacttttcaggggcctccaaggctctgtatgacatgacttctcccatccactcacccacttttcttctgattacttcctaccagcaacacaccttgctgattgtctaatatgccaagtatctccagcctcaggaagtttttatttgctgctccctctgcttgaaattttctttccatggatatatacaggccttcttaatttttcttgttcattttcatttctttttattatactttaagttctggaatacacgtgcataacgtgcaagtttgttacataggtatacccgtgccatggtggtttgctgcacccatcaacctgtcatctacattaggtatttctcctaatgctatccctccccttgcccccaatcccccgacaggtcccagtgtgtgatgttctcctccctgtgtccatatgttctcattgttcaactcccagttatgagtgagaacatgcggtgtttggttttctgctcctatgtttgttttctgtgaataatggtttccagcttcatccatgtccctgcaaaggacatgaactcattcttttttatgactacataatattccatggtgtatatgtgccacattttctttctctgctcaaattttaaaaccttagagaagcctacattcaatatcaatgtaaaatctaacctcctcctatccctcaatattcctttactctgcttcttccagttggtatggctatgtaagcagttacaccaaagcttagttgcttaaaacagcaataactattatttctcacagtttctgtgaggtcaggaatttgaaaatggttcaactaagtggttctggctctgggtgttttatgatattgcattcatgcagcggctatggctgggatcatctcttagccttcacttacatgtttggcacctggtctgggaagactaaagaagctggggactagaacacgtgggtctccttagtcatttttctctgtagggactctccagcatggtggctttagggtaatcagaattcttccgtggtggctcaaggctccaaaggcaaatgtcctgagggagagagttagccatgtagaagccataccaccatttatgatctagtcttggaaagtcagtgagtatcacttctgctgcattctcttagttgagggaattacaaaagttaacccagcttcaagggaggaggggaatgtgacattttaagaacatgtgtaatggtatatataaatatattatccatgtttggaaaatacaatcttccacattcctttttctttctccagtgcagactttgctctatttattttctgttttcatcactagaatataagccctataaaggcaaagcttttatagtcttctttactgctgatcaatcaggttttgctacataggtcaatgattggcatatggtaggcactcaacaatttctgctattgaatgaataaatatttcctgaattaatgatctgtgaaacaatagaagtattatgaaaactagtgttttagagatgaaagaaagttttataatattccataaactgttccagaaacacaataagaggatagaatatactaaaattttcctaaatgtgaattggtttttatgacatgtacctaagtagaaaaaagaaagtacatgcttcctgtataacattttggaaaactgtagctttttaacatcacacttcctgagttctcagttgatacaaatcacagaagttgagaagtgtgagtttagattgtaatctgctcatgtgcacagattataacattgtaaatactgtgtcagtcacagccatacaaatgccataatgtagctcatgctatatcagtgaagatgagctgtgtggtacagtgaccctactcgctatttcggactgttcactttagcatgttcagtgtgcctaaatttatgcttcttttaaggcagactgtttataataagaaaggaaaaagtattccttggatcttcaatgaaagtggcaattttctaaagccaagaaatgttcatttaaaacccattttccgtaatgcacagtgtagtgttctgtgacacaaacatggggatatgcattaacgttgccctcttaataatagccctcaaggacatgacaatcagaggaacagagaaatgggtgatttttcattccaactgaaaacaatctaaatattcacagttagtagaatggttgagaaattaattatatacccccgtcaaatgtacatacatttaaaaagacttcccaaaagagaaagcaaaagatcatttttcacagctgacagcaggattacctaactaaaactccaagatagttaactaaaaattaaattcaataagttaattggatagaaaataatataaaaataccactagttttcttataaacagcaatgattagaaggcagaatggaaaaatacgaaagcataatagccatacaatataaaatacttaggactgatgacaagatataaaggaataagtaaaagacaaagtatttaagagtacaggctttggaattagacatgagttttaaatcctgactctgtcttgtactagacaggaggttaatctccttgagttcactattcctcatctataaaatgaatgtaatattaatgtgagattaacagataatgtatgcctggaaaaagcacttcaaaatagtatctattaaatgtaatttaaaatgcatcaaaaccttattactaaaactgtaggacttacataaaaatagactgatggggcaatgaaatagtagaggtgcttcagggacaaatacagtacttatatataaaaaaatacttttgataagggccacaattcaaaccaatgaaggcagcagaaaaattttagtaaatggttctggaccatcatttaatctttggaaaaaaatagctagatgtgtgttttttatttaaacacaggtaaatttcatgtaaactagagcattaagtaaacaaaataaagctgcatgtaaattagaataaaatttgggtcaatacgtgttggatattgactttaggaaaaacctctaaagcaaaagagcaacagcagaaacaaagagacgaattcaacaaatttaactacataaaaagttaggtgtaacataaaaaattcaataaaaattgaattacaaatgatgagaaaaaaggtatttgcatcatacatgataggccaaaaattaatataagtaattaatataaaataatctttacaaattaataataaatattgtgatccctagaaaagaaaaaaagattaaaaattgcagcaggtattttttttaaagtggtacaaaaattcaaaaaatacattaattctcattagtaataaatttaaagaccttttggcttatcaaactggtaagtaatttgaaagaaaaaatttaatatccattattagttagcatcctctgaaacgtgaatgttcagacattgcagattaggaaataaattggagtaaatattaaagatcttacattagatttataacccttgacccaatatgttttctatgcaaatttgttttaagaaatagagatgtgtaaaagcactgagatgcaaaactattcattagagaattctttataacaaaggaaaattggaaaaaaaaacagggattggctaaatcatgatacaaccaaatgatggtatactatgcagccattagatgtacaattttgaagagaagttaagggaatgggaaactgtgcataatacaattttaaaaggataaaggagtatatacttttatatgcctctacatcataatctaatttgtagttgttatttcctctcaggggttatgagtgactttcatttttttactttgcattttttgatactggttcaaattctctacaataatatgtattttatatttagaaaaaaatataaaatgttgccattgatatcatattaaatgagttaaaccatgaaatacacatgcagatggcctcaattatataaataaagatatctagaaaagtgcacagaaagaaagagttttacctcttcaattattttcatttttatttaatctggtgatccaatccatatccatggagctcaaattttgataccttgatctatcaacattaaactttatatgatgtctctataccctgaaagaccagaaatttgtggtcctctcctcctaatttttaagttgaattattttttgatattccattgtaattattctaatcaattatacttacacttttatatctattgataatgattctaatctattaaacttctttatctggatttttcaacttcaagtctctatatcttgatttttcaactttaaacagtatcatttaattttccataatatgagctgagaatgtcagtaatcataaacttccctccacttctcatcctcatttttctcccattatctggcagctattccatcacttttactaagattcagaagattatcaaatgggaattgataatattgtgattatgtaaaagttattgatatatcaatagaacatactgcatatttgaaatccattggaaaaaatgtaattctttcttctttgcttttttctgagacagggtctcgctctgtcacccaggctggagtgcagtggtgtgatcttggctcactgcgctctccaccccacgggttcaggtgatcctcccacctcagcctgccaaatagctggaattacaggcatgcgccactacacccagctaatttttgtattttagtagagatgcgcttttgccatgttggccaggcttgtctccaactcttgacctcaaatgatccaccggctttggcctcccaaagtgctgggtttacaggactgagccgcgcctggcctcttctttgctttttaacaactttattgaggtataatttacataatacaaaattcattgttttttttttttttttttttttttttttgagacggagtctcgctgtgtcccccaggctggagtgcagtggcgtgatcttgactcattccaagctccgcctcccggggttcacgccattctgcctcagcctcccgagtagctgggactacaggcgcccaccaccgcgcccgtataattttttgtatttttggtagagacggggtctcaccgtcctgtcgatctcctgacctcgtgtcgatccgcccgcctcggcctcccaaagtgctgggattacaggcgtgagccactgtgcctggcaaattcattgatttttaagtatataattcaaaggtttttagtaaacataccaggtgatgcaattatcatcacaattgagttttagaacagtttcacattttcattaccccagtaagatccttatgtccatttacagttaatcccctttcctaaccccagcccctggaaaccactaatctacttcatgactctctagatttgccttttctgcatttcatataatcggaatcatacaatatgtgatctcttgtgtctggctttttataattttaaaaaagttttttaaaaaatttaaacattcctaaattgacacaatgtacatatttattggatacatagtgatgttgtgatgcatagagtgtgtactctacatcagggtaattagcatatccattatgtcaaacattgatcctttctttgtattgggtatatttaatatccttcttctagctctttgaaactatgcaatacattattgttgattatagtcatcctacagcgttatagaacactagaatttatttcttccaagtatacatttgtatcctttaaaaaaattttttttaccaaaatggtgttaagatttatacatgttgtagtacacatcagtattcaatacctttttactgcagccacaaaaaagaatgagttcatgtcctttgcagggacatggatgaagctggaaaccattatttttagcaaactgtcacaagaacagaaaaccaaatacaacatgttctcactcataggtgggagttgaacaatgcaacacatggacacagggcggggaacattacacaccggggcctgtaggtgggtgggagcctgggggagggatagtattaggagatatacctaatgtaaatgatgagttgatgggtgcagcaaaccaatatggcacatgtttacctatgtaacaaacctgcacattgtgcacatgtactctagagcttaaagtatattaaaaaacccacaaatattagattatatgactataatgtgaacttgtttgcttctccttatagaagaaaatacgtgaacaatacatgaaaatcttgtagaatacatgaaatctcttctatgtattatttttgctttatgtgtttggaaactcgatttttatgtgcataaacatttgggatttttatatcttcttaatgaacttaaactctttatctttaggctatgccctttttatttcttttaataatttttgctttaaaatctacattttctgatattcctatcatgactccagtgttcatttggttagtattattatggtattttttttttttactacctttttacttttaatccatttgagcttttacatttgaagtgcttttcttatagaccagcatttagatcatttacatttaatgtaattattgacatgttaggatttaagtcttgattttttgctttcttgttttttcttctgttttttgtttctgttttctttcttttgtcttcctatcggttacttgagcactttttttttagaattttattttgattcatctatatctgtatttttaagtgtatttgtttaaatagctatttttgatagttccttttgatatcactatctatgcatagcttataaaaatctactgatatgtcattattttatcagtttgagagaagtatagaactctcacctcatttatgtccctttactctctcccatttataataattttatatattccactgtatacacttagaaccatatcagatgatataattattgcttcaacttttaaacaatttataaaactcaagaggatgaagaaaggctatgatatttacctgcatttttgcttactgtgctttttgttttttcctgatgtttcaagtttcattttattattttctttctgtttggacaatttcctttagctattgttttaaagaaggtattttggtgacacattcttttagtttttctttatctgttattgtcttagttttaccttcatttctgaagaatattttcactgaatatggatttcaaatttgacagatcttttcttgtagtacttgaaaaaagctgtgccacatctttctgccctctatggtttctgatgacaaatccattgtcactgtaaatgttttttctctataggtaagaatttttctctcactgctttcaagattttttcctcatctttagttttcagaatcttcactacaatatgtcttgatgtggatttctttgggtttaccctatttgagatccattcatcctgagtctctaggtgtatgtctcttgccaaatttggaaggcttttatttattatttctttgagttttcccacccccctgcttttcatctggcatcttttcatctggcatcccattaccttcactgtggtttaaaatttctctcaaagttgctaatctggggcaactatacagtttattctgtttgtttctcataaggatactgtctcttgttgcctgatggctaatggcttgaaaacaatatattttgtctgctttctggctaatttagatggtcctcattactcaatcttgtttagaagcagaagcctgaatttctttttagtaagagtttgcaatgtgttttgcttcctgaatttgaattttcttgttttccactgattctggaatcgtcttaattgcttccttttcatatttttctgcttctgtattcaatctattttacacttctgaaaatccaaagagattgtgttagttcattttcatgctgctgataaagacataccgaggctgggtaatttatgaaggaaaagaggtttaatggactcacagttccacatggttagggaggcctcacaatcatggtggaaatcaagtcacatcttatatggtggcagacaagagagaatgagagccaagtgaaaggcttataaaaccatcagatctcttgagacttattcactaccatgaagacagtatggggaaatcagctcccatgattcaattatctcccagtggtcctccccacaacatgtgggaattatgggagctacaattcaaaatgagatttgggtggagacacacatatcattccgctcctggccccctcccaaacctcgtggtctcacttttcaaaatcaatcatgccttctcaacagtcccccaaagtattaactcatttcagcattaactcaaaagtccacagtccaaagtctcatctgagacaaggcaagtcccttctgcctatgagtctgtaaaataaaaggcaagctagttactttctagatatgatgggggtatgggcattgggtaaatataactgttccaaatgggagaaattggccaaaacaaaagggctacaggccctatcaagttcgaaatccagtgggacagtcaaatcttaaagctccaaaatgatctcctttgactccatgtctcacatacaggtcatattgatgcaaaaggtaggttcccatggtctttggcagctctgcccctgtggctctgcaggttatagcctccctcccagctgctttcatgcactggcattgagagtctgtggtacctatccacgtgcacggtgcaagctgtttgtagatctgctattctggggtctggaggacggtggccctcttctcacagctccactaggtagtatccaagtggggactctgtgtggaggcttcaaccccacatttcccttccatactgcccaagcagaggttctccatgagggccccaccccagcagcaaacttctgtttggacatccagatatttccatacatcctctgaaatctaggtgaaggttcccaaacctcaattcttgatttctgtgcacttgtaggctcaacaccacctggaagctgccaaggcttggggcttgcaccctctgaagccatggcctgagctgtaccttggccccttttagccatggctggactggctgggatacagggcacgaaatccctaggctgtacacagcacgggagccttgggcctggcccacaaaaacatttttcctcctagacctccaggcttgtgatgggaggggctgccacaaaggtctctgacatactgtggaggcatttcccccattgtcttggtgattatcatttggctcctcattacttatgcaaatttctgtagccggcttgagtttcttctcagaaaatgtgcttttcctttctatcacatcctcaggctgcaaatattccaaacttttatgctctgtttcccttttaaaactgaatgcttttaacagtacccaagtcacttcttgactgctttgctgcttaggcatttcttctgttaaataccctacctcatctccctcaatttccaaattccacaaatctctagggcaggggcaaagtgccaccagtctctttgctaaaacatagcaagagtcacctttactgcagttccgaacaagttcctcatctctatttgagaccacctcagcctggatttcattgttcatatcactatcagcattttggtcaaagccatttaacaagtctctagaaagttccaaactttcccaccttttcctgtcttcttctgagctctccaaattgttccaacctctgcttgttacccagttccaaagttgctttcactttttgagtatctttacagcagtgccccactctactggtaccaatttactgtattagtccattttcatgctgctgatgaagacatacctgagactgggtaatttataaagaaaaagcggtttaatggactcacagttccacatggctggggaggccttacaatcgtggtggaaggcgaaagtcacatcttacatggtggcagacgagagaatgagagccaagcaaaaggcttacaaaactatgagatctcatgagacttattcactacaacaaaaacagtgtaagggaaaccacccctatgattcaattatctcccaccaggttcctcccacaacacatgggaattatgggagctacaattcaaaatgagatttggatgggaacacagccaaaccatattagacatgtacattaggaactttttttgtctttcttgacgtctaagttattttttcataatctcacttctgtgtctatctgtacattttgggcaatttcttcagatttttcttttctttttttctttttttgacatggggtctctctgtcacccatgctggagtgcagtggcatgaacaaggctcactgcagcctcaacttcctgggctcaagtgatcctcccacctcagccccccaagtagcagggactacaggcacacactaccatgcctggcttttttgtgtatatatatgtgtgtatatatatatgtgtatatatatatatatatatatatatatatatatatatatatatatatttttttttttttttttttttttttatagagaaagggtttcaccatattgtccaggctaatcttgaactgctgagctgaagtgatctgcctgctttggcctcccaaagtgctgggtttatgggcatgactcatggctcccagcctcttcatatttttcttattagctaattctctttctgttcttaccttgtacattgaatatgtaatttcaatggttcttttttaattaaaaaaattctttttacttccttttcctgaatggtcctttaaaaaaatagaatatcttttattggtcatgttttgaccaataattttttctatttatttaaaatttaaacattgttataacttattaggtaattacaatacctgaaaaaagaaaaaaaagtaactaatgagaaaaatcagaaacatagcaacagatattcataaacaaatgagggtgtggttctattagtttttgtctagtgactcttactagtgatgacttgattaactatgtgttttataattttgaattgtaagctcatatttgactagatttatctgtaagaattttaagaggtgtgtttcaggattcattcctccaaagaaatttgctttccttattctaggtaaccttggatgccactaacccaagatcattttaagttttgctgtttctcagacaaagctggtagtttaagtttaatcaaactcatagatggcagttccattgttaaaatctatcaaagaatgcttttattttgtttttcctctcctagagactaagctgagagagaacattttttcaggtatctcttggccacacttaacgctttcttgtccacaaattgactacatgggtagccttttatggtttctatctttctgggaggaccttggtttcaagtcttcatactgtacagacccaaacccttattttctgtttcctatatactgattataatacaaggctgtagattactatgtttgataaatgtccttacaattctaatttttttgtccctgttcattttggacttcattttatataggttcagttatgcattcaaaataatatttattggaatttttccaatatttgaaaattatttttggtctggaagttttaagagtaccttagtctgcgatattgttcagaaattaagatattttctaaattattttcttgtcagtgaaaacataatgtacttttattatcaataaaacagtattttgtttttaaatattcttgatgaatttaatccactttttcttgaagccatatttttgatccctatgatttcttgttctcacctgaattgatttcttcctagcccttcttcacagatgctaacttgggattttgtttatgattttccattgctatgtttctgatttttctcattaattacttttttttcttttttcaggtatattaactcatgtaattatttttaacgagtatttgaatggtatgctttctgaatttggtgttctgaatgtgtcatcatttatctttgtcattgagtgatggcttactggctaaagaattaaaattattttctttaccatttgttacatggtgccaatgtattagtcattcttacattgctataaagaaatatctgagactgggtaacttataaagaaaagaggtttaattggctcatggttctgcaggctgtaaaggaagcatagctgcttctggggaggcctcaggaaactttcaatcttggcggaaggtgaaggagaagcaggcacatcttacatgaccacagcaggaggatggtgctaaaccactagaaatcacccccatgatccaatcacctcccaccaggccccacctctagaactggggcttatattttaacatgagatttgagtgggcacagatccaaactacatcagccaatataaccttaatacgaaaaccaataaacctagtgacacaaatacttagaacaattttgcttataaataaggatgtagtttctaaacaaaaggaacaccagcaatgcataaaaacaatgattacaaatgatttgggaaataattgtcactaaaatctattgaataattacactataatgaaaaggaaaaaaatcaagtaatattatcaataataataagaactaataattattaagcaattattatgtgccagataactgttttaatttctttacttgtattaactcattcagtgcatgaacactatgaggagatgttattattatgctcattttatacatgaagaaacagacaaaaattgtaacttgtaaaaaatcacataattctttcagtgaaagaataaggattcaaacccaggtagtctagatttagagtatatgttatattacattttggcaatagtagatactaaattcattctatacatttttgtcaccattcctaataaaatattaggtaaacaggaatgaaggaactacttgttctaatagagataatttacctgactgtagagttaaagcaaaataaatggaaactatgagaaatgagggacatacaaattggatcattttttactgtatttttatgactattttctcaattttcccttgcagaacttatattgaatttttttgtaaactaacaaagaaaaatgatttgaattctctatgttaacagaagtaactttttgatacttcctaaggatgaagattatcttggtcaaggatttaaataataagctattttatctagtttattattcaaaattttattttatgaaacatttaatgaaatgattaaggatttttttctagtaagtgaccgaattagtataccttgaggtcttaaatatcaatgtgtgatagaagttacatagtgaaagcaaagggcaaatgaattgtagtattgaaacaagattcttagacatatacttaagtagaatagttctcattctttatttactttgcaatgttattggtaagctggtcaatgtgaggtcttgacatttcatgtcatatttagaaaatcatctgtatagcctcaaggacttaggtatcttgattcataaaataataattatagagtacttgctatctatggagatttttggctgcaatatttctttgaaagcagaacatagatgtttgttgactgtttcattaaagaaatatcaggtaacagtttattacatgaatatagctaagattacaaatgaaggcacagtgagggtaaaattggtactttcagggcaaagattcacttatttctgacaactctggtaaatgcttataggaatgaagttttaatttcacaaagctgtctgctagctaaagacattacattcagattgaattctggaaatatcttgtctgagaaaggaaaatggaagcctcacttgatttaccctcttataatttgcaaatcagaagccattttctataacattttgcaaaggtcctttttacgtacacattataactgactactagatagcatcagtgtcatttgtatagacatagtaattttacattggaagactaattgttaataatagttcccatttttaagaattagctttaaatctggagaatgtctctgtttctcagttttctcaactgttgaacaggagtattgcctatctcacaggcatcttgtaagaatttaaaaaggtaatatgtaataggtactgagaacattgtctgaaacatcagaaatattcaacaaatattggatgttattaccaatctttgaatgtctctaccttaaaactcatagtaacaggcaagttttcttgcaagaagaaataaaactacatctgggttttcaaacaaacaagaagaaatattgtttataagtatattttctatagcagcttgcagatagcaagagctgttatggtgctcatacttaaggtctgtgcttgtttcaaagaaagctcgccatgtgttaggagcttggcagacgactcagttctgattccttttatgtccactctctctcatttctcttctaaaatgcacaagccgcaaaccatcagtttctctcttgtccctctctccctttctccttctctctctcataaacacacacacacaaatctattcccttttccttcaaaaaacacacacacacacaagtgcatttacactagtttcattttatttattttttaatccccaaaggattcatagagcaggctgtgtgcagctgccgtattttccactggttaaattggcagttacctactgtgtggagttgctaggagaaggtgaataagcatgcttacagcatcagttgatgtacatattcttgcaataacaacctgtggagctgtgttcttctgtatggctttagatgttattttctctttgttatcattaatatttgttgcatttattgttagatgatgatacatttttaagtgttagtttcagatcaatttagagaaaaaaaccttggcatttaaacaggcacttttttttctcatggtggtgctgctgatactggctcctaccatctgtttccttattacatcctgcccttgttctgttggtagagaggaattcagcttcttctggagcgcgaaagtcattcacgtttctcttgtgcataatagagctcgtaaactgtaggaattctgatgtgcttcagtgcacagaacagtaacagatgagctgcttttggggagagcttgagtactcagtcggtcagtagtacagtagcaggctcacatgtacggattgttcttgtgaggtcagagcatctgtttatactgctgtctgcttaggggggtggtgaggtggtgagcagtggatatatgcctgtcaaagtcaatagcaaatctgtcagagtcttccctcagctttgtacatcagcactgttttgatagataagagaggctactgtataagtgtgtaagatttgtaatggactgaggaatgcttgttctagctgctgaaactgactgtaactgtattgtcttaggagcatcatcatggggtctagtgccacagagattgaagaattggaaaacaccacttttaagtatcttacaggagaacagactgaaaaaatgtggcagcgcctgaaaggaatgtgagtatgctctttgctttttatttccccccaaaagatttgactattaacgtgactaattgttggtgctatccgcctttgtgggctagtttcctttagaaagattttctctcgaaaaataaaatgtgcctacctcagctaacaacttgttgaaagacgaatgattttttgtacttgcacatgttattaaagtaaggtaacttctggagaagtcactttactgtcatattacatggtttcttttacgcattctgtatgtgctgtttagatatgtggttcagatatgcagaaaggtaactaagaaagccatttgccgggatactgccacaaataaaatttccctcaggtaagcagagagagaaataagactgatacttctttctctgtgattagatttggaaaagcaatgagatgattaatatgataataaataattatactttattgtgcttctttttgcttaaatgatatttctataagaaaaaatgtttacgtgataaaaatattaacagcatatcaaacttattggagagttttggctttaaattaaccagttcacagttcacttctcctgagagtacagaatagtccatagtacataatagcccttagtaaaatgggtcaagaattatgcattatgtcaaacatgggatgtaattacctaagtcagacgttaattgcaatgctattcagcttgatatttacacccttacattttttttagctgtgtgtgctactagttcctgtttagtgtttcagcaccacactgtttgtatgctttatcttaattgtcataatttaaaaatcagatttaacatttggataaaaatgagaaatatgaatatgaattttacaggccgttgtaattgcttagtatatttgcagatctcaaatgaaaatattaatatatttgcttttctataataacagctgaaagaatcctacactatgcaaaatagagattttctaagatttatatctctaatgctgtatttacacactatttttaaaaattcagtacctgagtaaatttgatgtccctgtttgatatttttttaaagaaaattacatcaaactttgtttagaggtaaaaattccttctgctttcctccatttgattgtatttaatgatgtttgtgtatttaaatattgttctttgtatattttcttacttcttgaagtaatacatggctttacagtgcattagtgtaagagcacaataatgcaaagaacatatagcagagaataactttcaaaaaggaagccatctttacattatttggatgagctagaaatctgtttctaagatccattgaagatttagaaattacagctttttggtgaggttgttctctagcggaacaagtaatcctatcaaagcaaataacagctctcaaaattaattagcatagatgcaaattaaacattagcagtcagcagatgatttgtgttttagcctaatgagtggatgaacatcagtaccgggaaaattatgtctctcattacaacctattttagattttcttctccttagaaggatgttttgcttattttgttttgtttgcatttttctagtttcctgtagttacttgaatgtatgaagatgtatgctggtggatttatgcatatgtctttaagaaatttgaaaagtgattttgtgtttatttgatactttagggcaaagttactgactcactgtatcagttggtctcagagatcaatctgtcattttatttcagaaaagggtgatagagtcatccaacagtagatcttcatgaattgatagaaggatatatgaaaatatgtacatgcaaaattaattttgagttgtgtttatttagagccactaaataatcattaaccaagtttctttctttctttcttttaaaaatcattatctaactgactaaaatgactgctttttcattgaataaagaagaaattgcattttggtactatcactttaacttgtactttgacttagtacattttcagtgttcaaggcttagaattgtcaaagcgagaaactctaaatctaaaatctgcatgactaatgacaaccaaattgtttaattatggtcttttgtatagtttgcattcagagcagtgatatgagggactccctattccattgctgatattgtcttgtctatttaaaatgcaatattgattcaaacagaattttagcttatcaaaattgctggtactagaattctacacttaagttttggcaattaaaatcatgctactcattaaacctatcaaacaattgtgcaatagttttcttatttttgctaaaatagactaaagacctttagatatttgtttagaaagtgatttttaaaatcttgtactttataaatatattgacttattttggcataatatactgtttttaattgagcttccagtatgtaaattttaaggttaaataaaaatagagacaaaggtgaaagtaaaataatgtttattcaattatgccttaaatgtagaaatcatgaaccattacaggtagatatttagagaaaatatcttatagggattgttatatgacataacattttagagagtcttttgagtccatagaaataatttttaaattttggaacacgtggaaaacattggtaactaaattaaaatatcaatgctgtctaccatttttgttttcttttattgagcttcttctaaattgtcttcatataatatttgagacaccatataaagttatgtgccaagaaatctctttttcttttgtgacaagaaaggtgaaacagtttcttactcccattctgatgtagacttctctgcattagtctattaattttcttcttatattacaatctttttatttatctttttccatattcaaccactaatttgttactcagtacaacaatttagattctacactacaagtcatcatctatgatggtggaaatatgggcaaataactatggcatcaggtctttcataaattagatttaaaaagaattatatacttggccataagttatcaatcgtttagggctggaaaacacttcctatttcttatgccatctcaacaccaaatgaaatttctgattcagaagtttcttatgaatttgggacctagacttcttcctacatactaagaaaacatagctattgatagtctttcaaagattgtcaatttcattgatttccatgtggaaagttggtttgaagattttacagtatttcacctatgcattgtgtttcttttccatttgaaagataaatgcctttttgtgtcatgtactgttgctttttttttctctaaacatacaaagagttccacacctgtggattttattaaaaaattaaacatttaaaaaacactggtgttgctctttccagttagtgacattgctataagaattcaatctaagaggtgacagcattttcagaaaactgaaaatgagcatttttcaggtagaaaattcagtgaaaacgacatgaaattatagggaaaaatctaaaacaaagtattatcttactcaggcattcaagagaagagaagaaagtatgaactgccagaaaccataaactactgacaaaaatgtaatactcaccacttcatagtacttactgccccagttccttcagtttttataaacatagtactagaatctatcacaatttcagttagaagctaactttatatctgatcgctaattttacacgtctcgacacatacctccttatctcccccatcccgacgaatgtccagatattaattttaagacttggaattgtgaatgcaatgcttgaaagacattaagttaagcttcgttgtcttttttttctctgtgattggtagggtagtgaacatgactatcaatagtgaaggacaaaatgtttagaagcaaaaagtgaaggagagaagaattagatggtaatcttttaattctaagcaactgttattgttgaagagggcagtatgttgtgtagttctcagatggagttgtccaggcccttatcaccaagaggatgtagcagaaatatacatttaaaataaaaattagcaaaaaaaacatggaagtgacaggagctattagcatcatattcccaaattggaaccatactttaggatgaaggtgcattatagataagacacaaatttgatccttttactctctgcttaaacacctttaaagctttgcatccttcacagggtcactgtataccagcttgatctttggattctcctctaatgcctctccttctgtgacatgcctcctattcagacctagggtcacccaaaagaaacattgcttaccaccccttttcctgtgctcattttgttctctcttctggaggcaactgttcctccgttttcctttcagccaggtttgctcttgttctatacgaagcttttggagttgcgtagggaagtttctggtggttgcagtgatggcaaggtgtttctgcatttagtgggcagcagggtccgggtaggctaaatgtcctgcagagctcagggcatttccttatcaggaggagttgtcccactcaaaattctgatagatatcctgttaaaaatgtgcaaagattgctgcttaaatttcacttgcaaaggaaattcttcctgaccttccagactagattagttttttattttcagctcataaataacctgtatttctcttctcgtaacaaaatccaccttccctattcaaccacagcttttgagtgcaagagctatgctcacttcattggatttgctcttggattccagcacatagcacagtacttagcacataggagataatgcaattaatattttaagtcaatgaatgaataaaattctgaatcttatactggctgtaactagaaaattagatcagccaggctgcgaaaatagtgactaaaaccaggtgggaggattggagatagattcacagctggaataaacatggagaagatggaagggtgtttgctttatcatctttatcatcatattgttagaattgtgcagatataacatatttgtattcttactccccaccagtgttcttaaaaacataagtctcttaagtagttatgcagctagtatctggtagaacatgggtttaaacatagatatacctagctctaacattatatttatcttgcatccaatacagaaaagatgacagtctcagaagacaccagaaaaggatctacaatggttctccttaaaactcaattcccaggcttggggtaggcagacttatcaccctccagaaatgtccacgtcttaatcccctgaaccaaaggatatgttacttcatttgaaagggagaattaaaggagcagatggagttaaaattgctaatcagctgactttaaaatagggagcgtatcctgtattacccaggtgagcctaatgtaatcacaaagattcatcttcctccctccctccctccctccctccctccctcccttccttccttcccttcctttccttccttcctttctctctttctttctttttctttctttctttctttctttttctttctttctctctttttccttccttccttccttccttccttccttccttccttcctcccttcctcccttccctccttccctccttcccttctttctctctttctctctttctttctttttcagataggatctcactctggtgcagtggtgcgatctctgctcactgcagccttgacctcccaggctcaggtgatcctcccacctcagcctcccaggtagcaagaactacaggcatgtgccaccacacctggctaatttttttatagatctagtagagatgggtttttgccatgttgctcaggctggtcttgaatgcctgggctcaagtgattcgctgacctcagcctcccaaagtgctaggattgcaggtgtgagccaccatgcctggccaatcacaaaggctcgaaaagtggaagagagaggcagaagaaaaagtaggagtgagtgacaaggacttaactcgtctgtgctactattgaagatggtgaaagtgggccacgagccaagggcaacctctagaaacttgaaaagataataaaacagaatgtgcctagagcttctggaaagaatacagtcctgctgatactagaactcagtgaaatttgcaccagatttctgagctacagaactgaagataattcatttatttcaagccactgagtttgtggtaaatttgttacagtagcaataaaaatctaatacatgccttctataccagaagaacacatcaacatgaccattcctgtcctcacccaacacacacacacacacacacacacacacacacacacacacacacacacagaaacacacacacacgcacaatccctagtggtgaagccctgcctcactctatggcacattggattcagatactctttattcttagccattaactcactgtacctccatctaaccctgacttgcatgcccaaaacaccagtttcctcaccaaactctgagatggagggtatttactggattcatttcaaatgtcaaaagagaatgtgatctttcttggaaattgttgataagtctgtatgttgttcagtatgtgactgttttgatggattaatcaggcaaatcagttattaaaaatctgtcttttaatcataatcataatttgttttgaagaaaaccacttcatcaaaactcattttgatgtgtagacgtagtcttaatattcagtcctacataacattatgttatagtttatagaactaacattattaaggtggaataccttacagattaggtggcttagaaattgaactctaatcagatattttctaatattacaatactacctgctttttagctgagtgtccatggaaaagttattaatttacctaaacttcacttttcttatttgtaaaatccattaattgaattgatcattcatttactcattcaataaatatactctgattgtatactgtgtcaggtacaatgttagacacagaagctactgttcctgtagaggagacaaacaacaaaaaagtaaattataaaaagcaagttaatatgcagtaagaagtgaccagaataaaatgcacctttgggaaagtattttggatattcagggatgacttcttttaggttatttttcagctgagacatggacaaaactgatacctacctcataagatgctagggtgagaggaagtgctaatgaatgatacccataattcctgcccaagttcagaattaagagagagataggtttaggagtcccgtagatgaaaatcaaaatatcagctttattgcagattaaacttgcatggaagaacatggtttgggtgtgtggctaaataaaccagaattcctgtgaattcaacttaaccttcaaaactgcagaactatagaacaaaataaactttctgttgattctgttgatagtttcttttgctgtgcagaagctctttagtttaattaggttccacttgtctatttgtgtttttgttgcaattgcttttggagtcttcctcatgaaatctttgccagggtctatttccagagtggtattttctaggttttcttttagggattttataggttaggctttacatttaagtctttaatcaatctcgagttgatttttgtatatggtgaaaagaaggtgtccagtttaaatattctgcatatgactagccagttatctcagcatggtttattgaatagggagtcctttcttcattgtttgttatcgttgactttgttggagatcagatggttataactttattttggggttctctattctgttccatgggtctatgtgtccgtttttgtaccagtgccatgctgttttggttatagctttgtactatagtttgaagctgggtagtgtgctgcctctggctttgttcttcttgcttaggattgctttgactgttcatgctcttttttgattcaatataaattttaaaatagtgttttctaattctgtgaaaaatttcattggtagtttgataggaataacattgaatctgtaaattgctttgggcagtatggatattttagcaatgttgattcttcctacccatgagcatggaatgtttttccatttatttgtgtcatctctgatttctttaagcagtgttttgtaattcttgttgtagaaatcttttacttccctggttagtagtatttctaggtattttattctttctgtggctattgtgaatgggattgcgtccctgatttggctctcagcttggatgttactggtgtatagaaatgctgtggggtgttgcagtcttacactattattgtatggttatctaagtctttttgtaggtctctaagcacttgttttatgaatctggatgctccagtgttgggtgcatatatttagaaaagttaagtcttcttactgaattgaaacatttatcattatgtaatgcccttctttgtcctttttgatcattgttggcttaatttctgttttgtctgaattagaatagcagtctctgctcttttttgttttctgtttgcttgatagatcttactccatccctttactttgagcctatggttgtcatcacatgtgagatgagtctcttgaagacagcatacaggttgggccttgcttctttatccaacttgccacttcgtgctttttaagtggggcgtttagcctgtttacgtccaaggttaacatcgatatgtgaagatttgatcctgacatgttgttagctggttgttgtatagacttgattgtgtacaagctttatagtgtcaatggtctatgtacttaagtgtacttttgtggtggctggtaacagttttttgttgctatgtttagcactcccttaaggacctcttgtaaagcaggtatggtggtaacaaattcccttagcatttgcttgtctgaaaatgattttatttttccttgttttatgaagcttagtttggctggatatgaaattcttggttggaatgtttttcctgtaaggatgctgaatataggcccccagtctcttctggcttgtagagtttttgttgaaaggtctgctattagcctaagggagttctctctgtaggcagcctgcccttctctctagctgcctttaatattttttcttttacattgacctttgagaatctgatgcccatgtgtcttagggatggtcatcttgtatagtatctcacaggggttttctgatttcctgaatttgaatgtcaacctctctagtgaggttgggaaaaattttgtgagcaatattctcaaatatgttttccaagttgcttgctctctctccctctctttcagggatgccattgagttatgggtttggtttctaaataatctcatatttctcagagattttgttcattttgaaattgttttttcattatttttgtctcactgagttgattcaaggaatcggactttgagctgtgagattctttcctcagcttggtctattctgctattaatacttgtgatcgtattatgatattcttgtagtgagtttttcagctctatcagaacagtttgtttctttcttaaaattgctattttgtctctcagctcttgaatcattttaatagatttcttagattccttgaattgggtttcaagtttctcttgaattgcaataattttccatgccatccagattctgaactctgtgtctgtcatttcaactatttcgtctggtaaaaaaacattgctgggtagctgttatggtcatttggaggtaaaagacactagatttgtgagttgccagagttcttgcattgtttctttcttatctgtgtaagctgatgtttctttaatctttgaagttgctgtcctttggatggggctttttgcttttatattctttcatgcacttgagggtttgactgtggtataagttgggttgagttgactggctttgtttttggattatttcagggggccaagtctcagctcagcactcctgggctgcatgctctaatactggggcctgggaccaggcccatgactttgttttatggccccttgaggttaagcacctgctgcactggaggggctgaggtgtttccagttcactggcaacaacattctgatggggagaaaggtgctggaaaaaggactttattgaggttgtagcagtggggtttgcatgtgcacatgtgcgatagtggcggtagggtagtggtgaggtggtgggctctgtgtgcacattcaccagtgacaatgggatggtggtgtgaggaggtttgcacacatgcactggcagcagcagtggtgggatctgcctgtgcactggtggtggtggggcagtgtggtccacgcatgtatgttgggcagctgcaggacacatttgtgaacatgtgttggcaaggtggtaggggaagcggcagatgggtgtgcactggcaggggcccatctgcagaagctctctgatggtcagacagggtctgttggtgaaggagctgtggtagtgtccactgggaagcaccccagttcagtatctgtgcttgcactgcaaatgggtgtgtccaagcaaggactctggggagaggctggcaaacaggggggctcccagatcagattggctctgtctcatggggaaaatagccctgttctgtctagatttgagtcaacacaagccaaagcctgttagcatagcatggcaggccttgggagatgggcatccctggctgtgctccactatagctgttcccacactaaacccttcaggctctgtgcaggcttaagtcccacccctatcaactctgtaagaagctctccctgccagctcaaaagtcagtatgtgtcatggggtctcctgcagctaggattctggaggtctgtggtgagagtgggccactccccacctattttactcaccctggccccaggagctcctctggtccaggaatgagtcctggtgcttggcaatcccatacagcattcgcagcctcctttctcttcagctcagggtctgtttcctctgtccactctcaatgcccttctgaagatctgcttggagcgtgccggtctttttgatggtctggtctcttggtgagagaaggttttcctggctacatctagttgaccatcttgactctttccctcttgattgatttttcaattcctcaattttcttatctgtaaatggaaataatatcatcacgtatctcatcggtgttgagagaattaattaagttgacacacaaattatttagaaaagtatccagaattcaagaattcctagcttttgtcagtcattattattgctaatattaaatgcagaaacacaattctatatattttcatgtacttttcttatcagaatcaatgcacagagtagggttgtcaagatgcagaaagacaactttcttttagctcaatggaagtattctcactccccaggtttctcttcaccagaatcattatacataaggatttgtgtttccctggagcaggaactagggtatataaggagagagagctgaggagaagtgggctttgagagtttcactgatagaagaattgtcttgagggcatctttaagtcaacatcttgaggtagccttatagtggattttaggtctctataatcatgtttatctcagggctagacttattttcctgagtcactctggcttgaaaattattctttaggccttttcttattataacctgagcctggttcacaacagacttgacttctaggtaattgctatcatgtcccatgtccatccccttgctgactcattttagaaaatgctgtatttccattacgttatcagattttgtcatttaacatatttcaattagctagtcaaatgtaatatgtgagcaagtttgattatcatctggtaaaggactatgctatagtaggccttttggatatgaaagaaagtcttaattaacattattaaacagatgatagcgttaaagtctcatgagaatcacactattccacatatccagtctgagcaagttttaggcatgaatgactatagttaaggaaggcataacaatgatgatagctcattagaagcatatatatgaaacatgaccctttggttggtttctcctttcagctatactttcttgaagctttttaaaaagatcaaattttattttatattttataaaatatttaaaaacgtggacttttactaaataggccgacaaaaagctcagtcatgcagataatttttgataggcaaatttttgatatttatagttattcaaatatgtttataatgagtcatgaaaaaaatagtaaaatctctaagcaccagagtctccaggagaagaaacctgaggtcaacattaactaaactctgcataagtatggatgttcaagggattcttttaaaacaagttgtagataaatttaaaagaaaataaaaatgaacttattagaaaaacaataatgtactaattctggtccatttaaaactggactttctaagagttggttcaaaataagctgtatttggagcaagataagacaaagctgaacaactttggtatcaactacatttctggttaccttaaattgtttaaaaatcacctcaaaattgaatcatagtagtaatcatactttataattgttttctgcctgttactttctgaaagattttactttttatctgtatggctcagtacaattatctccagtctttcggatgagaaaattgaacctccaggatattaaaccacttggccactatttcacatttagtaaggggagggccaaattctgaggcccatacttattccactgaacactgacttagataattctacttaatacgcaaggctcagtataaaacctgacatttcaggaattaaaagctgttctcttgttttgattttttccacagtcctgccatctgtttgtctagttttgcgtactcaaagctgaataccaaatggagttatcatgtggcgtatggtttggatgtcagaaactccccaattttgtttctcttctctaggacatgtgctaccattaccttttaaattaatttatttaaacaatgattctagctaatagctacaagagaatttgatgttttctaaactcttttacctccttagagcttggacctttgcgaaatcactgtaacttatttggcctttggtacaccaaacaaccaagaaaaccctgcacagtaatgtctgggtgcccatttcagaagatttttttttaaccaatgaaaataaattcaagaattctaacaccacatattctcactcataggtgggaattgaacaatgagatcacatggacacaggaaggggaatatcacactctggggactgttgtgggctgggggtaggggggagggatagcatcgggagatatacctaatgctagatgacgagttagtgggtgcagtgcaccagcatggcacatgtatacgtatgtaactaacctgcacaatgtgcacatgtaccctaaaacttaaagtataattaaaaaaaaaataaaaaataaaataaaataaaataaaataaaaataatcaacaagctttaaaaaataaaaataaaaaaaaaataaaaaaaaaaagaaatttacaaatggctttgataccccggaaaatatctcacttctgaatcttggtgtttatactctgtgttaaaaatgctatgctagttttcttttttacttgttgatgtttatttgtggctccttaggtattctgttattcagtgtttacagcaaataaacaaagtcagtaatgtcattcctaaatatccacgtagagaacttttgcttagaaaacataaatgaattactccacatgccagtttttccgacctaactcacctttcatttgtaaaccacttttaccttttttttttgtttttcacatgaatatcttttatttctttttcttatctggttagtctggctaagacttccagtactatgttgaacagaagtggtgaaagtgggcacctttgttttgttggtggtctttgatggaatgttttaggcttttcaccgttgattataatgttagctatcgatttgttgtatatggcctttactatattaaggtatatgccttatgttagtaatttattgagaattttaaatcataaaagaatgttgaattttgttgaatgatttttttgaatctattgagataatcataaaatttttatccttaaaaaaaaaaaaagaattctaaccattaaatctaggtactttatttttgcttaagctactactctattcttgttataacaaaacttaagcacataagaatgctcttccctgaagtcaaatgagtagtctttcttctgtttatttcagaaaaataatcttaatatagtttattctgccttacttcccaaacagaacttaaactacacagtatttttttcaagcattcttagattgcacttagagatggctagtatatggattaatgggttcctttctaacttttagaacttgaaaaatttccagtacttcccactggttgcagtatgaacaagcatctttatgtgtggctgttcaatacttcatttcctagcaaatctctgcttcaatatcttgagttttccaaagatatgatttatttattttccagaaattctatcatattgttgtttgctgttgcagtaatggcccaatttattcatgatttcctgtatccattctcttgactaatctctctcatacttactcttggccatacaccttgttttagccagtgggcccttaccaaatgtgacacaatcaaaggcttagaaagggcttatgcactggagtttaagctctctggaaccctcaaactggcgtgtgaagaagcctggtgagacctattggaggatgggcatgtagggtagatataaaccactccagctgaggcccctctaaaccaaacagttaactaccggacatgtgagtgaggactacccaactttctcaaaattgtgagaaaacaataaatgtttattattgttgtccactaagttgtcggtgttttgttgcacaacaaaagctagttgatatgcacccacaatgatctcttagcttctgaatttttcacataagtctctggtttctaaagttttttttttctacctattactgtggttactactttctcatcatctactgtcatttatttctttgaactaatagccaattagtaaatattttagagcttacgaaaataaacattgaggtctctctttttagaaagatagtctaataaaattcatctacatattattttcaccagcaacactatcaatggcatgtgtccacataaaatatttcttccagtgcatgctccttcagcagctgtgtactgaacttgtattgctcttagatttctgtgaacaaatgtaatttcccaccaaatagaagagaagtatagagtaaagcagggaaactgcatagttgcataaaagaagatggttcatatcctgttaccctggcaacaggcactagaaaggccagggctccccacacatcctgttgccctgacaacaggtcatacagggcatgggaaggcccagttcccagttttctaggcctcctctttgcaaccacaaagacaaagaagaaagtgatgttgcatcttgttcctccccacctacatatttcttctgttatctgaaccattccagtataagattatctttccagatttaagaggggggcaggaaatagtgacttcaatttttacattcataagctctgaaacatttgctaatatttgattagttcaaaggagtaaatgataagaaaaaatgagagagaatcaaaatagtaatgagaataaattgtggaaaccagagaagcattaatattataagaacagtttagcagctgagagctgatttggggtatgtgtccattagccacactagttagcctttaaaatttttaaggagtcatcacaagaagtcacatctataaaatggctgtttatttggtcttattttaaaataagatataagttgtaaagacaaacggtatttcctacttataatcaaaccaattgcatagggaacaaagagaaacaggagaaaaaaagaattcgatcagattgctttcttacgaactctacatggaaagaaaagatgaatgacgaaggaaagaaaaggctaagaatgaaaaaggaaaaattttatatagaattgggaattcagttgataaaaacttgtatagcataacatcattttctgatatttagttatgcattgcacttagagatggctagcatatagattaacgggttcctttctaacttttagaatttgaaaaatttccagtacttcccactggttgcagtatgaacaagcatctttatgtgtggccttttgatacttcatttcctagcaaatctctgcttcaatatcttgagttttccaaagatattatttatttattttccagaaattctatcatgttgttgtttactgttgcagtaatggcccaatttattcatgacttcctgtatccattctcttgactaatctctctcatacttactcttggccatgcagcttgttttagccagtgggcccttaccaaatgtgacacaatcaaaggcttagaaagggcttatgcactggagtttaagctctctggaaccctcaaactggcgtgtgaagaagcctggtgagacctattggaggatgggcatgtggggtggatataaaccactccagctgaggcccctctaaaccaaacagttaactaccggacatgtgagtgaggactacccaactttctcaaaattgtgagggataaagtaataaaatcaaagtgcccaggccctgtgtctggcccagaataagcatctacgaatgatagctgttcctgtaaattacttttttggtatatctatgtgggaaacaatgtgtttgtttttccccattcctctgccaaatgttaagattgaggtaaaagtcgactctagataactacatagtgggtaggaggcagaagagatttaaacactgactgaattaatgaatttcttatagtccaaggttctaatttcctaagttctccaccacacatataccaggaaaactgaaatttctgtttcatgatgtagctgaataattaggattatgctgacagtatctttcagtgattagtgaacattctggcctcatgtggccttgcagcctggagaattcttagtgagtggagacggctgtgtgtcctgtgagagaaaattgcctgctgaagtttcccaattgcagtgagtcagacagggagataagctgactgaatttggaggcaatcaggctaaatactttagaattggcttccaggctacaacatgttgtttgctactgagttgaagactcttcgcatgggtccttaaaaagaaacttacaaagcaaggtaatcttgaagttttccaatgtaattgaacaattttaacatttctcaagtttcatttttaccagacattcaagtccaaggtgtgtgatgaagcttggacaatagtcaccattttgaagctgtcacttaatttttgttctcagactttatttattctatcatgtgaaccaaatttcagttagggataaatactcatacagtgtttatcagaagatgcctctctgtaaaagttaactcatctatccaaaaggagatcatatatgcttaatcatatgtgcttaataactgagagtgttccaaaatgaaattcacaaccgaaataatacccagtttaagagattaaaatattcccagcattagtccccaaatgactttattatatatactttccaattattttacatgaggcaataatttttaaaattccttactgtaaattttatctttactaaataaaaaatgataaaatactaaaaatgatttcttgtttatctccattcttatgtttttaaaattcctaattctatgctaaatttgcataatacacactttctgtaattagataatttggttgtatctaccagtattacctgggaaacaagaaatcacatggaatcactttagcgcaccttggaattagaaacatattgctaagtaatcttaaattccttagaaagagaaattcagctcacagtaaaagcaaagaatgaaaagaaaaggctgtccttgatgaattcagattgttttgttaagtgtatgtcttgtgggtatagcagtaaacactaatgtatacagcgtgagtcacactatggtaatcttagccactggttagaactatcttaagaatgagtgtcattcagaaaaaaagttatagccaaattcatccagactatactgatacttttaaaaacattgagatactttggaaagtagggttaatattcttttattaactcaactctgttgacttattaatacaacttaattatttgttcattctacaaatattcattcactggcgcatggagagttccagcattactctaggaaccagggatataacaataaacagtccagatacgatccctaccttcctgaagtgtatattttgatggtggggttacataatcaggcaaaagaatataatgtaattttaataaaacggtacagcaacaaactcttgggagtttcaaaagtctgtattttagaccagagtggtcaggaaagagcttctcgtgatggtgacttgtgaagaaagaccttaatgaagtgaatagtgagtgacaccaaggcctgaagcattggccttggtgtgcggagggaagcaagggcacacaccccaagcagggtgcacttggcctgtttgaagaaaaccagtaagagcagaagggctgtagtacaggtaggagaaagagtggaataattgaatgtggagagatgggcagaagtcagatgacccaagatccagcaagccttgataagaagtcaagattttatttcctgcatgatgggaagccctttcaccttaggagcatcagggtgggtggcagatctgatttatgttttaagaagacttctctgaccattttgtggaaaataaagctaagaagtggagaggcaaggaaggacaaaattaaaaataggaggatgtgtcacaaggctctgacctttgtccacgtgaaggttctgtagctttggtgacattggtgcctttggaggtggtaagaagtatgaagatttgggacatatttgagattagagctgacagaatgcactgatgaaatggatatggggttaaaggatggaagagaatgaggcacaatgctgtgtgtgtgtgtatgtgtgtgtgtgtgtgtgtgtgtgtgtgtgtgtaagaaagaatggggagggggagagagagagagagaaagagagaacctgaacaactgggtctacagttccttacctgaaacctttgggcccagatgtgaaccaaattcacaactttccaaattttagaaaggtaataatgtgcctatttcaaaaatcatcacatattcccagtggggtttggggtagctccataggcacaaatctgcaacaaaacatataagtattcacttaatacatgctctcctctcagttcaggtcaggttttgctgtcagatgagctcaggtctggccaagttttgctgccaaatgaaaaaagtctgatttttagggtttttgaattttcagtgtggaaaagggattgttgacttgtactatttcctgaaatggggaggatggctgtggaaataaaaacctcttttaaatccatgcttttgggatgcccattagatgctcaagtggccttaacaaatacatacatagctggacagatagggggtcagggctgaacacatacattttggagttgttgatatatgggtgtatttaaaatcacaggactcaatgagaacgttcagggagtgaaagttggtataagtgagaagaggatcgagggctctctggcattctaacatttacaggtctgtagagagtaagaaaaacaatggagacacagatacagatacacagacacacagacacacacacaaacacacacacacacacacacgaaagagagtaggtgagcagtaaggggacttatgtctttacctctttcagcagtcacctaagtctaggagcagggcggcttatctatgatagcaagagggaagacagaatgtttgggaacatttgcagatagataggtgaaaactctggttacttttatttactcagcgaaattaaagaagaggctatttgaagaggcatttgaggaaggaggagaagatggagtcacctgagaggagtgtggctgaggacaggaggtggacagggcaggcagtctgagggcctgccagcggtgtcgtatttaaagtcagatctgtgtccctgtgtgccttttttcctgttacgttcagttcagctgtttccatgcaggctcagaggttcagggcagattcagaactaggtttacagagttcatattttgccagaaaacataagtgtgatggatgaagagagggaaaactggagcttgagggcctctttaaaggacagggtgttaaacctagattgaccatgagatctaagttgggtagggagagaaatgaggacatgggaggaagtatggacagggagaaagtgggtgaggtcaatgaattggtggtagagaagacggtaatgaattgctagaatagggcactagaatcagtgaccttttcttcttaaaggcacaaaatgatataataaacacatattgaattagacaagcttacacaagaaatataatttgtgaaatgaatatatggtaggagattttattttcctctgtagaagacttctgtgagcacctttacatttcattaggaggctttctcttcaaaacagaagaggctgtttgaaagcatggctattcctgaaaagaaaacaaagcaggcagatctaatttttaggatgcttttccttgaccacagcttttaaagtattgcctatacaacaatagaagttacacttaaacagtgtcatcaaaactcataacagggtttttccttcaccttgctttagtgactgagctttattctttgtggtgttgatggtggtggatggcaaatttaaagtatggatcagtagcaacaggccaagcatgcaatgaaggactgctgtgaaatatgttattaaccagaaggatgtgatgattatgtcactatataagggtcgttgtgcctctattcacagtagtagtagtttcagttgacttaaataattcaggccttcaaattccatctgaaaagccaaattgttttgtaaatttgcacatgctcagcaagcaattaattgttcctttttctgatgattttgttaccaagactgaagttcgttttggttgaaattttataacaaaatagctacacacatacacacataaaacaatgatacaaaattatgtacattggtgtagatgcaactgctattcactaactacaatacagtgttgatcaggtgtgaggagaagtgaaagtcattgtttattttgatttttgtcacaattagtgtcattatatatagaatttgctgggtcacaatgttaaacagttgtaagactgccatgttgaggtcactggatagattttacatctacttttggccttttggaaatggaatcttctgttttcatgcaataagctaatttggggataattatatgtgagttatgtcaatatttaaaaaaatcttttgaagttttggttgaatttcttatttggcattggagggtggctcttatttgaagtttagtgtcaggctgcttatcccaaagtaattcttgcaattcttggacccttagtgagatgttcccatcagtaatactttgcattttttggctgatagattaaacttttctcagctcctggagatcctttttctgcttttccttatttttaaataataatttaatgttgttgttttttgatttatctattttaaatattctttactgatttcatataacatggatgaaagttgagcatttttagaccaagctcctgccaccccctcctgactgaccctcctcccaatgtagttctatgaccacttcagtgaatcagtatttgaggtttgtagtcttatgactgaattggcttcacttctgagccaagtagtaaagtatgaatatgttcctatggagtataacttcttgtttttcctggaattaataaatatctcattttaattgttactttgttggacttgattactgcaaacctatcactaattctttctgagttcaccgaaagaagtgcaaaacccttcaatatattaccatcatgtgcttcttctgtcccactcttttccttagagacattttgtttttgttgtttttaattggtattgtattgtttttcaaatctttgtcccccagctccaactgggactcgctaaagctggagacacagccatcccctgggactgccctttgctttcattctgggaaatccctccagcactctcatgaattgcgtttgctgtttcctggatctcatcctttcttgtttaccctgtttaggggatgagcttctccaatagttcctgagatagggcacttgagaaatacatgtgtaaaaatgaattcatatgtgaagatatatttattttgatacaggttagttggttcaaacataagtaaaagatactttctctcagaattttgcagataccagttcattgccttttaactctcggtattgctatcaaggagcctgaggcctttcagtcttctttttgtgtgatgttcttcccaaccctcataagccaggaatttttcttatttctgctgttcgggaatttcgtgataataaccttagtccgggtgcagtggcccatgcctgtaatcccagccctttgggaggccaaggctggtggctcatttgaggtcaggagtttgagactagcctggtcaacatggtaaaatcctgtccctactaaaaatacaaaaattatggctaacatggtgaaaccctgtctctactgaaaatacaaaaaattagcggagtacagttgcgggcgcctgtagtcccagctacttgggaggctgaggcaggagaatggcgtgaacccgggaggcggagcttgcagtgagccgagatcgcgccactgcactccagcctgggtgacagagcaagactccgtctcaaaaaaaaaaaaaaaaaaaaacaagaaaaagagaaagaaaatagcctggcatggtagtgcatgcctgcaatcccagctacttggaaggctgaggcaggagaattgcttgaacacaggaggcggaggttgcagtgagctgagattgcaccgttgcactccagcctgggtgacagagcaagactcaatctcaaaaaaacaaaaaacaaaaaccaaaaaaaccttagtagggtcatttttttatttttttattttgagatggagtctcgctctgtcgcccaggctggagtgcagtggcgcatttccgctcactgcgaactccgccttccgggttcacgccattctcctgcctcagcctcccaagtagctgggactacaggcgcccgccaccgcgtccggctaattttttgtatttttagtaaagacggggtttcaccgtgttagccaggatggtctcgatctcctaacctcatgatctgcctgcctcgacctcccaaagtgctggaattacaggtgtcagctaccgcgcccggccttagggtaattttgatactgggaaattgactggtcctttcagtctggaaatacatgcctttcagtctggaaatacatgcctttcagtatggagaatatttcatttttttaatttgataactttttttcttatttttttttctttctgggatttttagtttgcacctcttggattaagcctgaaattttcttatatttttttctcctcttgccaatttttgcctttttaaaaaaatacaaaactttaacatctatctctcagcctttctaatacttttctgagacctgataacattcttactttgattcttatttgtagcattccattcttttgctatgtatataataatttttatagctctgaaattgttttagttgattaacaattcttcttctatatgaatagactttttctctggagtgccactttctttgtgttcacttcagtgtatctttcatgttaaaggctttcctcagaggtttggtgattcttggctgccttctcgcattgcaaagtgagacactgcagagctcattgacattcagtgtgaatggacagtgggcttcataacagtgtggtgggtgctcagtcttttttttttttttttttttttttttgagacgcaatctcgctctgtcgcacaggctggggtgcagtggcgcgatctcggctcattgcaagctctgcctcctgggttcacgccattctcctgtctcagcctcccgagtagctgggactacaggtgcctgccaccacgcccggctgattttttttgtattttttcagtagagacggggtttcaaggtgttagccaggatggactcaatttcctgacctcgtgatccgccgacctcggcctcccaaagtgctgggattacaggcgtgagccaccgcgccctgccgggtgctctgtcttttaattgggtggttaccaaatgccggtacctgtgtccacaggtctttctttggagctatgtattttctataagggcaaataatctaatatcctgtctagtatgtctaagcctttttgtgtctgttctagaacggaatgaggaaaaacgttggggccataacattcattatgtagtttttacttattaagaatagaagtttaacctctctcacctctgtggtttaatttcacaagaaaacaaacaccttgtttcccaaagcgacatgggaacaatagttaccaggtactgaggaggaaattaaggacttaccttgtctttacatagccaaaaccccactttcagcaccactctgcttccctgactgctgtgatacctggtgccttcaattcctgcatcttttcagggatctttagggtgaaacccttgtttctgctgtcatcctttgctaaggtttccacccctccacctagtttccacactcccgaaaacgaattgattctcttggattttgttacttctttcctattcacactgtccttttgagggatttataacatgttttgtttttactgtcatgttagtggagttttaggagataacaatgataaatacatgtattcaattggccatggttaaaagagatgcactaaagtttttcaataatttaaaataaattaaaattttttttcactttaattgtctggaaaactctgtgaagtaagaccatataccaactccatttatcatataaggaagccaaaataagtaaccttaaagtaattgtatcatatagggttcagtgcaggaaagaaaacccactggtatttgaaacagaaagggattcaatacaggaattagttgcttacaaaatcacaggaatgtctataggagccggaagtcagggccactactggattagcaagttaaaagcttagctgtgattcagtcaggaagctactgcctctgggctgccatcactactgctgctatcagtccgctgcctctagatacctatggagccagtggctagacatgcaaaggcaaagtccagccaatacaattgtctcatgaccttgtttgtcagccaaaatagcagcagaaagatggctcttcctcactttgccttccaaatgctttcaggcccctttcaattggcagtacctaattcacgttagaagcctagctaaaatggcccagggatatagattttagctttcaaatctctccaaatagaatgagtcaacctaaattatctatcataataacggtttgtgacagagctataaccagatcccagtttttgtcactttcagtatttttatttctactgcttcttttcgttaagaaaataataataaaaaagatacataaccacattacaatttgttttccaaatggaatgattatctaaaatacaataacaatgtgatcaacatgttttccttttaaggctttttttcctagcagtctttggtagtatttaaatgctggacaatattttgtagcctagtacaatattttgtagcctagtttaatattatctcttaagtaatatctctgcagtgagtgtatgaacctgtattacatgtttaatattaaactaggttacttaagagataaaaaaataaaagacagtctttcctctaatagggtagataaaacaaattcctattaattgggggtacattataaaatttggaagatatgtgtttttctttatggttgagaggacttatatctgttgtatgtcagcaactttgtatttgttatcccactaaatctccatacaagccttgtaaagtaatattgcctttgccattttgaagaacagtgcattgacactccagattagataacttcatgaaattatactgacattggactatagagtgggatttaaatatttttgctctttcttttatatcagtctgtctctcgaggagatttcagatgaatcttaatgaagggtaggatttggatggagagagggataggacaggcgtctcaaactcaaattctatcaggggccatacttgaaggagcgggggtggctgctgactgtagcagctcagagactacttgttgcctcttggggcaggaggctaaggggcctttactttctcttttagaggaaagttaaaggtccatattttaaaatatataatcctttgatttaaaaatgttagcaaacaaatcacagcgttaaaaatcactgattgggtcaacactatgaagactaaataaaacccatgtgttacagcatgttaaaatgggattggttccattttagccctggctgaagcactgaaggccaagaaaatttcaaaaggtgccaaccaaagccagattctacatgctggaccacccatagaggatagctaagtgagtgcaaaatgggttctctagcattagagacaggcctcctctggtctgtatcgaatgagatactgaaagggaggatttcaggatttatttgaagtgagctctgtcagtatgcaggtacccttaccaccccaaggaaaaggctaaagccaagagactgtgactggagctgcctttgtcagcaaggagaaagaagatccaatgggcttgtactaatgtcaggggcacgtgtccctctgccggccacgtgcaccttagaaagaagtcagcctggaccaattcaagagatcctgcctaagatgactgcctggaagtgccgagcacccccgacagagtggaccactgaagctagggatgagaaagggagtccttaatggtcaggtagaggatagccttagaaactgcagtgagaagaccacagaggaaagagctaaaaaaatccaagaattctgttgggagaagggaatctcacaagagacaaattcagcatctagaaggaaccaacacaaggaaccaattgcatctgctatataaaagtgtgctgtttctcctaattcctttcccctggagcctagtaagttggagagttggagaggaagaagattccaagtggaagcaggcctgggcttgggagggagggtaaggcttttcagattcttcgctttgaaaaaaaaaatggaattctgattattacattggtcgttgggcattttgacttctgagatgagaaccatcttgtgactaaaaggagccagaatgtctgtgggaggtggattcatccaggggtggagacaaagaaatccagagagtgtgaagggacaatgggaagaaaaccataaaagacacaatgctgacatcagtatgtttcttaaacagttactcatgtctgcaagccaaaactgtgggctcgccatttgtattatctgggctaagggatggtggttgggcagaggggctgagcattgggtgtggagagtatgatcaattatattaagtaacagaaggtataaatctttctgtgtagtccatagtctacacagtttctttttcttttcttttttttttgtagaatccaaatgatcttgtaagcttactacacatttagatgagagaacaaaattgacagttctaaggcttttggatatgtagatgataaaaggttacctttgctcaagagacatcccagtaaagaccattcaaccttcttcaaattataataaatgactcagttgaagactcagttaatgattttgaatgctcctttaaagcctacctcgattgttttgaatgtacatttctgaaggacttaacaaagccaccaaattaaggaacattatcattctctgtttatataattgttcacatgccatgatctggaatttcttcaaacagtggtaaagcatgcattgcaaaatacagtccatgcctgggctcagtggttcacacatgtaatcccagcactttgggaggttgaggcaggaggatcacttgaggccaggagttcaagaccagcctaacatgtggtgtttggtttcctgtccttgcaacagtttgctgagaatgatggtttccagctccatccatgttcctacaaaggacatgaactcatccttttttatggctgcatagtattcggtcgtgtatatgtgccacattttcttaatccaatctataattgacagacatttgggatggttccaaatctttgctattgtgaataatgccgcaataaacatacttgtgcatgtgtctttatagcagcatgatttataatcctttgggtatatacccagtaatgggattgctgggtcaaatggtatttctagttctaacactgcatgttctcactcataggtgggaattgaacaatgagaacacttggatacaggaaggggaacatcacacaccggggcctgtcacggggtgaggaggcggggagggatagcattaggagctatgcctaatgtaaatgacgagttaatgggtgcagcacaccaacacggcacatggatacatatgtaacaagcctgcacgttgtgcacatgtaccctagaacttaaagtatatatatataaaaaaagaccagcctaaccagtatagtaagacactgtctctccaaaaaaaaaaaaaagttagtcgagaaagtcctcttgccgattaaaatttatgcagttaaggggtgatttaaaaactaggtatagcaaggcatgctttgactaattgttaaagtttttgttttgtaagtttctggtagtgttttgttgtttggggtcttacagctgttgtaatgattaggatgatgtaagcacagagtagatgttttatgcaataaaagaagtgtggttgaaaagcctgctggtccctgccctttttttttttgccaccataattgtacatgtgggcattacactgacactgattctaagcctggaaactgtgtagttccccacacgttttagtatgtgcatagcaaaggaagtgccaatgactttttagtatgtggatatctcttgtcacagaatctttctgagaatcagactttataaaaacatgtttcactgcatcaaaaaaatttagttagccttgttttaaaaatataacaataaacaaaagtttattgttcacaaaagctcatgacagaaaagttgattcttctctaaagctcatgacagaaaagttgattcttctctaagtgaaactaattcacaaggtgaatattttactcttcatccagagttgttttaaggtcagataggcaaaagtgataatttataatatgatctataaccgtaaataattttcatcaataggttggagctaagctcagaatttcagaaagtttgatagaatcttgctattactaaaaattttatgtgatgtttagatttgaaagccaaaagtataaagagatccatttatcatccatcagttcactcattcacaaactcactcacctgttcaaaataaaatgtactgagcttctatcatatttagagcttgatgcttgcttttttagatggataaaaatatagttgtaaaccttaagaagtcgagcacttaaaagctagtatgagagttagactttgacacaaataatcacataaataattagatattggtataaataattatagtgtagtccaatttagtatgaaataggtagaggagaggaagcctgaagttttgtggtcaagactggaaattatcccactggacaaaaaaattcacaaatctaaagggatttggtcatggggcaactgtattgatattggcaaggcaaagcaagatgataggaaatgatcagactagcctctaaaagcaatgatcaagcagtggggcatcaggtcatggcaataataataaaggtcatgagtgcatggagtttaatgggccgaacatatgccaactcttaagcaaggaatcttaatgttactgttagacatctgaatgcacaatgtagaatgagataaaaagcctgagtggtcctctgcaagtgcatagagaaataagaaacaactggtaggaaaagtggcatttacctggtatcttgaaggattttattaagtagcaataaggagaatgatagtcaaggaaaaagtatgagaatatgcaaggtagtaggaaaatgtaaagtgtttgggaaaaataacattctatctcataaaaccacagcagacaagatcaggtgtattgagagtggtatggctgtagatcgtttagggctattataaacactaggaaacagctttcccatatttcgtctttcttcttaggacaaatgtccagaagtaagtatgctgggtcaaatctaaatttcaagtgaccaacttttccatcactgcctcctattttccagcgtagtccttgtagcacctcaactacagtagtttttcttccctactgggacctccaattctttgtaccttcacactgcctctctcattcctttctgctcctcccatgtgcccatgtccccccaagaagcttaaatgccacagtccattattatatccctcacttgcatactcactaaactcccttgtccctctcatgtatagacttcccgaaaaatcttattcctggttaaattccactctgatcatttcatgcttgcattcatgtagctgattgcggttggagaaaaacacactattatactgactgctgttaccctaaacgtatgaccacaaactgcaagtgcaccctatttgttgtccaccaatctctgcacttcctattaggttggtgccaacatagttgctgttttaaaagtaattaaaatcattaaaagtaatggcgaaaactgcaattacgttcccatcaacctaaatataaccatgaatgattattttaagccttttcctgcctcctcaaacctcagatgcttccttcccccctgcttcctactttgttgagcaagtgaattactaaaaagagcccttccctactatgtctacagccccacatatctcttcctacactttgcattattttctgctatagtcaatgaactgtcagtgcgcctgtctaagaccatcccctacttgtatactaaagtatattgtcattcaaggacatcactcttaaaattgtgcctgctttagcttgcattattttccctctctagtgtataattctgatcagcctataagtgtaccataatattttcaggttaaaaaaataaaaatcttggctgggcgtggtggctcacgcctgtaatcccagcactttgggaggcccaggtgggtggatcatgagttcaggagatcgagaccatcctggctaacacagtgaaactccgtcttcactaaaaatacaaaaacaaaattagctgggcgtggtggtgggcgcttgcaatctcagctattcgggaggctgaggcaggagaatggcgtgaacccaggaggcagtttgcagtgagccgaggtccagccattgcactccagcctgggcgaaagagcgagactccgtctcaaaaagtaaataaataaataaataaaaattaaaatcttttaacctatgtcatcctcctgtaagtcaaagttctcctttacagtaaaactccttaaaggttgactactcatggttttcacttgctctgcttccatctgatgttgaatccactctaataatttttttatatctccctttctacactgaaactgctgttgttaaaagtcattgatggcctccatattgccaagtcaaatgttcgcttctccatctttatctctcttggcccattagcaacatttagcttaaagtttctttttggaacactttctttactgcttccagaataacactttattggttctccatctatttcattggctactccttctcagttttctttgatgatttctccttatttttacacattggaattttggaatgtcccagtgctgaattctcagattaattgtctttatctgtgctactgccccgtgtgataacatccagcatcatggtgctatattccatcaatctatcatgctctaccgattagtgccacatttatatctgcagcctggacctctccagacttaactacagtttatccaacacctcttgttgctcagactgaacatttccaaaaccaaattcaattttccccttttgtccttctggaaaactgtctcttcctgtagatttcctcctctaggtcaatgacaactccattctgtcattttcttgtaccagaagcttctaaaagcttgagagactttcactcacagccacatccaattcatcaggaaatcttgtggaatctaccttcaaaatatatctagaatccaatcacttcttaccacatccagtgcaacctccctggtccgagctgctgtcatctctcacatctggaatactcccacctgccatggcctgctacggtctccctaatccactcttccacctctgctctttttcacgcagtgtcagtgatccttttacagaggaagctagatcatgtcacttctctgtttgagagctttcattggccctttatctcagagtaaaatcaaacatccttattctttgtaattcggcccttctcttccatctttttaacttcatgtccttttcttttctcacacactggctccatccacactggctttcttgcttctccttctaaacttgaggcatgctcaggccctagggcttgtgaatctgccctttgctcttcctggtacactcttgtctgagatacattcatagtgcaccctctcacctcctttagggctcaactcaaatgtcgtctctcagaaaagctctctttgaccactttttataaaatagctcccccaatatcagtctgtacatttttattctatcttagttttatttataaacttttcaccttctgacatactatttatttgcttaattgcccatgcccattagaaagcaaacttcataaaagcaggcacttttactttgcttttgaacatgctctctttccagggcctgaatcattcctgcaacacctggttgacatccactgtttttcgttgactggacaaatagcatctatacattcaaattgttgagtcatattatcagactgtgttttacataatttctgtaagggcaagtttcatcacacacttataggcattggatattagttttaatttttgataatttggtgggcaaattacaatagaatatttttgattccttatatattcttccttcatcttcacatttcatgtatttacaattttcaaaaactgttaattttgcagaaggcttcagtagatagacaggtatttatcattgttttagtaatagtatagtgttaacatgtgaatcaacactacagtacaatatctaaatggaaataaggcataacaaaacactttgaaatatctaatttgccaaataaagtggatatctgaacttttattatatgatttgctttttcatatattgcctcctagatatcattatctagcttatttgtaatcacttatttgcttttatcttgagtcagtgtattcagaaggtcgcagttgtgaagaatccactgtagcccttggtaaattaaattttgacatagggaaaaagagaaacattttcaagtgctatagtcattttaattgaaccaaactggttaatcacattttaatattgacagattacaaattgtgaattgtaccctagttataactttctgatttattaaaacatatcagtgtgatggaactggttttgagaacttttcagaaaaaaatgttagtaaaaactgtgaaactacacacattatgtaaatccaaaattatgagtgttctattcaacttatacttttttgttcaatattgtaaaccactctgataagatttacttattataaaagaaaactataaacagtggtatattcagatcttgacacatgcattgaataattatttgatattttttctgacattaatgaaccccttttgaacatattatgcatgagtctttctgctacaggatatctttcattacaaactttcttaggaagtcagctccaagtaaaagtttttggtttaataatgacagttttaaacagatttgttaaggcataatttacatatcataaaatttatccttttaaatatatgattcagtgattttcaaaaaatttttagagttatgcaatccttaaaagttcccttgtgtcaatgtgcagtcatggcccactcctacccatccccacaccccaaccacaggtaaatgatctatcaggcaatatgcagttctcagtgtttttgtagtggatatcagaacttcattcctttgaaattcctttttatatctgaatagttttcaattttatagatgtcatattttgattattaaataaccagtggattgacaggttttgtttattacaaataatgctgctgtgaacatcagttgacaagattgtataaatatatgtttttaactcctttgagtagattcctaagaatggaattgttagatccaaaagtaagtgttggtttaatccattcgtaagctgctaatcttccagagcggccatacaactttatagtctccccagcagtgtatgagagttccaccttcttcactttctcgctggcacctggtacggcagttttaaaaaatgagaatccttctagcaggtgtggaattgtatctcattgtagttttaaattacatttctctaatgaccgatgatggtgaacatcttttcatgtgcttatttgtcctttgtatagcctctttgatagaatatctattcaattcttttgccaatttttaagatgaattaaatccatattttgagttttaagagtcctttatcaattctggtcacaagtgctttgtccaatagatgatttacaaatattttttctcagtttattacttgtccttcattttcttaatggcatcttttgaagaataaaggtttttaattttaatgaagtcaaatttatcattttcccttatggattatgcttttagtgtcttaatctttgcctaatctaaggtcacaaaaattctctcctgttttctactagaagtctttgtaatattagctcttacatctaggtctataatcctatttgagttaatctttgtgtatggtttgaggtaagggccgaaagtcatatttttgcatatggatatctaattgacctggaaacatttgttgaaaagatcatccatttcccaatggtagctttgttaaaaatgaattgatcaaaaatctaaggatttatttctggtctttcaattctgttctgtttgtctatatgtcaatttatgctagtaccaactgtcttgattactgtagctttatagtaagtttgtaacttcaaagtgtaaatcctccaactttgttcttttaaaaaattgttctggctattctagatcctttataattccctctcaagtttagaagcatatttccaacttctacaaaaaaagcctggtggggttttgatagaaatattattgtttctgtagatcaattcttgggaattttcttgttaaccaatattaagtcttcatcataaacatataatgtccatctacttttatattctttaatttctctcagtaatattttattattgtcagtgtacaaattttacacttcttttattaacccattgctaagaattttacactttttgatgatttttgaatagaatttcttattttcatttttgaatttttagttgctattatatagaaatacatttgaattttttttatattgatcatgaattgtgcaaacttgctatattcatttaatagtatctagtctgtcttccttttatagattctttaggtttttctacctaaagaatctgtagtctgtgaatagagttttacttcttcctttctaatttgtatgcctgtaattgctctgatttgtctaagtgtagtgggtagaccttccagtttgataataaatagtagtgaagcaggcagatgcccttgccttagttctgtcttaagtgggggttgttcaatgcttctcttagatgcccttgttgatgaagtttctttctatgctttgtttgttgaattttttaaaatcatgaatatgtattagattttgtcaaatagtttttctgcatctattaggacaatgatatgcttttctgtcctttattctattaatgtgatgtattgtattaattaatttttatattttaaacttgtctcgcattcctgggataaatctcacttggatgtgttgtatcattcttttatatgttgttagatttggtttgctaccgttttgttttctgcatctttcacaaaaagtggtatattttactgctttaatttatatttgatactatagctttttaaaaaaacttttattttaggtttgggggtacgtgtgaaagttacataggtaaacttgtgtcacgggggtttgttgtacagattatttcatcacccaggtattaagcccagtacgcaataggtatcttttctgctcctccctctcctcccacccattgccctcaggtagaccccagtgtctgttgtttccttctttgtgttcatgagttcttatcttttagctcccacttgtaagtgagaacacgtgatatttggttttctgttcctgtgttagtttgccaaggctaatggtctccagctgcatccgtgttcctgcaaaagacatgatctcattctttttatggctgcatagtatgccatggtgtatatgtaccacattttctttatccaatctgttactgataggcatttaggttaattccatatctttgctattatgaatagtgctacagtgaacatttgcttgccagtgtctttatagtagaatgatttatattcctctgggtttatacctagtaatggaattgctgggttgaatggtaagcctgcttttagttcttggagggatcgccacactgtctttcacattggttgaactaatttacattcccacaaacagtgtataaacgttctcttttctccacaacctcgccagcatctgttattttttgatgttttaatagtatccattctgactggtgtgagatggtgtctcattgcggtttttatttgcattctgtaataatcagtgattttgagctttttttttcacatgcttgttggctgcatgtatgtcttcttttgaaaagtatttgttcatgtcttttgcccactttttaatggggttgtttgtttttctcctgcaaattagtttaagttccttatagaagctggatgttagtcctttgtcagatgcatagtttgcaaatattttcttccattttctaggttgtctgtttactctgtcaatagttcctttggctgtgaagaagcttttcaatttaattagatcccacttgtcaatttttgttttgttgcgattgcttttggtatctttatcatgaagtcttcgcctgttcctgtatccaggatggtattgcctagattatcttccagagtttttatagttttgggttttacatttatgtctgtaatccatcttgagttgatttttatataatgtttgttactattttagtaatgattttttggtatatgtttatgaaaagtattgttctatagttttcttttcttgtggtatctttgggtttgaatttatgcaaagagttgggaagtgttcctccacctctagttgatgaaaaaggttgtgtaggattagtattatttcctttcaaaaacatttatagagttcactagggaagacacctgggcctgaattttcctctgtgggaagaatttaattgctaattcaattatttacttattgttctattcagatttttgtttatgagtcttttgtagtgatttagatcttttaatgaatttgtccatttcatctaagttgtccaattttttggcatagagttgttcaaaatattctcttatagttcttttaatttctgaagaattcatagtgatgtctactctttcattcttgagtgtaacaattgtgtcttttcttggttaacatagctacaggtaaaatagttttgttgatcttttcaataagctaacttttggtttcattgattttctctattgttttatgttatctatgtaattgatttctggatctttagtttttccttccttttgcttgcttaggcttttctttcctaggctcttaaagtagaagtttggattatttatttgaaaaatttttttagtatttacattgacagctatattttctttaaaacactgctttaggtatatctcatacattgatgagttgtgtttttattaagttcaaaatgtattctaatttccattataactccatttatctgtgaattatttagagtatgttgtttgttttttatgtatttgtggagtccctaaatttctttatgttgtcagtttctaattgattattgttgtggttgtggacaatacctgaatgatttcaataattttaaatttattgagatgtattctttggtttagcatatattgtgtgtgcatttgaaaataatgtgtatttcgctttgttgggtggagtgctctctgaatgtcaggtctagttgattgtgttgttcaagtcttctatacccctttattttttctgtctagtttttctatcaaatattgagaatacagtattaaaatatacaactataattgtttaattgcctattttgcctttaaattctgtcagttttagctttgggtattttctgtctctgtgtgtaagtatacagctatgattgctatattgtcctgatgtattggccctctgaccattatgaatgatcctctttgtctgtagttacatttattgtttcaaagtatttttgtatgatattaatacagccacatcagctccctgatggttatacagtatagctttttccatccttttattttcacctgtttatgtctgtatctaaagtgtatctcttatagacagcatttggttggatctggtctttgcgtgcagtctgataatctgccttttgattgtagtgtttaagtctagttacagctaattgacatggttggaatctgtcatgttgctgtttgctttctctaactcacatgctttctgaactccatactctgttccaaatcaagtcagctacctccagcaatgaagctgctggtttcaagaccagtgccactattgtaaaatatccatgttgacccagtagggcagtggatggggataatagcttcaggctggaattccgcagactcctactgttaactgacattccatagtttctggtgaatacatgcttctcaatttgctgtttgcccgtggttgatttctagatcctggaattattgtcctgacaatgtgatccagttgtatagctattttcattttttttttgtggagactgtttgtgatccttttactccttcatggtcagaagtctctaacattttgaatttggtaaaatattttgatgaaatgtgggctttctttttttgacaaatgaaaaatgataactgaaaaactccataatcatattttttcttatactttaactagactttaaaaattaagttaaaggtttttggaactataaatttttctcaatactgatagattgtttgtcttatagcagtttaaaaactaggtgataacctaaaagttatataaatcttataaagtctcaggttttttaaatctctactttttacttcctacatttattaatagagtgattttattttattattgcgcttaatcaattttgtcagactctaaatttaccatggaattaaaaatatacagactgttaataagaaaatagtgacaatgtgtaaatttcactttcttgtgaataggtagtgaagggaaggaaaagacagagactatatgttagaatcaggggatctcagaatgtaaaggtatcgtatatctccagttctgtagctgagataattacattggtcactcagctgccaagggattgagctgattcaaacccaagttcacctgattctaaagtcaatgctcttatccaactagtagatgcctcttatcagattagtatgggactttctcattctgatttactgtaacttaatagagcactggggccatgtgccatctgctctgcagggacaaaatctaaaagaaaagagacgagattggactataaggcaatgttggtgcttttctgtaccttcccccacatattcatttttcttgcattccaggacaccctcagtcactagctatttccacaatctgggatttttgtactgtgctttaaatcaggtccttcctccacaagaacagaaacttccaacctataaattccttcatgtttctctatgatgatcaaatcagtcattaccattttgagttaatggaaattctttcctttttctgtagttagaatgaaatattttcagcatttgggagattttttcacttcagacttcatagtcaaatgttagagctattcaaaaaaatggattagacttcatcagtatgctagtgagctctatatgaatggaggtattcaagcacaggttccatgacagggaggttcacttgttgaagactatgataaatgctattgtattttaacaataatggatatgtaagtggtttcttgaggcctaaacataaaactgcttttttacaattgtccctagttatgttattacactcttccttttcacacaaagtagtgcccccctttaaaaaaaccagtcttgtttcaaaacttttcgattgcttttgtttattagtttgattctttttgtttctttaaaacttcatccagtttattttaaagtatgacccttatatccggtgtaaaactcttcacatccctctgcaaactcgaagtgcaagaatggaaggagcagtcttctctatttttgtcccaccttccttcccagcaccagatccttggaacctggagagaggacagaggaggtaaaggtttctgcaagtggctacaaagtacccgttttgactccagcagggagggaagagaggaaatatcccttccatgaatgcagcctccctaaagcatagcctccttcttcttcctatcaatcatctttttagtaggtgggagtgtgtttgtgtatgtacatgcacatgtgtggcagtacagtcatccctcattatcgtgggggattggtttcagaacctcagaagatgctcaagtccgttatataaagtgtcatagtatttgcatataacctacacccattctcctgtatactttaaatcatctctagttacttataatatccaatacaatgcctacacatcacttcatttgcatggattaagtgtagtactccacaggtggaaaattaaaattttattatttggaaccctgtggaaatttttcccaaatattttccatccacagttggttgaatccacagaggtggaacccagagatacagtaggccgactgtatttctggttctgttaactgaccatttttcagaaagcctttcaaggaggtggctatctctaacaggctgggctctctgaactttaaatatgttctttatatatgatgcgattgcttccaactgtaggttttaatcaccatgtacagtttctggcacttaataccgttgtgttttaggagttaaataaaatgagtgttatttgaccatatatgagttagtagcatatttttgtaattgggagagaatatgatattggattctctttggtagaaaattgttgtttttgtcataaagaaactcttctttgctttagcagtcatacctgaaaacactgttgatcaagatggtaaagcttttttgtccatttgtttgtttttgtgattactgttcttcaccataatggtgctgaatgtttaatagaaaaagtcccttgtatttgagagaggaaagtaattggtactatgatattttaggaagttttgttctccatatgaaacagatatgatagaataattttcaacagcttatcattgacaacaggacagaattcatacttagtcctttcttcctatgtacataaagaatcaaatgacttctgcaggtaaagtcttttaccaggacctttgataataaaataagtaaaagcaagaaattgtaatgcaagatatgtatttatatagtacaataattactatttctattatgtatgatttatactttattatgtgctcaacaaatactagaggcagaatatgataaagactgaaatgctatatatatttatcttttaattttttttttacagtctttagtgttgtcacaatctgcacattaacgcatttttatcctttaggactagatcaaaatcagtcatgtgtcctaagtctggctgtcttccttcctgcctgtcttccttcctcccttccttcttgcctgcctgcctttcttccctatttttcctttttatgaagaagagggtaaaattatatctgtgagtttgaaatcaatgattctgttaattaggggttaaattagagctttcacatttcaacataacttgtaatgcccaaatttatccaagaattgttatgattgccaacgtggtaagctgtcaacataactatcttttgggtgaacttttgagtgggagtaaatgtaatgacaggcatattgcttttatgcatccttaagatgcctacaattgctgatttttatagaagtaaagttcacttttcctgatttgagtttgtctaagaaaatcctaacactttctatatagactgctctataaacatgatctaaaaggattatccatttgtaggattaatattcacatatatttgcatttgagatatgtaaggcttttatcctttttcctcacttctaactaaacaggattaataagggaatatcatcaatcatatctattgtgttttgaagcaagatggtatataaaaataatacaacaggacaggagtcatttttcagacattgtgccattataattttagttttgagaagagaatgttgttatagtcaagtcacccaaggccagattaaggggtctagtaacctttttaaagtcataagctagatttataaccccttcatttcttgcatgatgagagatgtgaagtgttcactctattagcctccaaatatgggatctggggcatgaaaagttatatagaaaaatgtcaacttttacacactaagaaaagagtttgtgctagccaagaaattgcacaaaattttggaggcagcaggacaaatgtattggcagtgatatccagacatgatcagtccaggtactatgtttgacttttgtgttgtgatttttccaattaaaacctggtctgaactaaaaggtatttgcagggataaatgacatgaggaaatacagtaggtatgaaggtgcccctgaaataagagtggtatatatgtggcttgcatatgtagtttccccattctcagcccaggtaagatactgttcatctattaaagcaccttgtcctactgaggctggacattgtcctcaatgcagtgctccaggaattcactgccaatccaagagaatgatagagcactatttttttttttctgcatagcaggaataaccagctcagtatttgactcagaaatacctaatggatgttttatcataaatgtattgaacaagatggttgaaaatttataaaattccattggtgttttggggattatagcaagtatcgagacacaaagaaatacatctttagagttacctgtttattttcaaaattctacttaaaagaaacactcatcaaagaaacaaaaaaagtttagcaatggatcgttttcacgttggtgtatactggtttgagctgcttctttttgagatgagtttcatctctgcctgcagttactctttcagctctactccatgttgacatgcagctgtcctttgtcacggcaagaatgtgagtcaggctccatggctcctgcaataaaatcccaccttttcttcctacacacctggaatctagagaatgaagatcccccagtcctccacaaaagagacgtgcatcacttgaatgatgtttttgtgattgggttgtgagctatatcatacagcttctgtcaaaagcatgaaagggctctgggctttcaaactttgagtgagttcgtgtgtcgtttaccgtaactatgcaatcttatgcatctttggattcagttttcttattcgcaaaatggagatcactgtgataatgctctctatgtctaggatttgttttgtggcatgaaattaaatatgtgaaaatttgtgtgcagtttcaaacaaatgccagttaaccttcaaccctacacgctgtgttttctagaacatggcacttaccatatgtggaggcaggacagcagagaagttgacaacattgtctttgaagccaagcacaccagattcacatctcaatttcaccattcactacgtgactcaaggaactttccttgacctttctgagcctcaatttcttcatttgccttgattgaaatggactgttataattaaattgtcaagtgtttaaagcagctgtcatagtcacttgttcccagtaaatagtcaattaatggcagctattataatcaataaatactagttgacttaatgaaagttataatccaagacatgctaaccagactacatttttctcttttaccctcaacatgagtcagataattggaaggctacatatatgaattattttgcattaccccgcagtacacttactgctataggttctcaatataggatatattggcttcttattgatgttcttttgaagtgatggaaatccatgaatgcctttgacttacgaattattatgctgttccttttgttttttgatgtcatagcccatatgacaaactcttaacagaatttaaatattagaataaacatctttcttttgatttattgttgtatcttctttcatgaggcaaaatgtgtcatgtataatgcataacatttccctgtttactttggctgccaggaagctcagagtttttttttttttttatgaaaaccttagccatgtaaaaaattgaaaccttcttatataattgttgcttcctagtcacttttattattggtcttttattctttcatttttatgttactatattccagttctgtatcttcattttcagggtaaacttgcccaagctccttttcaaataaatggatcactgaaaattagaaaactagaaaaatagtgttatttaattctgataagctttgattctacttttgctatcctgcaacattccacattaattttattaaatcagaattaattttgacactcagtaaatgtcctaatcagcaaagcagtgtactgtctattaatcaaaataatgtgtgcattatgaaataacatgctaagatgggtaacactacttttatttaattaatttatttatttgagacagagtctcgctttgttgcccaggtttgagtgcagtggggatctcagctcactgaaacctgtgcctcctgggttcaagtgattctcctgcctcagtctcccaagtagctaggattacaggcatgtaccaccacacctggctaatttttgtatttttggtagagacggggttttgtcatattgaataggctggtgttgaattcctgacctcaagtgatccacccatcttggcctcccaaagtgctgggattacaggtgtgaaccaccccatccagccttaattttaaaaatataattaattctaattaatagttaaccaacctgtggatacagaacatacatatttattgttgtgatatttcacctttaaatgaaaattggtcacaatataaaaataacccttttaaaattaatatagtatttctttttgtgctcatgtataaaatttagcttttaatatgttcttttggagaaaaaatttaaacatttgttcttttctcatatagccttaagtgcacctagttttaattttttatcaacatcctacctcctcaaaactttttctgtgttatcttaaaaacaatgttaaaaactatgttatctcagaaaccagtgaacagaaattcattgtataacattttggtaaacaagcagttaaggattttgaaagggctccatttccattctactactttttgctgagtatatggcctaaggaaactgataaaacagttttaatgagtgaaataaaatgaagttgtatattaacttcattaaaggcaagagagttgacaaaaaaatctggtatgtttgagaagtgttttgtggtccttaatgttggaagaaagaatgaatagcccgtgcttgtttcctaagagataatttcagtcacaaaaactataaccctagctctcccagaatatattggtaataacaaactattaaagtaataatgagaatggtaaagcatatagtctggctgtggattccagccctttggagctgcttggaatataaatcacttctcagtttgcaaatttattcccctcagtgagatactgtatataaaacacaatgtctgatttgaagagtttgggcagaggaatggggagaccctcaatttcttcacttttcttaacctgtcttgcctccattagtggggctatcaacactgtatcacctgatggccttagtctgcacctgttgctgctgtcccagatggcactcatcttggtcttttttcctgaggtctcatcttgacagtgctgatgtggaagacatcccattcctgaagtccattgttgccatgcttgttgaagtagtggaaggctctaacttcttacttggctcctgaaagtgtctaagcttttactttactttttcaagaaggtatagacaagtccttgagatgagagaaaaagctatctaaagagaaacacagagagctacctctaaaagtgctgtgacaagggataccccagaatgatgtcaagccacactgactcttttctctcagacatgatccatttcccatttagagagagactgtggcagtgtttatcttctcttttgtgaggagttttaatttctgtatgtcttagcccagttttctacataaattctatttttctgttggaattctatgttgtctttgtgtaagtagagctttacagcatcagcttgggcagttgagtgttcttggtcatcgtcttctccttaatctttttggaaagagtaagccagggagttttattagggtttatgtatatataattgtcctcatattctatcttttttctgtattattgaggaaaagcagtaacctgatagaacttgtatatatcatcaagaggactgacctaataagcacctactatgtgctttataataatctcgtttaattctcacaaatccttaaaaattaggaatgtgcattttatatgttaaaaaataccagggttcagaggagttaagtggcttgatcaagatcacatgctaattatgaatggagtccatgttcaattttggtgcattttgttggaccccaaagtgcatcctctacttctagggcagcttttggcctccttgagtaaatgacttctccactgctgaatagcctactttgctgctgcacatgacgcctgaggcattcctgttgggtcctttcatttgataaacatgtttacaaatactttttttctcactctgaaagagcctttcttagctgaagcgaaagagtaaaactttcatcatagtaaaatacctagacccaagtaaatatttactcttcatggttacccatcactttacacaaagtaggttcataatatatacacaccaaaaaatgtttatattgaatttaaagaacgcttatatactgttggtgggattgtaaattaattcaaccattgtggaagacagcgtggtgatacctcaaagacttaaaggcagaaatacgatttgacacagcaaccccattactgggtatatacccaaaggaatataaatcattctactatagagatacatgcacatgtatgttcactgtagcacttttcgcaatagcaaagacatagaatcaacctaaatgcccatcgtgatagacaggataaagaaaaggtggcacatatataccatggaatattatacacccatgaaaaagaatgagatcatgttctttgaaggaacgtggatggagctgaaggccattatcttagcaaactaatgcaggaacagaaaaccaaatacctgatgttctcacttatatgtggggctaaattatgagaacacatggacacatagagggaattaacacacactggggcctatcagagggtggaaggtaggaggagggtgaggatcaggaaaaataactaatgatactaggcttaatacctgggtgatgaaatgatgtacacaacaaactgccatgacacacgtttacctatgtaacaaacctgcacatgtacccctgaacttaaaagtataaaaaaagaaaaaaagtgcctgttcatgtccttcacccactttttgatggggttgtttgtttttttcttgtaaatgtgtttgagttcattgtagattctggatattagccctttgtcagatgagtgggttgcgaaaattttctcccattttgtaggttgcctgttcactctgatggtagtttcttttgctgtgcagaagctctttagttgaattagatcccatttgtcaattttggcttttgttgccgttgcttttggtgttttagacatgaagtccttgcccatgcctgtgtcctgaatggtaatgcctaggttttcttctagggtttttatggttttaggtctaaggtttaagtctttaatccatcttgtggggttgaggggggagggatagcattaggagatatacctaatgctaaatgctaaataatgctaaatgggtgcagcacaccagcatggcacatgtatacatatgtaactaacttgcacattgtgcacatgtaccctaaaacttaaagtataataacaataaaataaaaaatttaaaaaaaaaaaattaataaaatttttaaaaagcttatgtatgagtctggatactaaaggtaggatttaatgttaaagaagttcttctccggctctaaatgtatttatttaaaaaaagttttgtttttctttttgcctaaagaaaatctttactgtgagaaatgacaaatcagattttgtttagaaggtctgtgaatttaatagcagttgagctagagttgattatgtggaaatgagcttttttatttgtatatattcatgggtacaagtgcaattttgctacattgatgtactacactgtcatgaagtcagagtcttcagtgcatccataactagagtaatgcactttgtacccaccaagcaacctcccatcattcacccctcctcatccctcataccctttcaagtcttcattgtccaccattccacacactgcttcaatgtgtacacataatttagctcccacttatgaggagaacgtttagtatttgtctttgtgtttgagttgtttcacttaggataatggtctccagttccatccgtgttgctgcaaaagacatgattttattctttttttgtggctgaatagtatttcattgtgtatatataccacattttctttatccagttatccattgatggccacttaggttgatttcatattttgcttttgtgaatagttctgtgataaatagacaagtacagatatctttttgatataatgatttttcttttcctttgggtagataccaagtagtgagactgctgaatcatatggtcattccttctttagttctttgagaaatctccatactgttttccataaaggtggtactaatttacattctcaccaacagtgttttaagttcctttctttccacatcctctccaacatgttactttttgtctttttaatattagtcattctcgttagtgtaagatggtatctaattgtgatattaatttgcattcatctgattattagtgatgttgaacattttttcatatgcttgttggacatttgtcttctttaaaaatatagtctattcattgccctagcccagttttaaatgggattatttgggaattttttgttgttgagttgtttgagttccttatacattctgtccccttttggaaatattttctctttctaaatggattttaaaataaaaaagtttagaggaagagtgtcttatgaaactcttttagccaccgtattgctgaaccattgactttcttgttgacattcactgaagagttggaacactattcctattcaagaaacttttctacaaaaaaattcttaaaaaagaaggaaatggtaacgtaaaaattctctttccaaagtacagtgtaataaagtggtgtgtagtacatagcatcttaataggtaaaaggaattgggttggtatatcttggagaagaaacacttagaaaacttttaccttaccttctatcctacactcaaaaactagtttcattttagtcaaaatttgagaagtcataattcaagagacttctgtattttgctttattataattgggcttcttgtgagaacatcaataattatactgtgtataaaaggttcttcagaacatctaatgattgtgggactaggtgaggtcaattctgtggtaggcatagggaaagcttcttattcatatttttcatctgcctgacatataatacctttgtgatatattatccattttattaaataaacagttattgaaatgtatctcttctttataacttctaagtgttctaaagccacatgactatggattatagctgatggctttagataatatttttgctctagatataaatgtattggtctgtagagcaagttgactttcatgttaccacttaaaaaatttagttcactaaattttgaagattgtcatttgcctactctcggttttttagataagtgtatataattttaactatttgaaatgttattccacctacatgcagtagttaagcacaaaaatcacttagaacacagacaaggtaattcatgaaaaacaaattgctatatcaaaatagtcatagtatctctataaaaatgtgaagtcaaatgtcatctcccactggattgagcctaatgctccttgtgcaaaacctttcttctaagtgttctgtaacacagttgagattctcttcactccatgactgtgttcgtatatagtacctatttgctgtcccatgaacagtgcatactgtctcttgcatctaccctcatttcacaggatgacttcttcccattcttaagatctcaatgtacagaaacccactttcagaataaatcctggattgcaagacagtagtggaggcccctccactttgaatatatagcttcctgtatgtatttactgacttcacagtgttatcatatctttattgaaatttcctatttctctctcttactaaactataagttcctagagaggaagaactgtcttcttgtttactgttaaatagctatttctataatagcttttgctagagaatagctgctcaattaatatttggagaattgaattataccgaacatttagaatgctagaaagcattgagattaacaccattgagtttgatgttagctgtagtttttcatagctgcacttaatcaggttaaggatattcctgctaagctctagatttctcagcttttattatgaaatgttggtctattttgtcaaattctttcactaaatttactgaaatgattctataaacacctcatttcattacacttggctttactgcacttcacagatattgtgctttttataaattaaaagttagtgggaaccctctgttgaccaagtctaccagtgccatttttctaacagcgtgttttcacttaatatctttctcacattctgataattcttgcactatttcaaacttttccattattattatatttattgtggtgatctgtgatcaatgatctttgttgttactattgcaattgttgtggggcaccaaccacatgtaaataagacagagaacttaaatgttacatgtgttctgattgctcctactggccagctattccctctctctctcttcctctccttagcctccctgttccctgaaacaatattgaaattagaccaattagtaacctttcaatgacctctatggcctctaaggcctctaaatgttcaagtgaaagaaagagttgcatgtttctcactttaaatcaaaagctagaaatgatgaagtttagtgaagaaggcacagtgaaagccgagataggctgaaagcttggcctcttgcaccaaagagtaagccaagttgtaaacacaaaggaaaagtattgatgaaaattaaaagtgctatcctagtgaacatatgaattataaggaagccaaacagacttattgctgatatggagaaagttttagtggtctggatagttgatcaaaccagccacaactttccctttagccaaagcctaattcggagcaaggccctaatcctcttcaattctatgaaggctgagagaggtgaggaagctggagaagaaaagtctgaagctagcagaggctggttcatgaggtttaaggaaagaagctgtcttcctaacataaaagtgcaagatgaagcagcaaatgctgatggagaagctgcagcaagttttccagaagatctggctaagattattgatgaaggtagctacactaaacaacagattttcagtgtagatgacacagatttctattggaagaagatgccatctaggactttcatagctagagaagaaaagtcaatgcctgacttcaaagcttcaaaagcctgggtaactcccctgtcaggagctgatgaaggtggtgactttaagttagagccagtgctcatttaccattctgaaaatcccagagcactgaagaattttgctacatctactctgcctctattctagaaatgcaacaatgaagctggataacagtacatctgtttacagcaaggtttactgaaaattttcagcccactgttaagacctactgctcagagaaaaggattcatttcaaaatattactgctcattaacaatgcatctggtcacccaggagctctgctagtgatgtaaaaggagattaatgctgttttcatgcctgctcatacaacatccattctgaagccatggaccaaggagtaattttgactttcaagtcttattatttaagaaatacatttcatgaggctatagttgccacagatagtgattcttctgatggatctgagcaaagtaaattgaaaaccttctggataggatttgctattccaaatcccattaagaacatttgtgtttcatgggaggaggccaaaatatcaacattaacataaggagttcagaagttgactccagcactcatggatgactttgaggggtttaagacattagtggagaaagtgactgcagatgtggtgaaaatagcaagagaactagaattaaaaatagagcctgaagatgtggccaaattacttcaatcttgtaataatatttcaatggatgtggagttgctttttatggatgagcaaaggaaatggtttattgagatggaatctacttctggtgaagatgctatgaacattgttgaaatgacaataacagatataaacttgtacataaacttagttaagaaagcaatggcagagtttgagaggattgacttcaatttcaaaagaagttctactgtcagtcaaatgctatcaaacagcatcacatgctacggagataccttttgtgaaaagaggagtccattgatgcagcaaacttcattcttgtcttattttatgaaattgccacaaccaccccaactttcagcaaccaccgtcctgatcactcagcaaccatcacactgaagaaagattctctaccaggaaaaagagtatgattctgaagactcagataatcgttagtatgttttagcaataaagaatttttaaattaaggtatctatgttgttttttaggcataatgttatttcacacttaataaattactgtagagtgtaaacataacttttatacatagtgcaaaaccagaaaatctgtgtaactcattttattatgttagctttattgtggtagactagaactgaacctgcaatgtttctgaggtatgcctatctatggttttctctctttgttcaagtaatatggctaattacattgattaattttcagatgttaaataaatcttacattcctaggacaaacatctctttggtaatgatatataatcctttttacataatgctcaatttgatttgctaatttatttttacagttttagtctctgttttcaagtggtattggtctgcagttctcttgtgttatctttgtttggatttggaatcaggataattctggcttaataaaataaattgggaagttttttctaatactctactctctgaaagagtttctggatgatagttactattttttcctgaaatgtttaatataattccccattgaagctatctgggtccaatgttttccttttgggaaggttttaattacaaactgaaatttttaaatttaatataaaactactcaatttttaaaaatgttcttcatgtgatatttaggaatttcccctttcatttaggtgcaaaatttattggcacaaagttgtttgtaatatcttcttcatatcctgcaatttccttattttccttttactgtccataaaatctgtagtgaggtggtctctttcattcctgatattggtaattttctttcctctctccctctttctcttcctcccctcccttcctctctccctcccttctttcattcttctttttttcttcgttatttctttccatcttttcttttcctttatcccttccttttctttctttctccttcccaagatataagctatgcatacactttaatctctagctgcctttttagtctggtgagcctagcagctcaaaagacaaatcttaagagctcctcttagtatacccgtatgggaagagcagagttgatttttctctaggcttctattcagctaaactgtgtccatgccctgttgccttttcaaaaataaggattcccttgagaagaaagaaggcactagttaggaagaagaatagaactttggtttacttcacaactctaaccaacacttccacctcctgtataatgatccatttgtgtgctctttttggatgcttcagtcaagagcccccactcctgagaatggagtgatgaatacgagtaacaccccttctttgaagatcttactgtttatagaccagtgtacatagctctctgtctagtattctaaatcctcttctctctggtcttcccaactttccaatgttctatttcactgtttccatcctcacctctccaggtgagatggtttactattttgccaacatacttcgtggacttatgttactataccttcacatttgtaggaccatgccactcctcaatttccccaatttctagtttctctacattttctaggagaactaaagcccagagaggtggcagaagttatcaatgacaaacattttatttaagagaatgagaaaagaagacaaatgtagggtttttctttcctagctctaagagtttgattttagtctgatgagaaataggatgccttttaggttcctgggaaggtaactcttaggaagaaaatgtggtctgggaaagataaactcaatatctttaaatagtaggatagaagatgaaacttgtggtaagtacaagagtaaagaggactgaggtattcaggttagttcaggggttgtgagacaaagagaaacgtatgcatttaaagacattatgaagaaaacaagtgacaaacacattcaagaccttaggaataaagaactggcaggttacacacacacacacacaaaagtgtaggcaacaccttaaaattctttacttatattaccctaaattgtatcattgtttggtatagtaaatatttatgtaattttatttatttttacaaatattttttgaatactactcttttccggcatcactctagacactggggccacaaaagtaaactgtttatttaatgaattgacatgttctcatcatcaaaatggatatgtcaaaattttattaaggcttttagaaaaaattgattctgaatagttatgtttaaaagatgaagtaataatcgtgatttgggggatattaagaaatatcttccatgtttgtctgtggataactaaattcagcagacgtgaagtcagtaaatatttgtgtctactggacaaaaattattgctttaaactgcatcaaacatattttaaggttaatattttatggagtaatttagatagtgctactctcaaacattatacttgccaaaggacagaataaagaaaataaatgctttctaaaccaaagagtatcttattttctacttaaaaaaatttttaattcctgtggttcattaggaattctacaactcttaattgaatgtatcaatataattgattgaatgtatcagatttaaaaaaaaaattaaaatttttttgagacactgctctgaactgttttttgaatcaaagtaagcagaggttctcaaattccaattcttttgtatgcatgtttggaaaggaaaattgtaaaaattcttaggcatagacatttacaatattattggatgaaagcaaagctagttattccactgtgatttgaaaagtaaactttaggttagattttaaatatttggtagttcaaaattgtcatctcccattaaattattattactgcagtccttatgaaataaaggcactgttcctttcgctagccatcacagtttattttttataattgtaaaggattaagtcaaattaaaaaaactgaggcaatgtcaaattaacaaaatagaggtagaaaaacatacttttaatattgttgtattttaacatacagttaatattttttaatagtctttaagtctcactcttcaattaaatattcattcaaaaacattgattgagtgttcatcatgtatcagtagttctgcttagcgtgaggcatacagcgatgaaaaaagctaaagggtctgtgcacaatggtgctttcgttctggtggtctcagcaccctggtctgacttgagcaagattcctattaggttggtttagccagaatccctccttactgctgatgtttcccttcagtgattttctattcactgaccaccctgaccctgatccttggctatgaattcccacttgcctatgctgtattcagaattgagcctgattctttattgatgtttcttttctctctactgcaattgtcataaattaaatctgttattattattattttttttaccatgttaactactatccagctctggtttttctttgacaaagaaaataaatcagctatagaatagaaataagaggttgatgcatagtctattttagatagggtggccaaaactcctactgagaggtatttggtcagtttaagcagaattctccttacccctaatatttcctttttactagtttctcatgtattgacctgcactctgctttttggctgtaaattttcactcatcgctgctgtttttggagtttggaatagggtatttgccttataccccactgcaagaccctgttgcagtggtccctatgcctgtcacaatggtcctaagtaaagtctttcttaccatgctttaacacgtgtcattgaataattttttcattaacactactcagaatttcgggtgaacaattgtagaatctccatgatatcagtagcctaaagaaaacatagaaaattttgggagttctagattcttggcatggcttggtataggtgaccaggtcaggatgggggagagagctttcatagagtagcatagccatcactgtggctctgaatacccattcacttatctaacagatagagtgagaagtggggctggcatagaagcagttcttccctcgtcattaccagcttcatatccttgccagaagtttctttgccaggagataattctgttaccatgggctcctagaagtgttctttggcagccctgggtgaatctgatttcatgcttatgcttttccacagcttgtacttgtctatgattttgaaaattaactctgaatttgtaataagtggtacatattttgcatattattttaaccttacagggacttggacaccaattatcttttatagttttgttaatcaatattaacaaaacataaaatttttgccttgcaaaatgtacttgttcttcctctcgtagagccatatgtgagtggaaagatcttgaattgttcctgctcttcttgacagaagaaaataaaagtatgtcttccacaactcttttcttacggtaaccattcttgtttgaggctatcaaaattgcagcaggtgatttcttttctagttgaagtacaatgcagcataaatattctcttctttcacacaaaggagtttaaatcagagtgggcttgctttctaaatctaagggttgaaggccgagggataacgtgtgtagtatatttgttgtgctgtgaatactgtagcattccagggggtgagagtctaactttgcaatacatatttgtttttttaattaactaatattttcagatacattgagacccttaaattttttgtttttatttttattattttattttatttatttatttttattttttgagatggagactcgctttgtcacccaggctggagtgcagtggcgcactctcagctcactgcaacctccgcctcctgggttcaagggattctcgcctcagcctcccgagtagctggtactacaggtgcatgccatcacgcctggctaattattgtatttttagtagagacggggtttctccccgttggccaggctggtctcgaactcctggcctcaagtgatcctcctgccttggcctcccaaagtgctgggattacaggtgtgagccaccgcacccggcctacccttagaattgtagtcattttattaatacaatgcagaaaattagtcataagaaaaatataattagcatttgaccttaaaactcataaaacagattgtgaataacatcatccctttttacttttattttaaaatttcaaaaaataaaaaaaagtttcaaggttttgatatttttattctgaatttttaaaaaatcagtagggaaaaataatcctagcatttcttgttggggaggggacatatgtgtcccctctcactgcagtactgcctctagggctccctgcttacacccttttttttcccttatccttctcttaaggtggaagtatgttaatttgactagtcaatatctaagaaaattgttgagaaccactgcatgctaaaaggcagggcccatgctctgttccttttttttcccttcttcatgcacagaatgagtaggttagcctaaacgtggctgtccttgtcacttgtccctctccacaatcaagcctaaacctaacagactgttaaacaccaagagtctggtttgagggtgctgatcagaactcagtcctgcttttaagatatacatatgtatatatatatacacacacatatatataagatatacatatatatatatacttttttatatgtctattcttttttttattatactttaagttctagggtgcatgtgcacaacgtgcaggtttgttacatatgtatacatgtgccatgttggtgtgctgcacccattaactcgtcatttacattaggtatatctcctaatgctttccctccccgctccccccaccccacaacaggccccggtgtgtgatgttccccttcctgtgtccaagtgctctcattgttcaattcccacctatgaggtgtttggttttttattcttgcgatagtttgctgagaatactttttaaagagaatgagcccccttggtttaatccagcaagcattgtctatctcgctggattaacagataagcatgcaacccaatcaaagctataagacacaagagaaatttttctggggcttctgggaaaaactagtttatatctttcttctactggatttgtgagtgtgaagaggtgagaataacctttttgctgccaatgagatacaccatgaggatgaggcttactgacaggggaaaggacagctgagatatgcagaggaaacaaatcttgatgagattatttgaaactctgaatcaaaccatagctgaagaaagcaccagcactggaatcttcatttataggtcctacgtatttcctgtctttctttaagtcaggttgaggtctatttctgtcacttgcaacatacaggacgctgttacaggggaatgtaggagggttagattgtgcactccatcatgggttatgatatggctggtgagggattattggtttctggctcaactaataatgatgggatattttgtttcctatttggttattattcccaagcttatcactcttggataccttatatgggagagagatgggagagtcaaagtgaatagcagggcagattcagtattcctggttgtaaaactgtgtaggtggatcagacatccatgctttatcatgaataacctggcccaaggtttttaaaatttttcgatggaaacaatttagttgacagtattcaaattttttttaatggctgtacaatatattatttcatgtaatgaagtcatatgtgccagagtggaagtggttgaactttactttagtttttcgtattcctttcagattcctatagttctatgctgtagaataatatttgctaacgaatacacctcagaactccaggctcacaaacacttcatgagaaaaagattccatggccaaataagtctgtgaaatgctgcatatgaggtcaccttctgaccactcatagggtactttagtatattaaaaactttggcaaatagtaaagaagcttatttatttttccttagttcatttgaccatgaattctcttccctcttagccctccaccttttgttttccttgtaataccaagtggaggagagtgggttaaataagaatgctactcttaggttggtacaaaagtcattgcagtttttgccattaaaagcaataacaaaaactacaattacttttgcaccaacctaataaaatgataacattctctctcattgaaaacctgatattttctaatttgtagttatagttattcagcagaatggcttattccttttgttcaaatacagttgaacattagaggctctattctttttagttactcttgtttatgcatacttaatccaattctgtccactaacaattctacttgaactctggtttcatacatgaaagaaaagtcatctttagtcgagcaaaggaaacaaggcaaatgcaatattaaagttacatacaggttgcaatcagggtgcggtggtgcacatctgtagttagtctcagatacttgggaggctgaagcaggaggattctttgagcccaggagttagaggcaagcctgggaaacatagtgacaccccatctcttaaaaatgtgttacatatgggtttcaatattccatgggatcagagggcttttactgtttttgaatgaaaggtcgaactggtgatgggaagtaacactggggaagtgaggcttgacctgtcttgagggttgaatgtgcacctgtcaccgaagaggctgctgggagtattgaaaatgagaggacctgtgactgaaggcttcaaggtatgagatattctcttgcctctgagggacaaagataacaatagttggattgatggattttatgcagatttgtatttttaggaaagtcactcttgtggtaggttggaagagggattggaatgaatgagcaagatgttaaaagaggtagtatcaattgtggccatggactaaataacaggagtgaggaagaaggaagaacaaaagatgacttggcagttgtcagtgaatggagattgaggtggctaagaagtggattatttgaccttaagggtttaaagtggaataatatgataaaagcaacttagtatttattgagctcctatttgtgctaggtatggtgctaagcacaatggggaagattactattctctagaatctcagcgttttgagaaaaaaatactgaaatactgtgcatgctacagtggatatttgttaggggttttttggctgctcacattctaccccctttgtagcattcctcattgaatgttggtagttattcctgttatggaagctaaaggtggccagatattccctctccttcttcacttcctggcaactagagtttctttaggggcctaggcttagtcaactgatgctcttgagcagattcagaatgtgaagttactgatgggaaggcattgagtagttagagatcatttgtggattaagagtgcaaccacccagtatccttttagtaaattccttttctgaccaagcttcacctgacagatataaacacaggcgttaatgaattcaaggcagaacataaaacttgatttaggagaataagaaagggagaactttaaagcttgctgttagaattgaaggaaattcttattgtccaacttcctctcaatatgcactggagggagccttctcaagggggaggcttataacattccctcctctgagaacttagattttataggttctctgaacttctctcttaagatgttaagcatttagtgctttgtattaggacttctgtctttgatgttggtgcttcaaattttcattaactaaatattaatcttttacaagaaccctctacctgtttgttgagattaatttaacagccagtaataggtataggtattatttatcttagagatgaataaaaattgtgataaaccaaatgtattaaaatcataaaatacttcatgagttatggcaacagattgctattgtgtttattatgttaatgtgaagtgcttttactatattgtgtaagaataaaaaagaacaagagaagatattgataagcttaaggagtaatctttagaatatgatagatgaaaagctggaccacaaatggctagaagagtggattggcacagttatcggtgtaattatcagggcacttagcaacattttaattagtgggaatttatgatggcttaagttgtttttgctgtccagtgtttttaaaagtggttgcctacagctttgacctcccccacattttgctttgttaagaactcttcagataagcataatttcccaatcagaggcagggtgataaaataaaatgagtataagattgagttgggaatgctgggacttagtcttgagtctgctacttcctgtaatcatctctgagctttagttttctcgattacactcaaatgaaccctctttatttgctttagggcattattgggaagatttaattaacaccagctataaaatatcactctggtcactctatatccccctcacatagcctgttaattcctacagttcttattgtacctgacctattactgattttttcccatcctgagttagaatggaagctccatggacacagggactttacacattttgttaacttcttttttttcaaaagcacatggcagtgcctgccacagacaatgtgctgaatacaattcagataataaggaatgaaaatattgctttttttgtttttttattatgaatgcctttcttgggaggcttgttacagattggggttagtcccaaagtgttggatttgaggaagccttctcatatttgattgatgatcttagtttgtttgtttcccattgtaccatggttattacacattatctcaagacaagacaagtggcattctcctaaaattttcattcaagctacttgctgtaactactgttgtaaatatgtatctcaatatcatgtattttttatgtacatttgctaatattgatgctttatagaggagtgtttcccttatcaatagaggatgtatagaaattttggcttaaacctaagcataaattttactttgcccaacacaagtcataaataaagctacatcttaaatagaatctaatgaattgttaatgctcagtatttatcccttcattaaaccaaacctattcttactgtaaccattttaaatttctcccctttaccatagctgttatttatccagttattgtatgtggagaaatggtccttcacacaatatcaaaacaatatataagtctaaagcacttcctagagttatttttgctaagtactgcttgtctgtacatgcttttttgtaagataatttacttacataagaatgaagactttctattttgaggtttgccagtcatcacactattctaatcatcactaccaaaaccatacatcagcattaatctactttggcattatactgtccaaaggaccttttcatagaactgtagactttcagagttggaagttgacttgaagaatctagaatgcttaattaccatctacaaacttaattcttttcctgagatttttatctaatttttttgtttacacacagattttattgtttacaggcagatggctgaagaaatcttgcttatttacagttttctacctgtttaactaagtgcttaatataaacatatatgataattgagaaaaatggcctactatatcatatgcaggtaatttcatgacaaggtcaataaaataagaggccaccagctaatatttaggaatattttagagtataaaaattttgcaaaaagaatccagcagggcagaaaattccttatattgtctgaatcagtaagtttctcctctactaagaaagtggaattgtttcttgagatggagcacacctcgcctggaaacgtgtatgcatcctaacaagaaagggaacgtgtaccaacttaatcagtccagactgtctggttttcagtgttctcaaaggcattcatacttactgttaggaaatgtttaaaaatgctgggggatgtttttatgcttgttccaatgattaaccacaggcatttagtgtgtgagatgctatccatcctgcaatataaaagattgtatttttcctgcaagaattttaaattcctcaccagacatttgtgtaggagagaacctgtttatattaattggagcatagagactaatttgattttacatataaacacacacgcacattttttggcagttgtagtatacactgattttccaggagtgctactattgtacatattgataaaagattgaggattgtatttctttgtagtttaaaatttcccagagttactcagttgtatcacatcagtaatgtgatcatgatatttttgtcaagaatctttcactgccctccttctctgcatgtgtagctgttgtactcacggtgattggttcaattgtttcaatacttcagaatctctaagtgtcatcatgcctgaatgctaatatagagaaattaagattattttattgtactacttttatttaggcattacacagctaaggtattatattgattcaaaaatttatatgggtaagttacgtcatttataaaatttaggctaataaggggagcactatgaaatagttgttatttaaaagatctttgtgtcaatacagtgactttgaaactagtgtgcattggagtctctagaaggtcttgttaagatccgtattgctgcccctagcaccaccacccccaacagtttctacttcagtaggcttgggaaggggggccgattgtttgcatggctgataagttccctggtaaagtggatgctactgatccagggaccacactctgaaagaactagtataatatgttagagaacccgattagagctaggtaaccctgatgactagttgggcagcattttacatccacattgagttcacatctatgtggtttcaaagatatgaattagatctgaattttcttgagttaatttgaataaatgcataagtttaatgtgttgaaaataatctaaatataatttactttgaacagtcagcacacacatatttgttagcaaattcttctgttttttttttctcttaacctgtttattattattatactttaagttttagggtacatgtgcacaatgtgcaggtttgttacatatgtatacatgtgccatgttggtgtgctgcacccattaactcgtcatttagcattaggtatatctcctaatgctttccctcccccattcccccacccacaacagtccccagagtgtgatgttccccttcctgtgtccatggattctcattgttcaattcccacctatgagtgagaacatgcagtgtttggttttttgtccttggaatagtttgctgagaatgatggcttccggtttcatccatctccctgcaaaggaaatgaactcttcattttttatggctgcatagtgttccatggtgtatatgtgcctcattttcttaatccagtctatcattgttggacatttgggttggttccaagtctttgctattgtgaatagtgccgcaataaacatacatgtgcatgtgtctgtatagcagcatgatttataatcctttggatatatacccagtaatgggatggctgggtcaaatggtatttctagttctagatccctgaggaatcgccacactgacttccacaatggttgaactagtttacagtcccaccaacagtgtaaaagtgttcctatttctccacatccactccagcacctgttgtttcctgacttcttagtgatcaccattctaactggtgtgagatggtatctcattgtggttttgatttgcatttctctgatggccagtgatggtgagcattttttcatgtgttttttggctgcataaatgtcttcttttgagaagtgtctgttcataacctttgcccacattttgatggggttgtttgtttttttcttgtaaatttgtttgagttcattgtagattctggatattagccctttgtcagatgagtaggttgcaaaaattttctcccattttgtaggttgcctgtttactctgatggtagtttctttttttgtgcagaagctctttagtttaattagatcccatttgtcaattttgtcttttgttgccattgcttttgtgaagtccttgcccatgcctatgtcctcaatcgtattgcctaggttttcttctgggtttttatggttttaggtctaacatgtaagtctttcatccatcttgaattaatttttgtataaggtgtaaggaagggatccagtttcagctttctacatatggctagccagttttcccagcaccatttattaaatagggaatcctttccccattgcttgtttttgtcaggtttgtcaaagatcagatggttgtagatatgcggcattatttctgagggctctgttctgttccattggtctatatctctgttttggtaccagtaccatgctgttttggttactgtagccttgttgtatagtttgaagtcaggtagcatgacgcctccggctttgttcttttggcttaggattgacttggcgatgcgggctcttttttggttccatatgaactttaaagtagttttttccaattctgtgaagaaaggcattggtagcttgatggggataccattgaatctataaattaccttgggcagtgtggccattttcacgatattgattcttcctacccatgagcatggaatgttcttccatttgtttgtatcctcttttatttccttgagcagtggtttgtagttctccttgaagaggtccttcacatcccttgtaagctggattccgaggtattttattctcttcgaagcaattctgactgggagttcactcatgatttggctctctgtttgtctgttattcgtgtataagaatgcttgtgatttttgtacattgattttgtatcctgagactttgctgaagttgcttatcagcttaaggagatttggggctgagacaatggggttttctagatatacagtcatgtcatctgcaaacagggacaatttgacttcctcttttcctaattgaataccctttatttccttctcctgcctaattgccctggccagaacttccaacactgtgttgaataggagtggtgagagagggcatccctgtcttgtgtcagttttcaaagggaatgcttccagtttttgcccattcagtatgatattggctgtgggtttttcatagatagctcttattattttgagatacatcccatcaatacctaatttatggagagtttttagcatgaagggttgttgaattttgtcaaaggccttttctgcatctattgagataatcatgtggtttttgtctttggttctgtttatatgctggattacatttattgattttcatatgttgacccagccttgcatcccagggatgaagcccacttgatcatggtggataagctttttgatgtgctgctggattcggtttgccagtattttattgaggatttttgcatcaatgttcatcaaggatattgcaaattcgtctgttaaagtaatttcctgcacacagatttttttttttaatgaagaagttcacaattcttttggaaaataagtagaccaaatcgggcatcatgtgtccaatttggctatggagttgtcttgttgactttttccaggactgagaaaaaaaatggcctgcatcaagtggtatcccaaaaagctttttgagctctttcatcaccgtatcagcttcataatgaatgactaataacgatagtgccgaaacaaaggaattaccctaatgaggagtcttgctaccaccatgctttgctgaggtggacaatgaaaacttgagcagaaactataatttatctgatcatttttaggccataaaaatacgtcaagtcacttctggtcacatgaaaaaatagtctcagtaatgatatgcctagttgaatgaaataaagtatctatcttcatttaaggtgaaaggttttctaataggtcagcttggatctgtttgtgcggactgtccatggcaaaataaaaaagtgcaagtgcagtcaccatctgttcttttttcttggctagtacctatttacagggctgcttcatgtttgcttgactggatgtggagtgggaagaaaaaggtaagggcaggaaagttatcccttgattattctggttttgccatggtgtttaaccactggcattgcagggctttagcagacttaaatggagcacatttgaaggttactggctctcgaactcttcttctgcaagtcttactttgatgggcctccagctcactgtgaaacatgaggcaagttgtcaccttttttgcttggggcttcagtagaaactgagatggtaaatgcttcattgcaacaatctgttccagtaaaatgtagtggcattgttcactgagcagaaaaaagattttgtggattagtggtgatcacagaatcaaggtgctggaagttaaactgaacaaatcatgaacaacaaagaaaacaaaacaaaagcttcaaggacatatgcaaatgagacaggaatttaatctttgttaggacagcagacttctagcgtgcacttatcaatgtttttcagtcatcccctacacatatgtgcacataaacacacacatgaacacattgaagatatttccttcaggtgcatgtaaaatatgctgcttggattgaaattcaaatgggactgatcaatcaaataacttgagacctcacagtaatgttcactcttaaccttagacacctatgcagtcatgttggtagcgggttacaatgttacctcagcaccacagtttgtttctgtacttgagttcttacgtacagaagatagaactgatttaaatagcatagtatatatcattttctggacttttaaaatttattcgagacctcttgatgaaatggacatattatatatttctgccacctggattttcctggataatttgatggaatattttaagtttcagtaaatcagaacaataaacaaactcagataaaaaaaaaaagaaaatgtgtctgtctttttgctgctatggaaccagtgcccagcagaagttctagctcatgtttggcactgaatggtgaatgagagaaaaaggaaaaaaggaaagcagaggtgcttggaggaaagcagtgcagagcagaagtagtaagaaagacaaagccgtggaggcagtaggagagaggggcagctcagagctgcatgggaagcggtactgcacaactctgagcatcctcagtttgcttctctttcggtgttcttggtaccatcaaaagtttaagcaactagagtataggttatgcaagtttgcattgacatgtgagctcaggtccctgattatggcttgaaacaatagcagaattcttactggtaaaagtatataataaatttcagattaatttttataaaaaaattaacattttaaaaaaggcttaaagagctacttacacagttaagtaaggtacagcattttctgatgatgccagttaataacagaaatagatctggggagtgtgcgtagttttgtcttttcatatgtccacatacatactaatactttatgcatttgtatagttaaaatatttttttttttttttttttttgagacggagtctcgctctgtcgcccaggctggagtgcagtggcgggatctcggctcactgcaagctccgcctcccgggttcacgccattctcctgcctcagcctcccaagtagctgggactacaggcgcccgccactacgcccggctaatttttttgtatttttagtagagacagggtttcaccgtgttagccgggatggtctcgatctcctgacttcgtgatccgcccgcctcggcctcccaaagtgctgggattacaggcgtgagccaccgcgcccggccctagttaaaatatttttaataaaaagaaaaatatctttcaagcatgtatttccatagcattggtcatctaaatgagactcagaacccaactttcacttacttcaatgggaattacagaatacaggcttaagttatttgtaaattagatttctcagaaggaaagaacttgtatatggtgattcacgtactttgatattctctattgtttcagaaaccgatacaacaaacagtgccagccgtaaatagctgcttttttccctttatagtcagtatacattaatttttgcaaatgtgagaaattctttttttttttctttgtgtcttttttatacatagtgaaaagctaccaggtcatacagtgatattcatgtaacatctctctgatgaagaaattataatttccaaagcatggctctttggaaatttgaaaaagaaaacaatagccttaaaaggaacaagcctgatttgatcttaaccagtctttatttaatcaaactgcagggaattttcattgccctagtaatgttggtttttttttttatgaaaacatttttgaggactagcttgatgtcattggtatattgtttcctactgtgagccaataaattcagtttcatgggcaaatgcttacattttggcctctgggctaactgaggcacatgacatgaggtggagtcataaattggccagccctgaattctattcatggaagatttcatagcttattttttcagttggaaactttctagctcaatgtggcactttatgtctccatttcttccattcttttcctttgtccattctctctttctctctggttagtaaattttgttggtgtcacagccttttgaaaatgtgatatgtgcttgatggtgcttttgtttcctttggtattgaataaaagagaaggcagttagcagtaggagtaattaaagataataccagtgatgatgatgatgatgattaaaaagccaacatttattgagtgccatttactgtgtgccaggttctatgctcagaaattaatatatttcttttatttaatcttgacagcaacctaaaaataattttagctagcacattttatgttgtagcattataaatgctttacatggatgatccaagttggtgtaattgagtttggtataatagctgaagtctagtccttaaaaaaatttaaatttaaatgctacatatactatagaggggtcaaaattcactctgattctcttcagttattagggcagccctatgtagtagttattattctcaagcctattttagtaatatgaaggtgagacagagagatattcagaaaattatccagtgttgaatagctagtaggtaatgtaaccaacattcaaatatgggtctttttcacatctgattttatgaatactaggactttatgatttagtagaattatagaaatagaagtagaaataaaggtaaaaatgccaaagagtgaatgtttagtgtctctcagaaaatgtggaaaataagcctgtatggcataaaaatcagacaaagatactttctcctttcaacttgaaatgttgttgacaatatttgaactacaaacaccctcctttggtgaaggagtataggaagaggtaatgaggtgagggaggttattcttatagcctctgctcatttttttcactattcatgatacagaatgaatttttccatggagctgttattttgtgttattttgcccgctcgtcctccctccctcccttccttccttccttctttcctttctctttctctctctctctgtctctttctttctttctctgtttcatttttggtaaagttgagttaattatgttttcatttgcttttcttttttttggtatattttttctgggtcagcctagatgtttgggaaggatacttccacagttagataagctatcattttgtgatgccttttattcacaggtttattacaaggtttgacaagactatcctaagaagatttagaaggatttcctgggttttgtttgtgtgtgtgtgtgtgtgtgtgtgtgtgtgtgtgtgtatgtgtatgatgtgatcctgtagtggtacaattctgttaatctccaatacttattattttaaatttaaacgtatatctttaaatatagagaagaatcaattttaaatttgtaggctagagtaaaaggatattgctttagtatgtcttgtggtctcagtttccccagaggaaaatagagtctgaaccaaataatctctatagtacctttccacaccaacaccataacttatgtttgtatctgctaaaaacggaatcacagtagattaagacaactctgtagtgttagtttttaaataaaaaagatcatttagattttatccatcaaactgcactaaattaaaccaatttggaactctgctgaaagtgaatacctttgttggtagatgaaaattggctggcatgcacagtcattagcagtgggtgatagtttttttggatataatgtggaaagaacagggagctgttttggaatgcctttgaagttttttctttcagttctaaatatctgagattcttcacaattttcacagcagaatggtccataacccaacatttctgttgggttctaaaacatcgcatatactttacaattttggagtttcgggatatgtgtaaatcagacttcaacaagggaaacataagttaaaagaataattcaaaggtaattctaaactaccagtctttaaaatctgctttcaacacaagaacaaaaaaaaatctaaatgataagactaagcaaatgatgtgattttgtttattgattagaaacatgtgctccaaaatggtttaaaataaagaagaaaggagtgagaaaaggaagggagaatttaagacataaaatcaaaagttactgagcacacccaatgtgccaagcatgagtgttagaatcttgaaatgttaggaaagccaaagacttgcaaattaaaagaagtttcactgagcctatcctgtagcactaaaatgttaaaaatgcagcttgtcatcataaggcatgactgggatgtgggaaaatagcagtaacgccagggttgtgaaacaagatcacatagttaaggagataaagccagagctccaagaagtttgtgttctagccccataatgtcaaaaagttgaccaatgtttgtgctcatcagaaacatccatatgacaggctatggatgaaactctgaaacgcaagcctgtttaaacagtttaggcacagttcaaagggagacatttgatattaattagttaattaattaattaattcagaaatcacttattatctgaaatgcacagaagcctagtagggaaatgtgtcatggacataagaaactataatacatagtagaaagtgagccatgccataggaaagtatagatagatttatggttgttcagagggaaagagcagagagcaccagtgaaaataaggttgaaaatatagcctttgagatgggctttacagggtaggcatgtgtgccttatagaagggatcccttagtctccaggcctacaatagcatcatccttactgggaagtgtgaggacctttacttgttggtggtctacagcctgtttcttctattcctctttacttgtggcacacattgccatcagcaaaaagggctcctcatgaactgagctggtaatcaggaaggtcactggaaagtgtcagaatttggcaagaatgggaagtagagggtccggtgtgtttacagtctggaaaatctctcagtagattctgatacggtcttatgtggccatgtcccagcttcatctgcttggaaatgattgctcatagatgacatgagatattaggacatcaaaactaagtgcaacattatctaggaataatgaggaacatgaaaatttataaagggaaatataataaacagtgatatttaaaatatgaatagagtatgtgtgtttgtgtgtgtgtgtgtgtgtgtgtaagtgaaaaaaaagttctcaaagtaaacattttcccagtggccgtccttttgaacttaaccaacttgtaagtgtaattctggagtttaatgtatagattaaaatgacaaaacaaaagattttgtgcaggtttactatgtatcaggcatttgtctatgtggtctatatatatatatatattatctcacttaaaaaacacagaaatcccatatggtggtgatgattattttcccttcattgaagatgaggaaatttaaccttaactattttaaaaaattttctggggatcacataccttgttagatgaggagctgggattctaatcaaagcaggccattccagagttcatgctctttattctctaccagagaaggctgcttaatcattgaagggcacataaacttaatatttaatcatttgaactcaacagtccacatgtgtaatgtaggtaagttaattaaccaaatgacaatattagcaagtttgttaattgttctctccatttccatttacaaagcaaattttcaatctgaatacatgctctttgcttcaaagcaaatagatatctgtcctcagttcttaaatctgacattttagacacagaatacttagtctcagtcaaggtatgttgtagtagccactcctgaccaaaacaggagactgcactcaatttaacaaatgtttaatggcagtaaaatttatctccatcctctgacctgattttatttggggtaaacagcatgcctttatgatatcaatggctaagataagtttatctttgtcctatgttaattgaaccttgtgagagctttgacttcactggtatgctgttctaacagagctgagtggtccacaatctcttctaggcaggagatgtggtaattatgcatgcttttcatctggccagcattttaagatactacaaaataaccctgggaaaccattgctgaccactttgctttgtaattaatatattctggctattatatttaaaatcttaatataatgatgaaagctgagatggtgaaaacacaatgccatccctatgatttaagtttaaatgaatccaaaaaagtgtacttggcatttttatcttgcatattagcattttaagtagtgataaatactgaatattcatggctcagcatgttacctcatttctatcataactaattgcctaatgagaattggtgaaattctcttctgatgccaaagtaccttgacaatatttaagtatcatgaaaaataattttaaatgtcatgattgagggttaaagaacatacttctaggaagcatgtgcggttttatgccaacacactaatctttaaaacagcccaagtatttttaagcttcaataatggaaaaaacaacaatatttggcagggatgaaactggaaatgtttacattggtattgccctaggcagaaacttttccaaataataatattaaaagctctatggtatttcagctcttaacattgcctaaatcattgaattatagtcctgtgttatgtattttcctcttttgtatagctttcacgttgaagctaatttaatttttattggcataaaatattttcctttcaactcccagatcagctctctaaaacaatatttatcagtttcaactctcctgaaggaaatcaccgacatccgtggaacctagaaaaaataattctgtttagaagcaaaacaatgtcatttgagtcaatgtcaagtgggaaaatggaatgtttattttgaggcgatagctcaaggcataaactatttactctaaatgatttgttttactgttgtttttctatcaataaaaagctgactttaggcttacattaaccctgtcgagatcttgatatctatacttagaaggaagttcctttataattcctcattgtcttttggaaatatttgtgtttctatattttcagtaaatggtgttaagaagtaaaacttttctttttgcctgcataaggcgtaaatgctggggaaaatatgatcaatcactttccagaagatataaactcatttagtcgcactgaatgctcaaccatcacatcatgcatttccaaacataattatagtatggctcaacatggtctaaaattccattttctacagccaataaaaacaatttttggcccagatccaaagtatgccaagtttaacttgtgtatctcaggactgttttagcacataaaaccacagaggattagctatcttttccactctttttgaagagttctttttccttgttctattcaaaaagaagaataagagtactaaattaagtactgaagtacattcttttgggaaacatgttattcagctatatatgcatacatgtaagtgtggatagatgacgatttcttttttagtagataatgatatatagaagctaaggccttggtgctaggtatgcccattactactgagctgccattatttctaagccttctcagtggtctcagcaagaaagagagagagaaagagagagagagatatattgatagacagttagatggatttctcttcaaactcaaaattcataagtagcattttgctcaagtacaatatagatatgcatttattaattgccaagctactttatacaagacagtattaaagaaatgtatggaatacaaagatgagttattctctcaatactgtacaaaatgagacaggaaagttacagttaatgattaatgaaaagaagtataagtgctattgtaatcatgctactgatgatttgaaactggaagtaaaaatacacagccacaaagaagggacatctatctcagatgtgattctcaaggaagacttctagaagcaagagatacccatacccatactgagggttaaacatgaagccagaaatggctgggggaagaatttgaaggaagcatattctaggcaaaggaacttaaaacttcttggagggaaaatgtaatgatttaggtgaactgaaagtcgtccaatattgccaaagctgggaccatgtgtctatttagtgaatgagtgggtagggagattttgagagacctagcctatattaggctgttctcatattgctatacataagtacctgagacttgatagtttataaagaaaagaagtttggccgggcgcggtggctcacgcctgaaatcccagcactttgggaggccaaggtaggcagatcacctgaggtcaggagttcaagaccaacctgaccaacatggagaaacctcatctctactaaaaatacaaaattagccgggcatggtggcgcatgcctgtaatcccagctacttgggaggctgaggcaggagaatagcttgaacccaggaggcagagtttgcagtgagccaagatcacaccattaaactccagcctgggcaacaagagtgaaattctatctccaaaaaaaaaaaaaaaaaaaggaaaaaagaaaataaaagaagtttaattgactcacatttgcacaggctgtagaggaagcatggctggggaggccatacgaaacttacaatcagggtgaaaggcaaaggggaagcaagcacatcttcacatgttgacaggagagagacagagcaaaggaggaagtgtcacacactttcaaaccatcatatatgagaacacactcactatctcgagaccagcaagggggagatccgcccccatgatcaaataacctcccaccaggtacctcctccaacaatgagaattacaattcaacctgagatttgagtgggaacacagagccaaaccatatcatagccagactatattatatatatgtgatttatgaagcttaaatatataatattttatgtaatataaattaaacagtttgaccatcataagagcatctgggagccactgaaagatttttaagcaaatgggagttttatccttaagggttttttttttagttgattctcaaagataatgtgtgtatacataattattatccgaggtagaaagttttatatgtcctaggaaaattagaaaaacaatggcatgtgagttaagagttgtatgattagttctacttgaagaattcaggtaaacctcagaagggggatttacctgaacccccttcagggtgaagggggaatattttggttgggtttattactcaacatattcacagattacccatcttatttattacggattgttttgttttgtttgtaaatcactgtgaatagagacaatacacagatgtcattctcccagagttgttaaccttgcttctgaaatatggcatcacaaagttttgatgtagcaaaatttattgtaagatacaacatttcaagatgatgctaaattatacatttcctttgaccttttaaaatctataatttctatatgatttaaaaattaaagttgcaacaagttttaaaaaaattttcaaatttagtgtaattttaaagttgcaagaatagtacagggaagtccaggaacaattgtttatgttttgccccatttatcattgtctttattctctttattcatgtataattaaacatgcatataaatattgtttattatatgaatagaataaaattaaatatgtattacacaatgcatataatttttatcacacatttgcacatatatagcacaaatgaaatcaaataatttaatacaggtaaaatactgtttaatctgcagttctttttcaagttttgtctttgtcccaatagtcttttatatctatgtcattcctaatgtagaaggaaatctaagatgatacattgcatttagttgtcagttctcttgggtcttttaatttggagtggttcttcaacctttccttgtgttttttgaccttgacatttttagagtacaggccaattatttatagacttcccctcactttggttatgtttggtatttccaagaaaagaattagaaatttttatttctacaaaaatgagtagatttgtttttgtgatattgggtcaggaggcacataattaatcctagtttgtcctaatagtgatgcaataccagtaatattcccatttttaatttttgaattaattagaaatttatagaatgatatattgaggatgtataaatatcctgcttctttctcaccaaattttcacccagtggttttactattcactgattttctagctctatcattcctttggtatttatcagttgatgttttccagtaggaggacctttattcctaatgtattcattcatttattttttatcagaaatgactcatggattctgattttattcagtgggcaataagacataaaacattgctatcattatttattttgatgctcagattgtcccagatttgatcaatgaagcctcttcaagctcatttgtatgttcttttgatatgctaccatcattctttgaatgcatccttaccttctagtgtgatgtattccagatttatcttgcactttctctctccccagccctggattcagcctattatataaggaatcttgatcactttcagtagtgaaccttatatagaaaacaaaatttgagtgctaggtgtgctaattgctactgttgtggcgttgtttcttgctcctctcactggacatagctagggttgtatatattatatttataaaacctatagtttataccagtacctctaacttctagccaatgccatggtacctattttagttcttcccctttccatatgtgaaattccgtctccaatcatgagcaatctggctcctattatcctcaatattcttttgctcaaataaataggagatttatacatataaaatgattatatataaaaataaatttatggagaagaataaacatactgatatggtttggctttgtccccacccaaatctcaccttgaattgtgataatccccatgtgtcaaggatggggccaggtggagataattgaatcatgggggtggtttcacccatacagttcttgggtagtgaataagtcccatgagagctgatggttttataaatgggagttctcctgcacaagccgtcttgcctgctgccatgtaagatgacccttggctcttcctttgtcttctgtcctgattatgaggcctccccagccatgtggaactgtgagttcattaaacctctttcctttataaattacccagtctaaggtatgtctttattagtagcatgagaatggactagtacacatgcattagtatccaaaaaattttcgtggtaaggggaaaaataaactgaaggaagactgttattactcagtgcttaggcatactaaaagctacagtaattaaaccagtttggtgcttgagcagaaaaatcaacagaaaagaagagaaataaagcaaaaaaaaacccatgaaaattaaatgtataataaaagtaacattttaaagtagaagagaaaataaagaatattttaaacacataatattgggataataagcattttggataatttggaaaaatccaattataatattgagaatatgccttaagttttatgtactgttaattcatttctcaatagaaaagtattttatttagaatatatcttgttttaataatgcagaaatgtcaagcatttattatttcttcttcataaatgaaaacacaataggcatttgctgcagttgagtggaagtatatgatgtctgcatatagtcaggaagaatagacagctatgtggtatgatttaaaggcatgcctataactaagtagcatcccattggtctgccacagttactttctgttagagtttttgataattgcgtcccagaatgtaataagaggaatttgtcatctcctaatatattagcagattccctttcttcctcgggtcagctggctcagagtaccattttgagccaatgaaacacagaatatgtgagtttctatagaaatcagaatgggaagaaaatatgtagactagtgaccctagatgattgcttcagtttgagatttgaacttccagaaattaaaatgagagcactgggattctggaaatgaatcctgaaaggaagaggaggatatatgagataatctgtgtttgcttaaattatatgctctgggacagcagtgtcaccctttctacgtataccataaccaaaaaagattattcaagtgaattccaactgaggaagacacaattagggcaacttttcttttggtttatatttctgttgtgttcctacacatgtcctcccaaaagaaaatatcctcagaaactttaaatcaaggcattaaggtaggaaacaacaacttgctcaaagtaaaatgttgtcatgtaaacaggtagccatatgtactttttctgtgacttcaaatatttgtacagttagcccatatcttcctttcatatttatttccatagaaacaattaactgaagtgcttgttttgtgtgcctaatcagaaaaattctcccaaccttaaaggttttcttggtttcagaactttttgtcttactgaatatgggattgttccagcacagaaactgccttaattaaggccaccagtggcttccatgctgccaactttactggaaatgtttagtggaaatgttccactagtctttctgactgctctgcagctttggtaccagtgacatctttcttccacttgacgccctctccacttctgttgtaggacaaacttctcctcctgactcccaattctctctgacatctttgctgaatactcgtccctgtccatctcctcaattgccagagttttgttcttgggactttacttctgtaatctaaatgttctctctgagcaagaccatccacgttcataattttatatttatgcaactcccctcccccacattttatctccataactgtcttctttcctctttcatcacactacccccctgcaccattcaaatatctaattgcccattaaatatcttcacttgaaccatcttttggcatcacaaattcactatgtgttaccaataaacttaccattatacttctttcttcttattaccaatctgggtcttcttacaccatcctcccagataacaaatcagaaatctaattattatcttagaatcctttttctttttcattcagtacaccttattatgcactataacctatgtactatcccagttaatatctcttgaatacactcttttttgcaattaatgcctttgccttacttcaagttacagtcatctttcacctagactactctaacatgctttttactgatatccctatacccatacttgtaatcctaaaaaatattttctacattgttcagtgacatcttccaaaactgcaaagtagaaagtatcatttctctgatagtagcccactagtggctccccattgcctattggatatagtctcagctcttcagtatggcatatataatttggtctctataatttttcagattcgtctcctgtaatttctcctcatatttttacctttaagtcgtgccaggataccttcctgaatactatggcatttcatgattctgcattactttctaccatcttttgactgaactttctttctctgcattgtctttctagtaaataattttcccctgatgaacttccaagcactggctaaaccttgctaaaacagcataatttcctctgtgagtcttcctttctctcccctctttgcctcttttgttccttttattttatgaatgcacttaattgtattaaaattacttttaaaaatagaatatatttcaagatttaaaaattaaaatcaaaatttacctttccatatgccttagaggtggccccattggagaccaacataggacttcttagtaagctgaacgcagccagttttccctccattcttggagtagattgttgttttttgattgtgtattggctaaataacttggtataagaagtctctatctttaaatacaagtagcatttaacaagatgaaatgctcatattatgagaggtcttaaatttggagatcaggggaactgtagatttacttttaccagctcagggatacttgagaggtaagtgctctctgagaggaaaaacaagaggagttctgtaatggctaggaaggtgaataacttgaccttgaaaatcccttcagattccagaagtctatgattctatttataacaaataactcattacctcaaggtcaaaaaattgatgttcatgaactatactgaaacaatgtgtacattcaaaacagcagcaatgttctgtatttgcagaacaaccaagagaagtgaattcagaatctccataaatttaagataagaaccagttaataatacacttgatgcttatcactggaaaagaaaattatttatgaaacagagcaaaagaaaagagtgaagataaaaatataaaatgattgtaagaaacagagagaaagaatcaaagtgaatcatattagatggacccaaccttacaaggcactaataattaattctgtggactctggtgaaaagcagtcccaggttcaaacctttgttttgtcagtcccagctgtacaatattagctatctctaaaattaggatactaatattatcccatattgtcatctggggaattcagtgtaataggttctgtagaatcctcagcagtgcctggtacatatgtgctctgtaatggcaacagctcttttattggatataggggctaggtaatttcataggtaactcttagctttacaagtctatgaatggagcctatctagccttttcagtgaaggtgaaacatcttatgaagtgatttagagaaaaggtagagagttttaattaatcaattaattatttttacggtttgggtggttgcaaataggatttcaaagagaaaattaccttacagacacacctttgtgttggagacccattctgtacgttggggatatatatcacaacttcatttgcacatttactaatctgattttttccccaagagtttctcagtgatgttttgaccagaagttttgtttatccacttttgttcaatgaagattatacagcaaacaaatggcaaaatttaaactttaaagcatccaaatattcagtcttctgcttttcatggttcattgatccatccacatgtaaggcttgtattgtgagattgacccaaaccagataaatgtgtctctgaaatcaagtctcaattcctgctagggttcaacttaatttaaattatcagagaattataattttaaaaatatggttggccaaggtgctttttaaaggctgttattaaaactaagaatatgatcatggagaggcagtgcaatatgttagtaagaacaaagaggtcagcatcagaaagactggattcaaatcctattactgtaatatgcgaactatatagtctttggcaaattatataacttttctaaagtctagttgccttgagtgtgaaatgaagatatgcgattctaccttttgggtgtgttatgtagaattaactgaaacagggcatataaagtatagtacctgacacagttaatgactgccaaacacatgccaactttcctccctccacattttccattgggtcatgtaaagagcagatgagggaaaattattattttctagtaccatagagcaagatgagggttcataatgttgaaaaagatgcagcatttctaagatagacttgatttccagtattctcttctggtatcgagccatgcagtagatgatgcaataaataatatgtccagtatggggcttgggaaagcactactgaccagtttaaatcctgtatggaatttgaattttgagtttaataaaataaaagtacaaaaaaattatggtaactatggcatgtcatagaacaattaatagtaatgatacattgatattcaaaagaagatagtaattccaaagatgagattgccaaggatagattattacagtgcacttggagtggagggagtattccatagaagcaaagagaaaagctgaaactagaatgagttttttaaggagtgagggtacaaatatatgtggtattgattttctctgttaataactcatttttattttagaaaggtaataagtgttgtaacctatttctatacatttggattatttacacagaaccttaccaaacacactattggaagtctggcaaagtcagtggatggttctactcagtcagcatgagtcatgattatctctattgctgtctaattctcaaagcttagagaagccaatagtttagcatttaggaattttccattactgacattgattcaattcatttcttggttgtagctctgaacatttattcataagcattactgaaagcttaagcagacttaaaaaaattgctaatccaatttagcattatattgaagccaaacttaaaatacggaggaaagctggtaaggaggactcaatattgaagttaggttgttgattttgtgatggacttcagagtttcagagaaactaaccaagtctcagtatgcagctacttttgaacagctttccactgactgaagaattgcagataagaatatttttggcatgtttggggagtaatggaaacctctgaatcagatgctttaaaactttgatatcacatggaacatgtaattgttccctaattacaacccctctttttatgtgatggtgtgagcctctgtaactgcaggcgaatgccgcatgactgacaccacactgcttcacccaccatgtgcacttgaaatcacgtattattgcatggtacttagggcttatgaaacactctgcttgctcttcttcttatcctgctagttgaatatctattcatccttccaacccctgttcagccatctcctttttagacctctgactcaaagagaattttatattaaggagacttctttttgcaatgttcctttaactacctactatacaaaagccatttcctttaatagtagatttgtatgttcgttgattacacactaagcaacggatgtttggctatgagaatctgttttaaattatttctattgttgttgttgttgatgatgttttcatataatgttacactacttataggaagttttttgatgggcagcacttaaggctgtgagaagtggtgggagtgctaattggagccaatcaaactttaacctacctactcctacacttcagtgacaaagaggaatttcttctactttgtgacatagaaagccttgtttctgatggatttaaatgaccggggagttagccaatttggggaacagcttttctgtcactagaaattataaatgtgaacattattattaattaatctaagaaaataataattcttgtgtattttgttattgaatttgtggccaatgaactgagtctgatacacaaatcaagggaatctagtataaagctattgagtgaatagaaaattttcccctgaggtagaaaacatttctggtgaggctgagaaccattttcaaagtgattctcagttgtattgttaattttacaattctctttgctgtggtttgaatgtgtcctctccaaaattcaagtgatttcggtgtggtagtagaggtggggacttttaagaggtgattaggccaggagggctgctcccctcttaaggggattaaggccctttcaggaaaaaaaaagggcttcattttcagttagctttcctttctgccttctgcctatctgaagatgtagtaaaaaggccctcactaaaccagaggctgacaccttgatattggacttcccagcttctgtaactgtgaggaaatgagtttctgttctttataaattacctagtctcaagtattctgttacagcagaacaacatggaccaagatgccattgtatttgctctcgtttatgtaaagttccagatttgaagaagtgtaatggcaaatatgaaacacgaatgtaagttttacaaaatgttttgaagcattacaagagatcactgagtctgtttttagggtcttacagtcacatatatgagaaaaaatatatttttggtataacttgactaggtttatttttatagtagtcagggtaagttacatgttctgatcttttcctcagttattgtatcctgcagaatggatttattcatgcattgaacagatacatttgtgaataaaaaattaaacagattatgatgcacacagattatgatacttgctgagggaggaaaaactgcaggtacaggtacatgaaattcaaatagagttgtcaggagagtcacatctctgaagagggacactgcaatgatatctgagcaatgagcaggatgaaaagcatttcaaacagaaggaaaagtatgtacagaaacagcaggataagagcgtgaagtgttcaaggcacaaaatgccagcacaggtagtggggaatgagccaaaggtcagggttttgagatgaagggtacaggtacacgagggccggatcaggcagaatgtggatattgtggtatgctgtactcattatgcacccaatgaaatgaataagaaagtttcatcatatatagtgataatgtatttgtctatcttccattttgatgtgtatgaccagaagcatgggtgtgggccagttttgaaaacctaaatggaaattttgagcccctttaagacaatatttctgaaagccagactttgttcacaccaaaaattatttcttaaatccctgaagctctacctgatatacatgatcaagggctgtagacttgaacattgggtctgttatagaccatggatgaaaggtatgcaggagataaattaagaaagcatttcttctgccctgatgaagtacagaaaagagaacccccaaaagaaggtgttttgtgcaaatggtcaaagtattttgacttctttcctataagctgaaatcccagaggaggagcaggtttggttgaaagtgaaaagctaaagcagagtgaattttgctgtgatttagtgagttagctatgacagagtaaaaatggtggtatggtgtggccaatcccaagtcttcctcagtgcctgtgtgggatggagtctcaggaagttctgctagccctgtgaggatgtcaaaagctagctgagatggagcagtgtatctgtcatgagcctgccatgaccacagtaggaggctgggggtcctagacagatgccaaaggtttaatagcctcaatagagatccaggtggaggatgtggatgagacttagaggatattgaagtaacaaggaaggctgagattggctcaatccatgacaaatgaccaaggttcccaaactgaggcaattgatcagagaagccctggattttagctgtagatgtgtgcagggaaccaagtgacaagacagacaagggacatagttgcagagaccagaggacataaaggagatcagggacctgcaggtttggggctgagaccacttctttcctgccacctcaaggtcagagaaaccctcttccttataaactcaggtgtctccttgaagaaaaacaatgggctggaggaaatatgaaagattacacatttaacagatattactgagtttttagaaaaagaatatgtatttatataaaaagatgatgagatagcattaatgatcactttgttcatgtattcattcacttaacaaataaccagtgagcatcttttatatactatgcacagggaatacaacagacactaatccctgcctttccagagcttagtgagggtagttcctggttgaagctataaggaaaataacaacaacaactacaacaacaacaacaacaacaacagcaaagctcaatttaaaaaaagatactttaatttattttcacatttgagtagtgtgctgtatttttaatcctacaacaatggggatgaaaagtattctggtggtatgcatgaccttgttgtggttaaggagagttaaaaatgactacagagtttattcttggttggacattaaatttaaataacttaacattttatcatagggttagtcagagaggcacagaattttagagctggaaaggatcttagaggtcatctggtccaacctcttagtttgattagtgaggaaactgacatacagggagttgaagggaaacttgccgctaaagctggggtttaaatatatgttctttgactttagtctagggatctttataatagaacagaactttcattcatatcttagcaggagataatctataagcctattcaattcaccttgatatcaagtaaaccagggccctttggaaatgtttctagggctggtgtttttgtaggtattgggaacataattggcaatgttatgacacttgagtagggtaggcggttagaagaagaatagaaactctctggagtggtaagttgtttcttctttttcccaatagaatgttaaatacagcccagaaagatcctgagtgaccccagagacagagtgcttgccaagatgacagcctactgtaaggagtaaaagcttgggctcaggaatgagacatctgagttcaaatcccagctctatcatgtatctactagcttcttagtcagttgtaaaacttgtagcaagaaatgtgttataaagaatgaacaaaatgctgagagttgtgaatgacttaccttggaaggataaatcagatttaagttatctcgaaaatgattctactgtcactcacttatatgcagtagtttttcctctagaggtaaagcggtaaagttatggttagtttatgaggaagaatttacaccctgccatttatctcatggtataattgaccaagtggtgttccactttattgatgtgatattcctagttatgacaaatgaaaattatagtagtgtttgcatttaatgcccacgttttactcttcatggttttagcaagaccttggaactttcctgggggaggatcacatgcacactttatctttcatgtatgatatgtcaaaaaagagaaaagattggcaacaactaaactggagtttaggtgtgtgaggtactctaatcatacacaaggctagctttaattttggtgaatggtagagaaggaagagtaaaagaagcagtgttgtgttttttttttttttttttttaatgtttttttttttattatactctaagttttagggtacatgtgcacattgtgcaggttagttacatatgtatacatgtgccatgctggtgcgctgcacccactaactcatcatctagcattaggtatatctcccaatgctatccctcccccctccccgaccccaccacagtccccagagtgtgatattccccttcctgtgtccatgtgatctcattgttcaattcccacctatgagtgagaatatgcggtgtttggttttttgttcttgcgatagtttactgagaatgatggtttccaatttcatccatgtccctacaaaggacatgaactcatcattttttatggctgcatagtattccatggtgtatatgtgccactttttcttaatccagtctatcattgttggacatttgtgttggttccaagtctttgctattgtgaatagtgccgcaataaacatacgtgtgcatgtgtctttatagcagcatgatttatagtcctttgggtatatacccagtaatgggatggctgggtcaaatggtatttctagttctagatccctgaggaatcaccacactgacttccacaatggttgaactagtttacagtcccaccaacagtgtaaaagtgttcctatttctccacatcctctccagcacctgttgtttcctgactttttaatgattgccattctaactggtgtgagatgatatctcatagtggttttgatttgcatttctctgatggccagtgatgatgagcatttcttcatgtgttttttggctgcataaatgtcttcttttgagaagtgtctgttcatgtccttcgcccactttttgatggggttgtttgtttttttcttgtaaatttgtttgagttcattgtagattctggatattagccctttgtcagatgagtaggttgcgaaaattttctcccatgttgtaggttgcctgttcactctgatggtagtttcttttgctgtgcagaagctcttttttaaattgagataatatcatatatgtgtcatggtaaaacctaaaatgccatctaatcctttctttcttgcagtttcgtttccctcctgcacttaacttgaagctcattaaaatatataacttgtaacactgtgtttaattaaatgttgtttaacaaaaagaacacacatgtggtctcacgtcctatttgactagacttacgtgcttaaactgagaacctgcagacccatgcattttccagtgcttgggatggcataatatcaaatgacctttttgccattgcatgctttggcacttgtgtattacaaacacagccagactataacaatgaagaaaatcaggaaaagaaaagcttaccttttctccatgatgcttaatggaaaataccatgacactcttagggtacttttggttggaaaagtcacatgggttgatctatgtgttttgtcacacaaaatgagttggttagatggaattcttggtgtgtttcagctgatttgtgttttagaaaattaacatatttattgagcaccagttaggacgatttctaacagcactgagtcgggtagggtatgtgtgtgaacgtgttagactaagtcagcctgactttgtttttccacaacaggaaaaataaaaacaccctttctgacccccctcaggaaaaaaactattcataataaattatagtctattgtatagaagacttggcctttttatttatgccatatattttagtattttgcacactacagttgtgttaatgtaaggaatatattttagtaatttaattaataatcatgaaatctttgtcttattgaatactacattaaagttgaataaggtgataaagccaacttttttccaatgttaaatttaaatgttctttgagaaaaagctaataaaaacatttaagaaatatatatttttctttgtgcccagtgaatatttaatttactggtatcatctgaatgctttatagggtctcagattggttttaaatatagtgctttccataaagtgaatctaaactttctaacttaatcacagaaagaaaaaagaatataaacctaaggtaatgaagtatgttatggatttcctatgattaacaactttcagattcttcagctggtaatcaagcctttggacttcaagctatatttcatacttgcttgccgtttgaactgtaccttggctagatgtttattagtatttatgttgagttccctccattgtgttcatgtagaaattgtctcacatttccaattcaaaagaagacaaaatgaaagttaatttttaaaagttgatgggcttattattttcttgaattttccctcaggaggaagatttatgctatattaatggtaatataggtaaaccatgactacagaaattgaatgctacccacaaacgcaaaatccctcccagaagacctgtacaatgtgttatttcttatgtgctttcctaaatacaaagaaagccaaagcatatggtaataataaagcatctgcttcaaagatctgtatctaagtttgtttatacatggtcagtatatttaactgctgtatagcacacatgtgaatttatcattggtacttattgatcataaagagaacagtgacatagatgtcactacataactatgtaatatctatataaatatgttatacataatataaaatcatctttttatttatagcttccttatttatttataacagtacataataagtgtgtagtttttgaagtatcaggcatcataacttctatggcagtttctttgcaagaagcaggcgaatcagatttagaaataacatgatagtaccattaaagctggaaagaaatatagaattcaattaatattataatttcattttacaaacaagaaaatggtctcagacaggtcaagaaatttgcccacagtggcccggcatatttgcaatagaactaggactagaacccatttattttatttttagttcaatgctctcataatgattacatttcctagtttggattagaacggctcgataaaatccatgattcccttataactctcttctccttccttatctctcctcagggaggaaaataaaaaggtgatctttctccctggaagtatttggagagtgccaataactacagatagtatcctcctttgtgacatttgatctttatttttatggatcattcaactaaaggcatgcacgttactcatttttccctttttattacatgtatatattaaaaacattctaatcatgctttgaaatgatttagtttattacaaatctctgacctggaatcttatgacattattgactgaataggaactttgttagtgattcagatacaggaaggtctccaaaataagttacattaaaatacgagcattccctttatctggagctagaataagagttcccgcagtgtaaatctgtcttctaaaagaaaacaatttttaatatcatttattttcagctgttcacaaattcttttataccttcttttctttccttttacttttataaatccaaatttcatcacataatatataaaccataggctcccaggcactttggaggggctttttgttaaaaaaaagcatgtggatgtgtgtgtgtgtttccatctcttttttgcaagagatgtttcctcttagttggaaaccacatttgggtacagacatctgggtataatgtcaccagtagaaattagcaatttttgtttttctaacttttgtagctctggtcagcttcgcatgggcttctatcagttgatatggcatcttcaacttcagccaagaggaggttattagattataagtgctaaaaatgatgagtcgtctccacacttcagccagcatgaatacaagcaagattgtaaaataattataatctgaagcagagccagccatgcaacccgagcctatctttcttcattaatttgtatacagttcttattttaagagaacaaactttcagagggtactcacatggggctgctgaaccagctgtacaacttttattttgaagaaaaaaagttgagcctcagaacagtctgttttaaagacagggagggacttagcctttcggagcttgaccagcatgtggaaggagagctctcatggctgcaataacttagggagttcctacctggatgacactggggtaggaagttttctgtttgttttgttctgtttcggagggtcccgtgcacttctcttgcctggatcaacgtgactcttggtggtttttgcacaccctgctctgtgggggagtgccccaacgtgcctgtcttatgtggcctctatggacacactgctcagctggcagagaacagggaagttttctcccagcacccaaaaagagaaagaggaaactactttttctttctgggctccttgcagcacaatagatcaggataagcttccacatttcctctctggagtttctggagtggtttccaggaagaagttaaaccttcacctttaaatggatgaccatgtcacaatcaggaagaaacatctccaaagacccatctttaggtaagtaatgctacatcgcaggtggctctagggctgtcaggaacaatagtttctcccttcatccttaatttggggattctgccactaagctacagcagagcaatcaagagtgcttaaagtttaacttcaggcatactgagggagcctttttgttttctgttttctgaaactttgtgcacaaactcttatcaactcctgaaaatacattttacaaaatcttaactattcaaacacataagtgacatagtactggaaaaactttggaaacgttatgcaatctctagctgtttctgtaggctgttgcacagccctctaaataggaaacgttgtgcttagttctttcaactgattacaggcaagggcagtgtttcagtgctgtgaatactacacctttctggagtgaagtgtcgggagataaatttgaacttgatagctactttactagagtgcacattttacagctcgctcaggaatatcagaccagcagttaaagaaacaacagggtgataggaaaaattttacactgtggtggaatctgtgaccaggcaaaatgtagatacagtataatggattgagctaaagtttaattttggagggaggtacaccctttctttaagaaagcagctgtttcttcattgactctttaattctggattctttagttacctattatgtactttagaatttaaaataaaaaataatttaaaagtatctagaaattgaaccctatttttgcccctcaaaacagaagatttttaagaaagtcagttatatatcagttttgtctttccacaaaataatattctagataaagcagagatactacatgttagcaatgttaaggtcaagttgcaaccactggtttttgtctggaattaaatacaggatgataaaacgtatgagcaaaatttctctgtggtttctacataatgaatgagtagacctcgaggaatataattatataaaatgtggccatttttactgattaaacatcattactgaattattaatagcaacattatacctttgtaatgcttaaaacaagatgttagcttgaatctgttttaaagtcttcctttgaacataaattatatttaaattcatatatatggatttaatattactatccccctctacttaaatatgtttttgtgtcttatgcaatgatgttggtaaataaccaaaaatctaaaatgacccccaaaatatattcacctaccatatttcctaaaaagttcttccaattgtatgtagtatctatattctcccaagtgcacgtgcgacttcaaaaaggtatgatagttgcccagatgattctaaactcaacaccagtgaggcacaactcacagagggcacccacagcagtttggaaaggcaaggttgtgttggataaaatcagatccacctagccatcatctttattgtattacccctttggagagctgtggggattgaagcaggtggttttcaccactgatttatgccaaatcctcatttcttcctaattaattaattatatgcttaggtgctatggggaaggtggattgcaacttaactgcacttctgtgcttatttatgtaaaaaatagaactttgtggaagctgagattctttgcccagataattagaataaaatttgttaaattcaagtgatttgcttcatgatcctggtgctctcatactttcaccagggagttgttacaagtaggtctagaaatgggtctttgactgataacagattaaagctgtatgtgagagcaggatttattggtcatctggcacattgacagttggcattgcttttaccaggttatgattgtgattagggaaaagggagatggagaatatcttaaaagattcaaataactaggcttaattgcacagagaaagtttggggctgatttccataacacagacttcccgatagctagttgtacttttagggaagctggcagtgggttaagcttgcttttgatgcattgcttcttatctcatgcctcacttcgttttcttcgtcagcctcctttcttaggcaccttgttctcttaggctttccctaggctgtctggcatctcacattgagacatctttctcaagcctgacttttcagagacccatgtactagacctttccttctcagtatgtacttgtaactgcaccccacttcctaggggccttgcacactggatctcaatccacttgacaggcaaatctgtaccagtgtgttttgtgtgctagtggggccagttataagcttaatggacattttatgaaaatagtatcttggctgtttaaaagtaattcatttaaaatttcagtcattaagaaatatttggccgggtgccgtggctcatgcctgtaatcccagcactttgggaggccaaggtgagtggatcgcctgagttcaggagtttgagactaccctgggcaacatggtgaaaccctgtctctactaaaatacaaaaaattagccaggtgtggtggtgtgcacctgtagtcccagctacttgggaggctgaggcatgagaatcgcttgagctctggaggcggaggtcgcagtgagctgaaattgcgccactgcactccaggttgggctatagagtgagaccccatcaaaaaaaaaaaaaaaaaggttaatccaggatttttttttttgaaatatttggctcattgacatagtttcaaatttctatatacaggctaatttcccctataattgaagctccagctttaattctagtcacctggccttcactgattgactacaagtgtccacttctgagttcatggtgcttgagagttcagatatggggagaaaaatacttatgtgccctcacgtgacatatcattgaggatatacctagataaatgtgctacaggcaggcaatgggtgccataaaggaggtgataacatcctgggagattgaaatggaagagacagatttcaggaatgactcattctaaacacctaagtgacctgaaagatatgagagcaagagctttttttccaatttaattttcaagatttaattaaaatcagtttttcatcagcacagtcatcctaagtttcagaaagtaaaagtcatccatcaagtggaaaaagttactgagaggttttggagtagatggtgaacgttgaaattttgtagctggctacgatattaggaggcttgggaggaatcttacgtatcatttagatcctgcctctaagaatgtctggggctcctacagtaaagattccaaatcatttcctgtagttaggttatcaaatctattttttaaaaaatttccttggaaattttaggtatatattttcgtatcatgaggttatcaaatctattttttaaaaaatttccttggaaattttaggtatatattttcatatcatgtcaatgagggaaggaagaaaggctaagtttcttttatggccaaggcaggagtttatattatctcctttatggctatcatgtggaagtgtggcatcaatgagactatccagccctgagcatatgtgcatggtgagtgccttttgggcacgctgtgattctgcctgcacaggctcttccagctcagactggtgttgagaaaacacgatgctccttttcctcaggagaaatactttgagttttataattttctggaaagaaaacacaatcacaaaactatattaatatattttcaatcaataatactaaggtcctcagcatgtaacaaattactgtacatatatctttaaaatccaagatgtgaatcaacacttcatatatgagacctcacatagatacattcctttaggcttttgaaaacctttgtttctatattcccagagatctttatctctggtaattataataatttgtctctttatatgactatattcattaatttgtgttttaatattaaatgatgtaacatattcaaatgaaggatctttatataactttagtaaaataattgttgaagacatttccaccttattgcatactcatcttgcttagtaaactttctatattcccttgtgataaatcaaccttagactatgaggccaagaaaaatctgtttcttctagtaaaattgcaccagtaaaagtatttttctgaatttcactgcctcaaaccatttaagcctgggcttttgttacaattattttctcttacttgatattttgttttatcaaattctattatatgtgcattttccccatttgtctctccaaattctttccagaagtaggcagtgaaaaaatgaatttaaaaagtaaattgaaatgattcttatatgttaaactttagtgttctttggaactgacaactttttgaagctctttcatggttcagaagtgattaggtcacttttgtggtaattttccattagaaataaaactaaaaagccacaaacaaaatcatgcaaatagttccttattaggcctgtaattgagaacaagtctgtacatccaggatcgaagacactaaaggcagccaggtttcaagactagtgaacatcatattgggatcttcacagcattcagatcacgctgtttcttctctttacgtcttctcagaagctttattttcgcaagtatctgttagcagaggagttctgagtgtgtatttggcaggcatattttcttcatttaataatggagaaagcagtgggatgaaataggaaagcctagaaaaagaaaagcacatcctaattttgtttgtggacctaatgggtatggttaatacctattgctgttagtaacttactgatttttgaaatgtattaccaagatcaaaggaaaacaaataaacacatttgagtgtaaggcagataatgtttaccatgaaagaaaatttcagacattacagtgccttgttatttttccagttgtgataaaagtagctctaatttttaagaggtcatcactaatagataaactatgatttgttatacattttaatagcaggaggtaaatttaatgccaggcatttattcctgctggtattatttcacccacagtcagcacaacttaaattatctccaataaactagcatcataattatcagcagcagtagcaagtgttgatattaacaccaagagggaaaattcatagaaaacttggtgtatttttaggcaagctatatgcatgtaatcttttggataactccatgaggcagtattaaatctacaattaataattttgggtatagagtcaggaacagggtacgattaaaatgtggggaggtgtcttccactcaggagctacacaaatgtcgttttctcagctagagcagcttgatgacatgtacatttatcttagacattggtaagatttagaaatggcttttcaaagatttggaatgatcaaaataaggaaaattaagattatgcaggtaaaacaatctactgggattgttagtgattttatgccatctggaaaattttacatttatagtagtcagactacttcacatagtgtttaggtaaaaagcaatgaaaagaagaaacagtcatactgatggatacttgtttaaaagacgacctgtaggtatgtagagatggaataaatttaaagaagtctgcagtatttttgaacctagtcttctcagttctgtgactggacataatgtagttttgacagttagttctcatgggaaagcttcagtttatttatgtatttgattacggccacttggacacaagctataattgaggaaaattcaacatttcctgagttggagctgctggaaatgtacggggcaagttccagtgcatttgaagtaatagatgataatacttccagatttattatctttgtaatatccaagccagctgcactgaagtcttacgttttgttatgtagaagcattagttctgagtcaagttggtatccacgtttagtgttttggtgtctccagcctttaggattttaggatattatttttgaagagtttttacattaaaccaaaacagatatttaaatattaattgtatatgtattaaccagctgcttataggcttgaaaagttatgtgcttttattatgaaaaccatcacttcagctttaaaatattaatacttaatttgacttttttaaggatcaaagagcctggaacaaattgattagaaaccaatggtaatgaaaaacagtagggctgtatctttgtcatataaaagtggcagttatgtcagttccaactgaggtaggaaaagaaaatccccaccaggtcaagtcacttttaagttatatcattaaattaaatttggatgaaaatagggatatgtgatgatctgggcccacctgtttgttagagatcactaacagagatgccaaagacatatctattctaatagtgatgtttctgtgaaaaaaacaaaacaaaacagaaaacagaaaaaaagagactcttgctaatttttggacccattaggcatttactgctcagtccagctgcatccaattattatttctaacagcacagtggcattttatctgcacctcttctgctgtgcatctctctcattctattatacttaagtaattaattagtattaattatattatacttctattataattattataattctattataattaattaagtaagggtatcagctcccctacgaaactataagatccctgaggctagaatcaatactgaattcatctttgtatttctcataacttttagtagaatgtattttataagtaagaattcacccaagtcttcaacttaaatacctacagggaccacactggtattgtaaatatgtgaagtaggatatggtgggaacgtagtaggtgcgaaacaaaaggcatgtagtttgacattttaaaaaacactaaaacactaaacaggatctagctgcagactgctagctggtgccccttgaaatgaatgaatgaatgatagaatgaaaagtttgttttgttaggtccacacagtcgtcttctctctattgttggggtgaacaaatggccagtagagcttagctgaaaattctggcagttacatccaagaggtatactaggaggatgagtacttggttcttgtttctaatccttattaaagaatgagaaaatcaaattagccggatgtggtggcacacgcctgtagtcctagctactcgggaggctaaggcaggagaattgcttgaatccaggaggtgggggttgcagtgagccaagatcgtgccactgcactccagcctgggcgacagagtgagactctatctcaaaaaaaaaaaaaaaaagaaaagaaaaaaagaatgagaaaatcaatatactctacagcataactgtactgataacttgtatataattttgtagcattaaaagaatagatgaagtatataatccttgaatgaataaaatgcatttgtgttagcaccaacttgaattattccagtgtcaggaaattcattgcctataggcatttcaaatttgaacttaacttgttagaaaatactttcttaaaatgaaatctgtcttcctatcagtacaatgtttttttttttttctcttttagtggaactggaacaggaaggatttaaactttctcttgcatagtttagctctttaaacattgaagacaattgtatcagcgattgcagtttgtaaatcttcccaaagcatagtggcttaaaatgatctgcgcccgtgggtcagctgaatgtttctgctgatttgtgccaggcttggttgatatcagtgggtcttttccatgcatctgtggccagatggtgggttttctgtgggccggcttaagaggaagaggaaactcacaaactttttcaaggttgtgattaagtttgattgagttaagttgttactgtcccatttaaaaaacaataaaaaagccacgtggccaagcccagtgttggtgtgcgagggcataaccaaagggtgtagatatgaggaagcatttgcatttggatcagttaatgcgattattctgctcttaaaacgcttatgctttttttgattcttctttcccttactccatctgcagttcattccgctgttgaagaaaaagcacatagtttgatcttcatttcatgttgttaagtggtctaagtgaccagtgaggacaggaaaaaaatatatatgaatgaagcagtgtagtccagatgactctcatgtgacccaagggtcaaacatggttcacctgactccagggttatagcatgcctgagattcctggtttaagaagttttaaaaagttaaaaagtaaaaacgtttcacctaattgccctaaaacatgagctattacacccgtaatgactgcccacattttcccagttctttttcaataattgatttttaccaagtgtcatgctagccgacttaatgaaattaattattttaatagaagctgaacataattaattacataattttgggcaattccattccaaatacactaaaactatgacagggaaaggaggctttggaaatcgtaataataaaacagagcttccttatgcatttgaatctaatttgagttctagctataatgtgtattctcttgggacttaaatttattatcttaaaatttttttatgggatagatttatgataacgttttctattttgaaccctcctaaacaccactataataggtaaatatttttgtaatacctgcaaattatataacgtttattttgaaacagtgattcacaaaatgaatttttttttaaattgacattagacttgcagtttacaaaaacaaaaacaaaacacaacaaacttctgcatttgtaaccagagattttgattcgttaactctgggggtagaaaggtttgatgtattcctacaagctgtctgattcattgctagatttgggacccatttccttgatgatataatttacactaggaatggaaaggcaaaataatttgtaaaacattttgataagattaacatcataattggaaatataagctatttttttctttcatttttcatgaaaaatctctgttgggtacagtggacttctgaatatgaagaaggataaatgtctcctctaaaaaatcttcaatgcttttttaggatatagaacagagacaaactaccatgaacttcaaagcaacagttctcaatattggctgtgtcttgcactcactggggaattttaaaaaatcccaaaaattaggtggtatttcagacctactatatcaaaatctctgggtaaaacccaggaatcagtgtttttcttaaattccctaagccacacttgaaaaccacagacctaaagagaagcacacataaagtacagtgacagaagaagggaaaacacttgcaggtgaacactgaagggtgaataggattctgacaggcaactggaagaaggaaggaacattagcaaagtggtataacatcagctaaggcgtgggaatctaaaagtgcataaagtgtttgggaaagtctcaggaatagggagaattcttcattggccagccaagtgctgagcatctgcatgcgaagggatgcgtggctcagtttggtttgggctagagagtccagggccatacagtgtgtgtctattgcgtgactgtgtattgtcacccatgtggcatgatgttgaaactgacaaatccaatgaactgaatcttgagctcagcatttccaaaatactgtttggtcgtaggtcaccattcccctgagatactctgaacaaaagcatcaaatgagtttgggaattacttccagtcacactaatttccctcttagagatttacaaagcatattagaagttttgtagtaaaactcgtttactctaatattttcctaaacagtctatttatgtataatgcttattaatatccccagaaagtagtgttccaaagaaacatattttagttttcctaaatttctccaaaacatgccttctttatttttctgaaattcactgtgcttcagctagtcttttctcctcctttaattatttcttttcttatttatgttttctggaagatagcctgtcctcaagaaacttctccatagttaacatttttcatctcctcttagagaagtcaggcaaaaaaatgttgcctagttgaaggaatagttaatgttttattacataactgtgatgatgtgagtttaaaaaaaggaagaagaaatattttgaaaagattgggagaggatgaacgatgtcacattattgaaacagctgagcgtaaattaagaaataacagatggaagttatgtgtggattatcacacccaggtgtcactgtacacccatttggcagcattttaacttgcctttgtgtcttttcccttgcttcatcctgaagagatttttaaaaaatcatcgccctgaaattcacacttagtgagaaatagacagttaaacatctacgaataatgccatgttgaataatgataatttgtaggtgtgtagaatcccatatttagtttatattttttaattttatacatctgttatactatttgcttgcacatttgccctgtaatgaaaccatatagctccccatttcatagatgaagaaattgaagttcagatggtcacaggaagttagagaaagagacacgggacactgacattaagaacaggcagattaagtgtggcttgccattacagatttagtttttatgacaaatatgttaggagaacttagtgtgcatgccaggccaggcatatggttcttctttgaggtataacccattctcagtagccaaggaagtgatttgaatgtccttaaacattgtttttagctacttagagttatttaatacccatgatttccatgcaagtttccttttctagacatggagagagaaaaaaagttgagataagtaaattatatgttttcagtgtcatacgatttactgtgatgactgcacaaatatagatttaacatatcacatatgatacacttactagaaaatttagaacataaagaactgtctctagaagaagtaaagacaggagggaaaaaataaagttcaggcagttgctttgaaagtgtttctaaacagaagagatttgttgctatcataatataaataacattttcctagacagcagaaagatgtagatcttgaaggatatgacttctaggttgtacaagactagaactggatttcatgatttcattaatagaaatgattaaaatataatttgacagccatcctattaatctatattttcagacattgttttccatcaatttcctagtatccaaaatgctaaaaattcattgttttattttaatgtgtttgagaccattcttgggtgctatgaagcttgcatgttttgttattttaaaatattttacttattgtgattttctgaaacataccaagaatttattttctgaagagaaaacatattccacagttggctaggcaaacaacacaaagccctcagaaggctattttctctcttttaggaataaaatatttagaaagtctttattgaaggcaatatattttatgtggtacagagtggtaaagacagaattttttttaaaatgcttctatctgtagggtagaaccattatttcatgatgtttacttcaataataatctatcccaaattggtgcttacttaaaaaatggaaaatactttccgactccagtctaaggagctgaacagttgtaccaaatgaccactgagctaaacattatgtaaaatttcttttcaattattctgtaccagtttttagacaaattgatgtagaatttgagctgctaaagttgaaaaattttgatccgtgtgtttaatctggataatttgttctgctttatccttcttcctgcctaccaacacatcatttcccactctctctactagctcagttggaatttagctcactcatccatttaatggaagcaatgtcaacactgagctaatgaaggaccttcgcttgaatctttttttttcttcatttagatgtctagataacaatttgatgctgccccttcccactgccctctcttttctttcatcctttctcccttgacagaaaccagaatgcctaatattttctatgtgagaacaacttgctgcatatccagaaaacaagtgtttatgccagttactatgctatcctgaggagttctacctacctctgtaaacaaacattaggacattgaaggtcaccttagatctgtgagtttatatctgagcagatagtggccttaggactcctaggtagatgttgtttctgggttttcccttaaagaatgagacccctgggggggtctggaattccacatttaagactcagactagaatgcttaggtgatatcttcataacttattgagttacttgcagatgttcattctattcattctaaaataatttcctcttatctactccatctagttacaattcagtctcttccttccattcatttatcttcaaaatgtagaccaggaatcgtcctctgcttccatgtcttcccattaacttcttctgtcctttgtgaatacacctcttctcttaatctcaactgtcttctgttaggtgatcctcaaatttacatgtgcagatctcaactctattctgagtgccgattcacatttctttacatttcttaaacatgtccacctgatgacctcctgatacccaatactaccaatactaatctctctgaaagagatttataatgcatgtataataacaataataataagttcagaagcacatgcttatctctccaaaccttgtcccttgtaacactagtgcaccatgagatttaatagatttatcacacacacatatgtgcaccctaacataaacacacagacacacacagacacaggattacaagaggatttcccagaactttataacgtttatgttaagtgtaaatatttaaggcaaagatatgatatttagtgtttcctaaattgacagtggaactttctttgtgccaaatatctataaacatatgaaagttttcagtaaattgttgtttcagaaatattgcttagaggaacaggttagcctagctgctttgagcctctttgttgaaaactattaaggacagcataaaacacttccctgtacttttaatcctcttgtcatttagatttcaaatgtctgttatttttcatgcttctctacttcttatcattcttaacaaaacaattatcaagtcctttcatttatgtccttagaacatttctttctctactcttttctttgtgcttctccacttcaaagccctctagcctcccatttaaaatttaatgatatttaaaaattaatcttctagtcttcagcccctcttccacagttccttggttctcaagttatcagattagtctttaaactttgtcatggttatgtcactcctttcatttgtaatttgccatggccctttattttctaccaagtgaaacatggattcttctgagattgcaagcactttatacctactctccatctattccatctctttcctcctttcacaactcttatgctacggtcattctgggtgacttattgctcctaggacctgtcttacgcttcccttcctaagcctttgtctactctgctttgtctgcttttatgcttctctctcttttgtctgaactggtctctgtcctcgtccatgcttcaagtcctaattcaaatgccactgtctttatgaagggctccctgattgttccaaccaaaataagcttttattcctttgaacttgcatggcagtagtactttatttgtagctctgaatttctgagtatatttctcagtaatttgtgtcattgtttaatgcatgtcctatttccccttcttagtgtaaacttgatggctaagaccctgtcatatccatagaattagagaataatcaagttagaaaaaccttgtatctagtgtaactgtcttatttcatagataaatgaaaaactctaagacattaagtattttgactaagtcctcacagctagttagtggtagagtcaggactagaacacacatcaactctcaagcccgtgctgtttctagtctaatttatttgtgcctcttgttcttatagcccatggcagtaataaccattgagcatccactacatgccagggatcttacctacattatatctaattataacagtaatactgaagtatgggcattagtatccccatattatggataaagaaactgaatttcagtgagcttaaataactttgctgggtagaagaatttggagtcaaagcgaggtccacttgatttcagcaactatgctctagagtcagatattgaatgaataaacagaactgtctactgtttagggtgggatcttggagtagtcatttctggaaactaaaaatttggatagctgtctaagaaacaaatctcagccttcaaaatgattatatttagttgtcagggaagtgcaaattgaaaccacagtgcaatacatttatatgctttctgaaatggctaaatatagaagtcaaaaatttacctaggttggtgagagtttaaagcagaatttctcgactccaacacttaacattttggaatagataatcttttttttttttttttcgagatggagtctcactccattgcccaggctggagtgcaatggtgcggtgttggctcactgcaatctctgcctcccaggttcaagcaattctcctgcctcagcctcccgagtagctgggattacaggcacatgccaccacacctggctaatttttgtatttttagtagagacggggtttcactatgttggccaggctggtcttgaactcctgacctgtgatctgctcacctcagtctcccaaagtgctgggattacaggcgtgttgttggggccattttgttcattgtaagatgttgagcaacatcactggtctctacccacaagattccagtagcatccttttagttgtaaagaccaaaagtgtccccaggcattgccaaatgttcctggacatttgtgaaattatgaccaattgagaaccattgatttagagcaattggaactctcatacatggccgatgggactgaaaggaggtacaacttgaaaaactgtttgtagtatctactaaaggtgaacataggtatatccagaaattccaagccaaacagaagtaaatacataccccaattgtcatcaaagacctgtacaagcatgttcttagaggcactattcataataacctcaaacaaaaataccacccaaatgttcatcaacagtagaataggtaagtaaattgtgtggaatgctatacagcagtgagaaaagaggaaccaaaaatacatgcaacagtgtgtgcaaatatcgcaaacacaattttgaatggaaggaggcagacaaaaaatatattgtgtgattccatttttttaggtttcagcaacagacaacactaatatagtaaaaagtgaaagatttatataagctgaagaaaaaacagagtatgcaacactaatgtaggacagtggttatccttggaaccacttaaagtgaacatgaaagggtcttctagggtgttggcaacgaacattctgtttctttgatctggcttctacttacatggatgtgtttcatttatgaaaattattatttgtgtagttttcagtatgaatgttacaccttagtaaaaagttagggaaaaaactgtagcagattctatttgggagaagacacaaacttcccaaattaaccaattacaaatgaagctccagggaaaacctgatggtgatattagagtgacattgaggagacactgtgtaaatggccttagtgtggcatggataggcacaaagggaatggatggtacttcttttctgtgtcttgtcagtggaaatctgtcaaaaaataacaactgtgaagaacaattaaagcttgatgggaagacattaatttttcagtcctttatgtttacccagatatcttccaagttttattattctacattgctaatgaaagtaattatattatcttgatgaggttgagtttgagacagaaattctttgcacagaatgacactgatcatgtgagcccagctgtatttttcttaacacagccatttattaattgtactacaattcttatatgtacattagagagactctcacattaaatatttagattgcttattattgttatagttggaaagaattcataaaatatgcatatttactttaaaataagccacactctgataaatgtttattcatagtttcaaactgtaggtacattttctttcatttatttatttatttattttaagacaaagtcttattctgttacccaggctggggtgcagcagcatggtcatgactcattacaaccttgacttcctaggctaaagtgatcctcgtgcctcagcctctcaagtagctgggactgcaggtgtgcaccaccatgcctagctaattaaaaaaaaaatttttcttttttaaattgtagaaacagggtcccactatgttgcccaaactgttcttgaactcctgggcttaagtgatcctctcgccttagcctcccaaagtgctgggattacaagcataagccaccatgtctggcctgtggatgcattttaaaacggtaaattaactgaactgtttattatacaattttttgaaaattttttgtacgtttatttccaaaaagtatgcatttatctgaagatggaaaaaagcagtaaaacacatttgattttgagttctttatattaaaattattatccttactattgattatgacttggctatataaactatgtgatataaatgtctttatcatgaaagaagaaacatcacatttaatttatattaatattttttactaatagaccatatggtacatataattgtaatgttcctgaccactgcacttgaatgagatcaatgagactggaggttcatctataaaaagacattttggcttcccttatgcctatggtatacccagtgaccctcccattcattcaattgctatgaatggaagagtaagcaaacaggcacccacaggcccatcaggaagtaagaatgtggttatttcatagcacctgtaacttgtttgaaggctttttcatggtttttagctatgcatttacttttacaatctgcttagtgtctgccctctccactagaatgtatgttgtgtattcacagaatggagactgggtttgtacatatcgtatctccaatactttgcacagtacctcctacctaataggtgctagataaatatttgttgaataacaaataacattaaatttcctttaaaggcttgggccttatttaattggttatctaattaagtttgtatccaatatttgagattaatcattgaagtcattattctgttcaggtagaaatttctagcaggctattcacagtctaggagtggaactgaagtgagagttaggagacactgagaaaggtgctaatcgacgtggaaaaaggattcgattttaaggaaaagcatgtaaaaggagaagggaggaggattgaaaaatgaatcaagggaaatgcccagcattattaggggagagaggaattacagaagaatgaagaaagaatggagagtttcggagcaggaagtgaccaataatgaagctggagcccaaggagctactgtggaggcagaagacctgtggctctgggcagcctgactgagtccctgctcagccactagctggtagaacaaatcacttcaccataccgataatcagttttctctctgcaaggtgagtggattggcttctagctgatcccccagtttccttctagtggattttgcagttcccgaattttgtgaaaagtttctgtgagagtgagcaaaggccatggtgttgatgttttttgttggtaacatttaagccccacctttaaaagaatggaagaaaatgagcagtttatgaacactgggtagtgatagagagagcagtaggtgtagatcatttatttaaacagtttatgagaagctaagttggtggtgcagaagacactgcacgctaatttaacacgatcttttagggaaaaaattaacgtcttcatttagtccaccctttatcacaggtaattactgcccaaagaccctgaaatagttaagggtctgtagcaggtgataggtcagggccatggctaagggataatcatgatagttaccatttaataagcacttgatatgtgaaggtgcttttcatttgttatttatgaaatgtatgtcattctagtaagtattgttcacatttgagaaattaaaagtgaagctctgaggtgttagctaacttttttaaggtaatacagctagaaagtagcagagccaagattgaaaaccacatctgtcaaactgcaaaatccatgggtagtccaggtatgtcatttccaaatagcttggagtaatagtgtgggaaaataaaaggtgggagggatttaggtagccactgcttttttttttttttttttggcagatacttttaaaaaataattttgcataaattgattgactaaactccagtgacttacaccagtgattagctatgtgtggggcagtggggtaagatctccctggtctcctttttattatcatcacatgccagcaattctaaacaacatcagcaataaaatactcctcaaaagttctgtgtttgtctaactcctaaagaattgctgtggatgctgttgagtttaaattatctacttatctatattcatatagaatatgtatggatatatagtatacacacacatatataacatatacatacatgtacatatgacttattctttaagaaacattgtattcttcatgggagaaactttcagggcgtttccaattattggctagtctcccaacatgtgaagacttagctacatacatttgcttcaagagtaagtggttggtcaagttctgttttttggtcactgtggtagcatttgttacaaatatgctacgtaaagtatgttggccgggcacggtggctcacatctgtaatcccagcactgtgggaggcccaggctgtggatcacttgaggccaggggtttgagagcagcctggccaacatggtgaaaccctgtctctactaaaaacacaaaaattagccaggtgtgatggcgggaacctgtagtcccagctactccagagactgaggcaagagaatcacttggacctgggagacagaggttgcagtgagctgagatggcaccactgtactccagcctgggcaatagagcaagactccatctcaaaaaataaaaaaaaaataataataaagtatgttgaaggaaagaatgcaaaaactgtacttaaactcaaattatcctgaacaattataaactttggaaatgtttaccaagtataatacacatgtatgctgacttttttgatgaagattttttagtagcatttttttcttatgacagagacatttgaaagctgttagaatcaatctgcagaaacaaagacatgaacagcatttaattatgaaatgggatttcataaatctctgccaaacttatatttaagacgtttcctatccacttttatatctgttgcttcatgtgaagaaaacattttgaaagtaaattgattaaaacaaactctttgaagtactctcggggaaaatagattgataaatctcgctatactctctactgaacatgaatatttaaagaagatcaatttagacaacatcattgaaaaatatgcaggatttacaattaaaaacaaactgagatagtattgattactgtgacagagcaacaagaaggtataccttttcacttttgtataaataaaataatttattaatataattttaaaaatcaatgcatttttttcatttcttgtaatatctgtagttttaaaaaattatttgttttttcaaactggtataccagcacaatttcaactaaagaaaatatttactgcctgcatttcttttctagctgttattattatctcatttcatgattatttctgataataattttttatacataaaaaaggaatgttaaaaaatgatctactccaatatccaacatgctaactatgccagtagctaaaactaagggttatttctgtaaatcttcttggatgattgtgggaaatagcttcttatttctttgtgtccaccagagttctgagcacagcagttgataatttatacttgctgaatgaaagaacagatgacaaatgaataataagcaaacgcctaaaatgtgtcatgcttggtctgctagtattactggaaatctacatttttttttttttactgtgagccaaaaaacctaaaaataaattgactgctaatcagatccacaaaactactctgttaggtttatgctaaagatgagaatgactaaataaatatagtaaatttcagaattcttaagccttggtcccctaaatataatctgtaaaaatggcttgtaattttaggccttgtttgaacttttatttcatctgtaaaatgggaataataataatagagctatatacagttgaagtgagaataaaatgaagtactatatagaaagtgcttaacagcatgctcaaaatattctaagcatttgataaatgatagctattattatcaaataggaaatttatttttttttggtaaaatttctttgacctaagatggatccataaagctttcaaattgaggagaaaatacttgtagagcaatatgttattctttttattagtaatattttattttaaaaattatttttacttttagttgacaaatgataattgcatatatttatgggtacaatgtgatgttatgatatatgtacataatgtggaatgatcaaatttatctcattaagatatccatcacctcaaatacttatttttttggggtgagactatttgaactttactctcagaaattttgaaatacaccttattaactacagttactatgctatgcagaaggtcttaaaaaatgtattccttttgtctaactcaaactttgtaccctttgaccgacatttttccagcagcccccttcacccaatattttattcttaaaatttttagggcacaaggatttggtgagtgtagtttttgacagaattaagtgaaagccagaaatgatgaaaattgaaggaataaaaaccacagtagataaaaggagcaaaatatcctatgagatgcatatttgtagtttcctgcaagtgaagtttatgtcaggaccgcttgataaaatcctattcagaacttagcattgtgaactacacttcactgaccctgggggccccatgcagtattagatggcaataagcctccttgcaatagcagctgtgtcttcttgttcttcttatgtaaatgaccccagagaaagtagaagagtgacaataaatttaaatctttgatttcctttgtattcctcatgttatcctagggaagggctttgccactgagtcatatatgtacggtcatgtgctatataacatttcagtcaacaatggacagcatatacaatgatagtgatcccataatattaaaatggaactgaaaaatcctattgcttagtgacatggtagccatcatatgtgatagcacaatgcattactcacatgtttgtggtgatgctgatgtaaacaaacctactgcactgccagttgtataaaagtagagcacatataattatgtacagtacataatacttgaaaataaataactatgttactggtatatgtactgttatgctatactttttattgttattttatagagtattccttctacttatatttttaataagttaactgtaaaacagcctcatggagatccttcaggaggtatttcaaaagaatgcattgttaacaaaggagatgacagctccatgcgtggtattgcccccaaaaaacttccatggggacaagatatggaggaggaagacagtgatattatcctgaccttgtgtggccctagggtaatgtgtgtgtttgtatcttagtttttacacaaaatatttaaaaagtaaaaaaaaaatacaagttttaaaaatacagaacatctgatagaataaggacataaagaaagaaaatatttttgtacaacagtacaatgtgtttgtgccaagtattactacaaaagagtcgaaatgttttttaatttaaaagtttgtaaaatgaaacagttacagtaagaaaaagttaatttgtttattgaagaaagaaacatttaaaaaacaaatttagtgtagcctaagtgtacagggtttataaagtgtccagtagtgtacagtaatgtcttctgttctcctttttgatgtagaagggtcgtcctgggatatcattttgagagccaaagaatgagtcatctctcttagaagttggcctatggaatataaagaatttcatccatttcctatagtgatttcacctttgctcttctctgctccttggctaattggcagaggatatccaagagagaaaaaggcagagtcgtcaggtttgagacttggatgaattttcagcctatttgaagcatagaatttcttcatggcttatttcatatttaccaggaccatttccaaagcatatttttcctcttgtaggatatgactttttttaaaaaaaaaatttgttcctattgacataagttataccccaaattaaactgaccttttattttattttattttttattatactttaagttctggggtacatgtgcagaatgtgcaggtttgttacgtaggtatacacgtgccatagtggtttgctgcacccatcaacccatgatctacattaggtatttatcctaatgctatcccttgcctagccccccaccccctgacaggacccagtgtgtgatgttcccctgcctgtttccatgtgttctcctattcaactcccatttatgagtgagaacatgcagtatatggttttctgttcttgtgttagtttgctgagaatgagggtttccaggttcacccatgtccctgcaaaggacatgaactcatcccttttatggctgcatagtattccatggtgtatatgtgccacattttcttttttttttttttttgagacggagtctggctctgtcgcccaggctggagtgcagtggcgcgatctcggctcactgcaagctccgcctcccgggttcccaccattctcctgcctcagcctcccgagtagctgggactacaggcgcccgccaccacgcacggctaattttttgtatttttagtagagacggggtttcaccgtgttagccaggatggtctcgatctcctgaccttgtgatccacccgcctcggcctcctaaagtgctgggattacaggcttgagccaccgcgcctggcctatgtgccacattttcttgatccagtctatcgttgatgggaatttgggtggttccaagtctttgtgattgtaaacagtgccgcaataaatatatgtgtgcatgtgtctttgtactagaatgatttatagtcctttgggtatatacccagtaatgggattgctgggtcaaatggtatttctggttctagattcttgaggaatcatcacactgtcttccacaatggttgaactaatttacactcccatcaacactgtaaaagcattcctatttctccatatcctctccagcatctgttgtttcctgactttttaatggtcgccattctaactggcgtgagatggtatctcattgtggctttgatttgcatttctctaatgaccagtgatgatcaacttttttcatgtttgttggcaacataaatgtcttcttttgagatgtgtctgttcatatccttcacccactttttgatggcgttgtttgttttttcttataaatttgtttaagtttttgtagattctggatattagccctttgtcagatggatagattgcaagaattttctcccattctgtaggttgcctgttcactctgatgatagtttcttttgctgtgcagaagctctttagtttaattagatctcatttgtcaattttggcttttgttgccattgcttttggtgttttagtcatgaaggctttgcccatgtctatgtcctgaatggtattgcctaggttttcttccagggtttgtatggtttggggctttacatttaagtctttaatcttaatcttgagttgatttctgtataaggtataaggaaggggtccagtttcagttttctacatatggctagccagttttcccaataccatttattaaacagggaatcatttccccattgcttgtttttgtcaggtttgtcaaagatcagatggttgtagatttgtggtgttatttctgaggcctctgttctgttccattggtctataaatctgttttggtaccagtacaaggctgttttggttactgtagccttgtagtatagtttgaagtcaggtagcataatgcctccagcttttttctttttgcttagtattgtctttgctatgcgggctgttttttgggtccatatgaaatttaaagtattttttttctaactctctgaagaaagtcagtggtagcttgatggggatagcattgaatctataaattactttgggcagtatggctattttcacaatattgattctttctattcatgagcatggaatgtttatccatttgtttgtgtcttctcatatttttttgaacggtggtttgtagctctccttgagaggtccttctcatcccttgtaagttgtatttctaggtattttattttctttgtagtaattgtgaatggcagttcactcatgatttggctctctgtttgtctgttattggtgtataggaatgcttgtgatttttgtacattgattttgtattctgagactgctgaagttgcttatcagcttaaggagattttgagctgagacagtgaggttttctaaatatacagtcatgtcatctgcaaacagagacaatttgtcttcctctcttcctatttgaataccctttatttctttcttttgcctgattgccctggccagaactttcaacactatgttgaacaggagtggtgagaaagggcatccttgcttgtcttgtgccggttttcagagagaatgcttccagcttttgcccattctgtatgatattggctgtgtgtttttcataaatagctcttaatgttttgagatacttcccatcagtacctagtttattgagagtttttagaatgaagggctactgaattttattgaaggccttttctgcatctattgagataatcatatgttttttgtcattggttctgtttatgtgatggattacgtttattgatttgcatatgttgacccagccttgcatcccagggatgaagccaacttgatcgtgttggataagctttttgacgtctgctggattcggtttgccagtattttattgaggattttcgcatcgatgtttatcagggatattggcaaaaattttctttttgtgtcgtgtccctcctgggttttggtatcaggatgatgctggcatcataaaatgagttagagaagagtccctctttttctattgtttggaatagtttcagaaggaatggtactagctcctctttatacttctgatagaattcagctgtgaatcctttattttcttaagtggaggaagcctcagagggtatacaggttttttactgaatcagaacttttatgaaacagaactagggacttacaaaaaagagaacaccaatggaataataaaaactcctctctgataggaatcattaatgtttggtaactggacttgaagatgagaaatgctctgacattttggcaaaggtggtttctctactaaactttatgaaagaaatctctgtgacgagtttagagcaggaaatcaagatagtacctgccattattcaccccagcaagtggtccttctcttgccctaccctgctttggccttgatttcctaatatttttcccagtctctccttcctcttactgtattaaactcaaaagacatcattccgctttctcttcatgcctttagagagtggctcctttgaatgaaaatgcagttatgcttgatcccttagttacttagttggaaaactcccctgagagtgctcctgagagtcctctggagggctaattagggttgcagcatctaaggagatgttgagagtctcctttgggtaaagatgtaaggagggaagagaaaacaaacacatgtgttctgaaagctctttctggggccatatacgaaggcacattatcttggagaattatccataaaggatttgtcttgaaattattgtaatgtaaatggagcaactgtttcttattttacagaagtgtattctaatatgtgaaagtgtcttgccaccatgtcagaaaggttgctaacttgagacaacaattgggaaaagataaaggaaaattttaattcagtttgctcaggatctgctctgtgtcaagtacatggaaccttcttttatcatgggaaaaggaaaaataacccaatagacatttgttcagtgatattggcaaagaatttagggaagaaaaaaatcaaatagccaataaatatgtaaaaatcttaatcttcaatagtagccagtgggaggcaaattaaaacaatatttcatttaaagactgatagcattcattgtgggcaaaggaaagagtgtgaatttttactatctcttgaggaaataaccttataatatttattaaaattataaatacatagctttagactagcaatcctgttttagaagtctttcatgcaggaataaaaacatcagtatctaggaccatctcttgatttcagcattgtttgtaactgcctaaattagaaacaatcttaatgattgccattacaggagactgactaaattgattatagtataatcaaaccatggaacataggcagctattaggaggagtgaaatagagttctacattaatgtggaaatactccccaaatatgttagtattgaaaaagtgagatgtaaactctatactagaatggtttcacttaaaaaaataggagtgagactctgtaagtttagatacatttgtaaatacttgtataagttgaacattgagaaaattgtaaaaggatacatatactattacaattgataagcttagagggatgatattggtaaaaggaatgagaagactcatttttaaacttacatactaatgtataccattttaaaaccttttacaataagcatgtattaatttcatgatgtagaatgtattaaattgagagcatatcaggagtttccggggattagaagcagagggggcaggatttaactaaaaggggtcacataagggaatagttttggctgatggaactgttctgtattctattttgatggtgagtaatgacacattaatctatgcatgtgtcaaaattcatagaattttataccaaaaaagtgcattattttgtagcatataaatttaaaataaactatattagtgaagaaaaaaatatgggttaaaaatactaagaaatgagtaataaacatagtcctccaaaatattctaattataggctaaactgagacaaaaaaaattttaaagagaaaactggccgtaattttgaaaactttagggttatttttcagtttcagcccacttcatccttgacggtcatcaaaatgtcatttagtaggatagttcaataggtattattattaatcctgctttatagttaacaaactgaagtttaggggaatttggtagtttaccaagaactacataggtaaaagaacttcatgttgaaattcaaacccatgtaacaaacttgcacattctccacatgtattctggaacttaaagtaaaataaattttaaaaaagaaatttaagatttctaaaagtaaagtatctacaggattcaagccatttgtatgaattaattataagaaggcaaaaatgaaaaaactagtaagatttaagatagcggtatgctcctacactttaagtgtaatcaaacagacctaatatataagtagtcacttgtggtcagtactgatccaagcacctctgaaggctcagtggacttagtgttgtgtaattatcacagtcatctctgtttataattcaattgaggatgctgaaaataaggtcatatattttataaggaatcttaattcaactgtgcaaaagaacatgacctatactcttgtaaaatagcttttaatgaaatactagaggataaagagtcaatggtaaatgatttaatgagtcatcaaagtacaaaaagtataatgaatttaaaatatatttagtaaccctatattcacatctatgacaatgttgaactgtgggtttttcatgtcagtaggagtcaagtggcataagagatcagtagttgtatatttaacgttgacagtttgcgttgtaattcatggatatggctatttccagtatgaatattaaatatctgtctgcctcttaagtgatcataattcaagactgtacattttaaacaaaaactgttttacaagagtagaataagaatttcctcactgacttcacccaactcaagctttttttttatttcttacattttctctctttttgtcatttttttcagtgtccagtgatgtctttcatttcttgcctcatctatctaaaccatgttcatctgttctcagcacagttgaaataccatgtctctcatgtaaacatctttagaaagaattctttttattttctgaaatattactgtacatagaatagaatagtcttagttttatgcaagttaatttcatctccccaaataaattgtaagtgcggagactgttacaagctccttttacatttttctagcatccgttcattcaatcaggtagatagtgatcatttttctatatgaagccccatgctacctggtgaaggagacacacagatgaccaaaaactgatccctgatcttaaagagtttatacagtaaaagagataagaagctgtacatgtgactccagtactaaacattatgtgacatagcgtaataggaaaaaaactgaaaagacaccgttgtattgctgaaacaggtagaggacatttcttctaatgggtctttgaaatactcagtgaaactatcctccttatcggttttcttatcgcagaattttttctcatgtctgacattaacactaataattcttaaaatcatatataactttttttcagggaaagcgttaattgaaaaataccatttttaaattctgatttacacatttttttccacattgtaatgtctctgaaatcatgtgtcatataaatggtgttttacaatcacttttggggatatggcaatcatgacatacaggattaaacaatatgaaattgccaatattgaactgttttcgacctacaagaacagaaatatataataatagccagcccatttgtaaattttgttatttctgttcatcttgccatcacctcaaatatgttaggttcattattgttactacatattttgagtttgctgcctctcaaaatgtcctaaaaatatactgtatgtatcgttgaaatgaaaggtaatagtgcatgcagaaaggcatgggaacagagaagtgaggcctatatttgacattgtaatgagtatttcctatgagataaatgacctcaattatctatttcttgcacaaccataaccaagtcttgaagaagacttaaaagggaaatacccacaggtagataaatttgtgctatgttgtttcttagatgcatgaaaaaaacactgcttttcacttcccagtcaatacaaccagaggtaaaagcagttgccaaatcacccggaagtgaatgaatacactcagtattaactatcataagtccaccccttgtcaacttaaacccatatacatctcctgaaatcatacataatcttcaaataaagacaataataaggtcataattatgcctaacataatacagctatccttcatacaaccgggagcatactaatccttaacctaaatgctattacataaagataacaacacttaaataatgacatgaagtcaataaatcttatgttacttgataaaggaaaaagaaaggaaataaaatgaagatattttcttagtacaagtgtatatatgcatgaacatgttcttagcaaaataaggaggaaatactcatgacaattacagttctcatttctgcaactggtcatgtagtcgtagctggtattaatgactaccttcttctactacccatctgtattctaattttccaatcatgcttcttccaagtccctggccacccagccaaaccattggctgtagcccatgaaatagtatataattgcacatctggccatttctccttccaagcaaagtgcacaaccaggtgcactgctcgaagttctgcccactgggaagatttcccttcaccactgtccttcagggatgtcctaggaaaggactgtagtgctgcagctgtcctcttttgggtggtgcctgcacgtcatgcagaactatctgtgaaccaggccttagtcttctcttcctctgtcagctccacatgaggccatcggggcagtctaagggagagaaggcagggtggcaagagtggagaccatgggcatttgagccacttcctcacgtaacttacttgtgccttcaggacctgctcaagcctgatcgcgtatataccacttccatttgatgactgaatgctgctgtgcatgacccactttatggctagatgggtaagaaagcaccaagttcatgataggaagttcaggtctcatggtgacttgatgaccactagtcaaaagttcagtttctaccaaagcctaataacaggccaagagctgtctctcaaaaggagagtagttatctggagaagatggcagggccttgctcccaaatcctagaggcctctgctgtgattcacctatgggggccttccaaaggctccaaacagcatccctatctgccactgacacctcaagcaccattggatctgctggatcatatggcccaagtggcagagcagcttgcacagcagcctggctctggacctcactcaaaattggcacacttcaggtcgctcagtaaatgggctggcataacacacccaaatgaggaatgtgttgcctcccaaatccagatagttgtaggaggggccaaatgcagcaacttatctttcaccttagaaggaatatctcaacgtgccccacaccactggacccctagaaacttccctgaggtagaaggtccctgaattttagttagatttatttcctgtcctctggcacacaaatgtctcaccaataagtccagtgtttgctacttattgctcactggatccaatcagcatactgtcatcgatataatggatcaatgcgatatcttgtgaaaaggaaaagcaatcaagggctctgcaaacaagattatgacacaaagccggagagttgacatacccctgaggtaggaaagtaaaggtatactgctggtcttgccagctggaggcaaattgcttctagcagcctttatgaacaggaatggagaaaaaggcatttgccagatcaatggctgcatagcaggtaccaggaaatatgttaatttgttcaagcagtgaaaccacatctggtacagcagctacagctggagtcactacttggttaagctcatgataacccatggtcattctcagagatccatctgtcttctgcacaacgaaccaggagacttgaatatggatgttatggaaatcaccacccctgcgtctttcaagtccttgatggtggcactaatctctgcagccactccagggatgtgatattgtttttgatttactgtttttctaggtggaggcagctctaaaggcttccatttggcttttccatcatagtagccctcaccctacaagtcagggagccaatgtggggatttagccagcagctaagtatgtctatgccaattatgcattctggctctggggaaatgactgcaagatgagtccaggaatgcattggatacactgtaactcagacctgaactaacaatccattaattacctgacattcacaaaccctactttaactggaggaccaatattgatgttttgggtcccctggaatcaatgtcagctcgagccagtgtccagcagcccctcaaaggtctggtcattcccctttccccagtgcagttaccctgtggtctggtttggctgtgtccccttccaaatctcatcttgaattgtagctcccataatccccacatgtcatgggagggacttggtgggaggtaattgaatcatgggggtgggaatttcccatgctgttttggtgatagtgaataagtctaatgaaatctgatgattttataaagggtagttcccctgcatgctctctgttggctgccaccatgtaagacatgcctttacttctccttcaactcctgccgtgattgtgaggccccccgcaacctaacagttaatgtggaactgtgagtccattaaacctctttttctttataaattatccagttttggggtatatctttattagcagcgtgagaatggactgatacagtgaattggcaccaatagattggggttctgctctaaaaatgcatgaaaatgaggaagcaactttggaactgggtaacaggcagaggttggaaaagtttggaggactcagaagaagaactggaaaatatgggaaatttggaacttcctggagacttggagagctcagaagacagtaagatgtgggaaagtgtggaacttcctagagacttgttgaatggctttaaccaaaatgctgataatgatatggacaatgaagtccaggctgaggtggtctcagatggagatgagaaacttgttgggaaatggagcaaaggtgactcttatgttttagcaaagagactgatggcattttgcccctgccctggagatctgtggaattttgaacttaagagatatgagctagagtatctggtggaaaaaatttctaagcagcaatgtgttcaaagaaatggcttgggtgctcttaaaagcattcagttttttattcacaaaaatatggtttggaatcataacatgtttacaagggaagcagagcatagagtttgaaaaatttgcagtctgatgcaataggaaagaaaaacccatcttctgaggaaaaattcaagctggctgcaaaaatttgcataagcaatgaggagccaaatgttaatcaccaaggcagtggggaaaatgtttccaggcatgtcagagaccttcacagcagtgcccccatcacaggcctagaggcctagtaggaaaaaaaaaaaaaggttctgtgggtagggtccagatcttgctgctgtgtgcagtctagggacttggtgccctgcatcccagctgtggctaaaaggggccaacgtacagctcaggccattgcttcagagggtgcaagccccaaaccttggtggcttacacatggtgttgggcgtgtggctgcacagaagtcaagaattgaagtttgggaacctctgcctagatttcagaggatgtatggaaatgcttggatgtccaggcagaggtgtgctgcaggggcagagtccttatggagaacctctgcaagggcagtgcagaagggaaatgttgggtgggagcccccacacagaatcctactggggcactgcctagtggagctgtgagaagaaggctactgttctccagaccccagaatggtagatccacaaacagcttacactgtgtatctggaaaagccacagacacaacactagctcaggaaagcagccaggagggaggctgtaccctgcaaagccacaggggcagagatgcccaagaccatgggaacccaccccttgcatcagcgtgagctggattgagaaatggagtcaaaggagatcactttggagctttaagatttgactgccccactggatttcaaacttgcatggggcctgtggccccttcattttggccaatttctcccatttggtataggtgtatttacccaatgcctgtgccctcattatatctaggaagtaactaccttgcctttgatttcacagtctcataggcagaagggacttgccttgttacagatgagactttggactgtggacttttgcgttaatgctgaaatgagttaaaaccttgggggactgttgggaaggcatgattggtttggaaatgtgaggacatgagatttgggaggagtcaggggcagaatgatgtgatttggctgtgtccccaccaacatctcatcttgaatattagctcccaaaattcccaagtgttgtgggagggacgtggtgggaggtaattgaatcatggggttggatttttcacgtgctgttcttgtgataatgaataagtctcatgagatctgatggttttatagagggtagttcccctgcacatgctgtctctcttgcctggcaccatgtaagaggtgcctttgttcctcctttgccttctgccatgattgtgagaccacttcagccatatggtactgtgagtccattaaacctcttttttctttataaattgcccagtcttgggcatggctttattagcagcataagaatggactgatacaccctagtaaaaggctggatgtctccctggggaaggatgggagagagattaacagtataaattgtcagtagtgttgtggggttcttcctcaacgggacctgacctctccttcattaaaggggttctggctctgttaactggttcaagtctgaaaactgattgaggggtcatgattccctatttttataattaaaattagttttttgtccattcagcctggaagttttctgcatgtacaaattatgtaagaatacagcaggcctccgatcaatttcacttccaggaatactgtgattaattagccaatgccagagctctacatgaatcagactattctgattgcttctttgcctctgctgttcattatggtaactacacccaccttgcctttgactgttgcgtgcctccagttggcccctgccacctcaggatccaattattcccattgtgtttaagttttccagttgagtgattgtggttcccactgtaagatgtggcatatagagaagagcaatgacagagctcttcaaggatgtaggtgctcccctcacaaatctgttttgcaaggtattggtgaagggtatgtcttctggaccctctcagctgggatgagtaggtctaaagtgactaatccactctagcctttcaatctccctaagcctttggatccctttctctacattaaaccaagggagatcaggcatttccagctcactcacagtggggcatctttggtccatgtttcagttaaccaagcaaataaactattagaacgttttttaactcccagagctggcaacattaaatgcagatatgggccctctaaggagggccttctaaggagggcccatatcaatataactcccagagctgcaacgttaaatgcggatatgggccctccttagatggcccatatctttcaggccatatcaacctgaaccaactttatattctttccaccattatctcacacccttaatatccattttcagagccgttctccagatttctgcttatattagaaaactcaagcagttcttttggaattttgtgcacctcctgtgagacacactctgaacctcacctctaggggtctgctggcccttgattctagttgtaggtctagaagcaaacagggctgttgtggtgggtcctgaggagaatcagcattgtctggcatggcaactgcctcaggggaggccatcactgttgcctcaggcagtgcatggttgttctcctcagagaaaggtgagaaggctgatggtagtgtggttgtgggtagggatgttgtcactactgggcacagtggctccagcctcatcagggtcttcccacacatccccattccaagttgcagggacccattcttttccaatcaatgccctcactttaacagtagacacctggtgaggctgagtgtgcaccttttgttgcagctcagccactcacacgataagggcttgtgtctgattttccacaatgtcagccctttgtctgtaggaggtaagactcactcaggtcagtcttagaagttttgaggctcagtatatgcttctggagccaggaattagaatctctgaggtcattgttttctttcgtcactttatccagtgaacttaggagcaaccaacttcattatattccttggttctccacatatggttgaaggtattatgtatagagtcactaaactccttgcccctcaaaagtgatgattcagaagtatcaaatgcatttattttgtataactctctaaacagttcatgccaaagactatcagtgttctccatactgttagaagtagagtccttagtattttggggtttaatcagattaagaagccaactccagaaaccccaaaaccaactaaagaaatccatccttaaattcagttcctctagaaccactcctggtaccaaaatctgtgttagtctagattctctagagggacagaactagtgggatagatgtatatatgatgaggagtttattaaggagtaccgactcacatgatcacaaggtgaaatcatacaataggccctctgcaagctcaggagcaagaaagccagtctgaatcccaaaacctcaaaggtagggaagctgacagatcagccttcagtctgtggctgatggcccaagagcccctcgcaaaccgcccgtgtaagtccaagcgtccaaaagctgaagaacttggagtccgatattcaagggcaggaagcatccagcacagaagaaagataaaggctggaaaactcagcaagtctgctctttccaccttcttttgcctgccttattctgtctgcactgacagctgataagatggtgctcacccagattgagggtgagtctacctctcccaatccaccgactggaatgttaatctcctttggcaacaccctcacagacacacccaggaacaatactttggatccttcaatccaatgaagttgacactattaaccatcacactgtcttttgtctttttgatagtagctcttctaacagctgtgaggtgttatttcattttatttgcttttatttggttttattttatttattgcatgttatttggttttaatttgcatttccctgatgattactgatattaagtatttttttaatatatcacttataagtcttctttgagaaatgtatattcatgccctttgtccattttttaattgggttatttgtattcttgctatggtttgtatacctcgtatattttgaatatatacacaacctcatatattcaaaacacccttttcagatatatagtttgcaagtattttctctcattctataggttgtctgttcactctgttgatagtttcctgactttgctttgtttcctaatcttaaaaatatctgtataaagcactcatttttctttagttaataatgtaaaaaagactgcattgacacagttaaattctcaagattctcagttctttagggatggacttaatggttggtatcattacttacaaaagtatcttgaacttgattgaacttattttgagaactaaagtttataatttttatttttatcttttaacttcatttttccatgaatcttttgaagtcctcttttacaattgttcatagtagtctctcatgatgcattgtatgtctgctttatcagttgtaatgtctcatttaaaagtttttatttgagttttctctctttttttcttagtctagctataggtttgttgatattaatcatcatttcaggaaatcaactcttaattttgttaacttttctattttttctggtctttatttcatttttgttctgatctatattacttccttccatatactttaagcttaatttgttcttgctttcctcctttcttgaggtgcagtgctagattgtttgagatgtttctttttttgatgtgggtatttattgctgtacactttcctcttataactgcttttgctatatcccataggtatgttgtgtttttattttcatttgtcttaaaatatttttaaatttttctttaaatttcttcattgatcattggctgtttaggtgcatattaatttccatgtatttatgaatcttctgaaagtcttgctgttattaatttctagttttataccattgtggtcagaaaagatagttcataaaattttaattttcttaaatttatgaagacttattttgtggcctgacatataatcagtcctggagaatgttttgtgtgcagttgagaagaatgtgtattttgcagttgggggatgaagttttctgtatatatctgttatgcctagattgcagtttaactttgatgtttccttcttgattttctgtctggttgaatctgttcattgctgaaagtggagtgttgatatcccctactattattgtattgcagtgtgtctctctcttcagatctattaatatttctcatatatatttaagtgctacaatgttgtattcatatctatttataaccattatagtctcttgcttaattgacccctccatcattatataatgatcttctttgtctctttgtataggttttacttaaagtctattttgtctgtataggtatagttactcctgctcttttttggtttctatttccatggaatatctttttctatcccttcactttgagtctatgtgtttccttacagttgaagtatgcggtaggcagcatatacttgggtctttttttatccattcaaccattcagtgtctttctattggagaatttaatacatttacattcaaggtaattattgatactgctgccattttgtttattgttttctagttgttttgtagagtgattctttctttcttttttctttcttttttttttttaagatggagttttactcttgtcacccagactggagtgcaatggtatgatcttggctcactgcaacctccacctcccaggttcaagtaatcctcatgcctcagcctcccaagtatctgggattacaggcttgcgccaccacacctggctaattttgtatttttagtagagatgaagtttcaccacattggccaggctggtctcaaactcctgacctaaggacatctgcccacctcagccttcaaaagtgctgggattacaggcgtgagccaccacacccaacctctctctctctttctttcttctttctttctttctctctttctttcttctttttttttttttattgatcattcttgggtgtttctggcagagggggatttggcagggtcataggacaatagtggagggaaggtcagcagataaacaagtgaacaaaggtctctggctttcctaggcagaggaccctgcagccttccgcagtgtttgtgtccctgcgtacttgagattagggagtggtgatgactcttaacgagtatgctgccttcaagcatctgcttaacaaagcacatcttgcactgcccttaatccatttaaccctgagtggacacagcacatgtttcagagagcacagggttgggggtaaggtcatagatcaacagcatcccaaggcagaagaatttttcttagtacagaacaaaatgaagtctcccatgtctacttctttccacacagacacagcaataatccgatctctctatcttttccccacctttcccccttttctatttcacaaaaccgccgtcgtcatcatggcccattctcagtgagctgttgggtgcgcctcccagaccgggtggtggccgggcagaggggctcctcacctcccagaaggggcggccgggcagaggcgccccccacctcccagacggggcggcggccgggtggaggtgccccccacctccctcccagacagggcggctggccgggtgggggctggccctccacctccctcctggacgaggtggctgccgggcggagacgctcctcacttcccagacggggcagctgccgggcggaggggctcctcacttctcagatggggcggctgccgggcggaggggctcctcgcttctcagatggggcggctgctgggcggaggggctcctcacttctcagacggggtggctgctgggcggaggggctcctcacttcttggacggagcggccgggcagagacgttcctcacctcccagatggggtcgcggccgggcagaggcgctcctcacatcccagacagggcgccggggcagaggtgctccccacatctcagacgatgggcagccgggcagagacactcctcacttcttagatgggatggcggccaggaagaggcgctcctcacttcccagactgggcagccgggcagaggggatcctcacatcccagatgatgggcggccaagcagagacgctcctcacttcccagacggggtggcggctgggcagaggctgtaatctcggcactttgggaggccaaggcaggcggctgggaggtggaggttgtagctagccaagatcacgccactgcactccagcctgggcaacattgagcactgagtgaacgagactccgtccgcaatcccggcacctcaggaggccgaggctggcggatcactcgcggttaggaccagcccggccaacacagcgaaaccccgtctccaccaaaaaaacacagtcaggcgtggcggcacacgcccgcaatcacaggcactcggcaggctgaggcagaagaatcaggcagggaggttgcagtgagccgagatggcagcagtacagtccagcttcggccgggcatcagagggagaccgtggagagagagggagacggagagggagagggagaggagggagagggagaggagggagagggagaggagggagagggagaggagggagagggagaggagggagagggagaggagggagagggagaggagggagagggagaggagggagagggagaggagggagagggagaggagggagagggagagctctttcttttttctttctttctttcttttctttctttttttcttctttctttctttctttcttcttctttctttctttctttctgtttctttcatctaagcatttttctttaatggtatgttttgattccttgctttttatttttttgtgtatccactatagatttttgctttgtgattaacatgaagcttgcaaaaaatctaataactttcttttaagccaataaaaacttgattttgattttaaaaaaacccacaaaatatacatttattccattcctcccctcacattttgactttttgatgtcataatttccatctttttatatttcatatttcttaacaaattactgttgctattattatttttaatagttttgactgtcaaccttcgcactgaagttataagtgatttgtgtatcaccactatagtattagagtatgatgaatttgtctgtgtgactagcagtgagatttgtactttcatatgtcttcatgttacacattagcatccttttctttcaacttgaataattccctttagtgtttcttgtaagacaggcctggtggagatggattccctctgcttttgtttttctgggaaagttgttatcatgccttcatttataaagctttgttgggtacagtattattggttgacagtttgtccctttaggattttgaatctatcattctgccctctcctggcctgtaaagctcctgttgataagtctgctcctagctgtactggaatcctattatatgctatttccttcttttctcttgctgctttcagtcttctccttgtctttgagtttttgacagtttgattataataggtactggggtagtcttatttgaattgaatttgattggagatatttgacctttctgtatttcaatatttacatctttctccaggtttagaaaattttctgctactattttataaaataagctttctatccctttatatttcacttttcctttttgaactcctgtgactggaatatttgctcttttgatgctgttccacaaatcctgtaagctaacctgatttctttttattatttttttccctcttctgactacatattttcaaataacctgtcttggagttcaagttatttgtatctacttcattaatttactctctatagcatttttaatttttaattttgtttgttgtatttttcagctcctggatttctattttattattattattattattattattattattttctctttattaaattttgctttttggtaatttattatttttctcattttgttgaatcatttttcatatatcctgaagttcactaagcctacttaaatggttattttgaattttttttgtcaggtggtttatatatttcattttttagggtcaatcactggaacctcattttgtctgtttgatgatgtttccttaattcttcttgattcttgtggtcatgtgtctatgtgtgcatatttgaaaaagtagatactcatttcagtatttgtaaactggctttgtctgggaaagccctgtggcaggcatggcactgggatgggccagaagctcagagccactgagggctgcctgtcactaaggattgtctggagcatggagctgctgaagtcagcctgctggtgatgtggtctagagatcaagtctaccacagaagcctaaatcctggggctgtgtgctccaatatggcaccaaggcatttctacaggctcagtccaaaagtaccatcacggagtatgagactatagaagtcttcccagtgctgagttttactgtagtaggccgtgtggtggaatccaaggcaaagtcctgtgctcacttctgtctcttccctccaagcaaatggcatctctctccatgctgaaatacctggggttggggaagaatgatgcgagtaatgtaaaattgtccttcccatcctccgtattatatcttttctcactgttttgctacagttagatactgtgatctctcacctggttttcttagctcttgtgtaggtatttccatgcatgaatggtttccaaattgatgtttttgttgggggataactactggagggccatactctgccatcttgctctgcctacctctctccagtcggcatattttcttgcatccaactagatctaaaatgttatctaattcacttttccttcgccttgtattatatatgttttaaatttatttttaaattttctttcatatttataaatattcagataaactgtcatatactggtcatttcctgtatttatgacattatctctgtccttcattaaactacaatctacatagagagacaagatcagttaactaatggctcaagatgatatttgagatgatggaaatatataaaatggaaaagcaaaaactcagcacagataagaagcacttgagaatttgaaaaaagattttcacagcaagagaaggttgcaagaacttcaggaaggactttaaatatgtcttgaagtatgggtggaaattggatagaaagagaagaaaagagagcacagacagtgaggaataggttactagaaagacggcatgagaaattcccaagctatttttagattatggggagtcttggagaatgggattaattgcagatgaggcaaggagaagacttgggaccagaatgagggagatatttaattggggttttaacgtattggtggtatggtgttgttaatgattatcttggtcaattttacttatttagctatggaaactttaaatttatctagcaccatttcttacttttaaatatgttttccatacatgcttttcagacttttaattattaacttacacaaaatgctataattcatattttggaagatacctatttaaatcttctagtacagcctataggagagtataaaagtagaaaaaaatagatgttaagtgaatagtagtgtgtttctggaatattttgctccaaaagaaaatatcctcaaaatttagtttttttttttctaaacagtaaactaagctgtgtgtctcttgatttcagatgctatattagttttctttggttaagtaacaagttattataaacagtagcttatgacacctatttattagtgaaaagttctgtgggtcagaaattcaagcatgctaggctgggatgtatgtatggaatatcacaagaatgaaatcaaggtgttagctagtctgggctcttatctggaagctttgggaaaatctctggctccaagtgcaatatattttggcagaattcatttcttttcatagctgtgagagtgaagtctccatttacttgctggttgttagtcaggggctaccttttagcttctaaagactgctcttcttccttgttcttgagcccttccatcttcaaaccatttgtcaaaacgttctctagctttatatctttcttatttgctcttctgccttcttatatcactgttcaaggaaaactctgcttttaaaggactcatgtgattagatttgaacacttggataatctactaattttaagtctagctttaccatataacatagcagagtaatattttatcatagtcacagtttccacctatactcaaaggagagcttataaaaaggtaagggttattggggggtcattcctagaagtctacctaccaaaagtatgtatttgtttattgtcaaaacttaatattatacataatataaatactgcaaataataattgttacagaaatgtataataatttagggattagtgaaaaacacatgtgatccagaaacaatgactatgtttcagtaagaataaaataaaaattaaaacatatctaaatggttactctttgggaacaaaattaaactcagttaatataattattattattattattattattttgagacagagtctcgctctgtcacccaggctggagtgcagaggtgtcatctcggctcactgcaacctctgcctcctgggttcaagcgattctcccgcctcagcctcctgagtagctgagattataggcatgcaccaccatgcctggctaagttttgtatttttattagagatggagtttcaccctgttggccaggctggtctcaaactcctgatctcgtgatctgctcgcctccgcctcccaaagtgctaggattataggcgtgagccaccgtgcctggcctaatataacgtttataagcaacttgtactttctgtgcaacacatgacattacactgatacattcaacaaaggccctttaaaagggcaattcgccaccatcctgtgagccttataatgtaacgcttcattgactactctggcaactattctaaatcacattttggcctaattagatatcccaacagtgaattcagatgtttcatgactgggctagaaagagcatgatgatgaagtgggagctgatagaaagctccccttcctcccagtattctagatgaaaaataacatagtctgtgttaaaaatctgttacaacttcaatagttctatttcttctgagaaatgtaaaaaaaaaaaaaagtacacattcatgaagaaagagaaaacctatcacaatcatatcagagtaaccatataatttgactgtctacattcctgtcctgaccacttctagattctaagtgcttagagctcattactacttctccatgtccatcactgctttggctcaaatacaaccatcacatctgccatggctagtaatcttgactacgaagtcaacaggtattcttctcccagacacactacagtatgccctgtatctgacttctcatttctaggatactggtgcattttttagtgctcttcagcatagtaactggtcatggcccagctgaggttcattcagtgatatttattgctttattaaataactattagtctggttaccttgtgaactggattctgctaggcactatccatgcctaataattatcctcaaataataatccttataattatctaattataactatcctaaagttgaagaaataattttcgcaattaaaaattctacaaatgttcattgaaaacaaacagttaaggacaaaaattataagattacctgcaacatgaatttcaaatttttgcaaaatgactctttcaaaagatccattgaagataaattttaaattgtttttatttgttataaaattagcacatataccattcttctcaaaacgaaccagaaaatgtatcacattgccgtgagtgggcaaagggcatgatctattttacccgggcaggagagacagaaagctaggaaagttaaagaggagctggggctgggtgcggtggctcacgcctgtaatcccagcactttgggaggccgagacgggtggatcacgagatcaggagatcgagaccatcctgactaacatggtgaaaccccgtctctactaaaaaaatacaaaaaagtagcctggcgtggtggcaggagcctgtagtcgcagctactcgggaggctgaggcaggagaatggtgtgaacccaggaggcggagcttgcagtgagctgagagcgtgccactgcactccagcctgggcgacagagcaagactctgtctcaaaaaaaaaaaaaaaaaaaaaagaggagctgggtcttctaagatgacttggcgtttaagaggagaatcagggagaaaataggtaaatgtagagaggcatgatagagtaaaggaccatagtaagcatttaaagaaagggtagagaaaacaaaattaaaagaaaatgtgattttgatagattttgtatgccacgttcagaagtgtaccatcaggatggtagtccagaatttccagctttgcctgtgaattgctacaaagtaaggggctcctccaagtccctggaccatcaaggatggaatagaacaatagaaaagatcttcatcctcactgaaacctctcctactgctgtagactaagcaagatgatcctgaaaaatacccacttttggaaagaaaaatatttcataaataaatacatgcatatctttattttagatggaatactgaagtgaggacaatcctgttaacattttatgcttaaattattttatgttatattactatacattttgttctaatttacctttacaggaatatttagtcattcaaaatccttgcctttgagtactgctttattcctgtttgtgctgttaaagttcagccagatggaacttgtccaagcccttatttctatcagacgtttgaacagctgggattctgtagtttctgagtttgaagaaaaaagatctgcagagatcctgtcagcaagggccatgtgctttcatgatctctcctagaggcttgatattcacacagtttcatttgaaagaaactgacatttgtaatttatgtcaggatggaagagagagtgagaaggaattgcatctaatatctggcttttaacattgcaggacttttgtgattgctttgctaaatccattttagaacattgtaattatgttgttattctatcttgtgaagtatttggcatgaagcaaagatttaagtagttctaggatggaatttttttttacactgttgaaaaaacggaagttgttattttaaattgtgaaagtaggtatcagtgggatttacacaaaactatttcatccttattctcatttttcaattgcttaacataatcttcatgaaaactaactttaaaagttttgtcaaaaataaaattcaacttgtttcatgttgcccttggggacatgctgagagtctgaacaaatgctatgtttagattaggactatctagttttgatacagataaagctatgttaaaataagaatgacctttaaaaatccaaaaatactggataatacgaagattttgtagtaaaaagctgtaataacaaaacagcaggattttcatagtagtgtagttctgactggaagtcagaagatttgagattgacagctgttgaacaatacagtgcataacatgagtcatatatggtagcattttatttggatagttcattagttgcatattggacctcattaaacacttaaatagcgttaagctttaagacagtaacatgcaaacgggtctaagtgtaacttacagagttccttcaataattatttgtatcacagctaatacttggaaaatcactatggtcatgacaagagtattagagtagaaagggactcctagaaatcacttggtggcaatttttaattaattgaggtgtaatttatatactatataacacaggtcttaagtacttagttcaataaaatttgacagttgttgactcagtatgcaaacacatcaccaattaaaacattgaacatttttatctttccaaaaaggtttttcatggccaggtcaatattgatacgcccccttcacccagaaacaatcttgttcaaatttgtattacagtagcctagttttacctgctctagaacttcataaaaatgaaatgactcattatgcaaacttttgtgttgggcttctttagctcaatataatatttttgagataattcatgttgttttgttatcagtatttgattctttttaaaaaatgtctgggccgggcacggtggctcacgcctgtaatcccagcactttgggaggctgaggcgggtggatcacgaggtcaggagatcgagaccttcctggctaacacggtgaaaccccgtctctactaaaaatacaaaaaattagccgggcgaggtggcgggcacctatagtcccagctactcaggaggctgaggtaggagaatggcatgaaccctgcggggaggagcctgcagtgagccaagatcgcaccactgcactccagtctgggtgacagcaagactctgtctcaaaaaaaaaaaaactgtctgaattgcattttgctgtatgaacacaatacaatttcttcatcaaatttccatttgtggacgtgtggtttattttcatgttgggattgttatgaataaagctactatgaacatatttgtacaagtctttttgtggacacatattttcatttctcttgagtaaataccaaggagtggaactgctgggtcataaagagattgtgtaattagctttatgaaaaactgccaaactaacttctaaaattgtaatacaatttttcacttccactagcaatttaggagagttctacttgcttcattttcttgtcaacacttgacaatgtctgtattaatctgttcttgcatcactatcaagaaatacctgagactgggtaatttataggaaaagagatttaattggtgcatagttctgcaggctgtacaggaagcatcgctctgacatctgcttctgaggaggcctcaggaatctgaatcatgtcagaaggtaaagcaggagcaggcatgttatatggcgagagcaggagcaggagaaagataaagggtcagggggtgtaggtgctgcacacttctaatccaccagatctcatgagaactcactatcaccaagacagcaccaagccaggagggagccaccctcatgaaccaaatacttctcactaggccccacttccagcattggggattacaattcgacatgagatttgggcagggacaaatatccaaagcatgtcaatatcattttcataatttttttacccaatcacgtgggttaaaagttgatatggtttggctctatgtccccacccaaatctcatcttgaattgtactcccgtaattctcatgtgttgtgactgggaccctgtggaagataatttgaatcatgggggcagtttcccctatactattctcatggcagtgaataagtctcacgaaatctgatggttttaacaggtgtttccacttttgtatccttctcattctctctttgcctgctgccatccaataagatgtgacttgctcctccttgccttctgtcatgattttgaggcttccccagccacatggaactgtaactccaattaaacctctttcttttgtaaattgcccagtcttaggtatctctttatcagcagtgtgaaaatggactaatacagtaaattggtaccattagagttgggcattgctgaaaagatacccgaaaatgtggaagtgactttgaaactgggtaacaggcagaggttggaacagtttggagggctcagaagaagataagaaaatgtgggaaagtttggaagtccccagagacttgttgaatggctttaaccaaaatgctgataataatatggacaatgaaatccaggctgaggtggtctcagatgctgagatgagaacttgttgagaactggagcaaaggtgactcttattatgtcttagcaaagagactggcagcgttttgtcccttccctagagttttttggaactttgtacttgagagagatgatgtagggaatctggcagaagaaatttctaagcagcaaagcattcaagaggtgacttgggtgctgttaaaggcattcaattttaaaaatgaagaagagtatgaaagttcagaaaatttgcagcctaacaatgcaataggaaggaaaatcccattttctgaggagaaatccaaaccagctgcagatatttgcataagtaacaaggagccaaatgttaaaccccaagacaatggggaaaatgtcttcaggacacatcaaagatctttgcagcagtccctcccattacagacctggaggtctaggaggaaaaaatggtttcatgggcagggcccagggtccccatgctgcttgcagcctggggacttggtgccttgtgtcctagtcactccagctttggctgaaaggggcaaacgtagagcttgagccatagcttcattgggtgcaagccaccccttggcagcctccacatggtgttgagcctgaatgttcacagaagtgaagaattggggtttgggaacctccacctagatttcagaagaagtatggaaatgcctggatgcccaggcagaagtttgctgcaggatggggctctcatggagaacctctgctaaggcagtgtggaagggaaatgtggggttggagcccccacacagaatccctactggggtaccacatagtggagctatgagaagagggccaccatcttccagaccccagaatgcacctacagcttgcactttgtgcctggaaaagccacagacactcaatgccagcccatgaaagcagctgggaggcagacagtaccctgcaaagccacaggggtggagctgcccaaggccatgaaagcccacctcttgaatcagtgtgacctggatgtaagacctggagtcaaaggagattattttggagctttaaaatttgactgtcctggaagatttcagattttcatcaatttctcccatttggaacagctctatttacccaatacctgtacccccattgtatctaggaagtaactagcttgcttttgattttacaggctcaaagttggaagggacctgcttgtctcagaaaagactttggactgtggacttttgggttaatgctaaaatgagttaggactttggggtactgctgggaaggcatgattggttttgaaatgtgaagacataagatttggaagagccaggggcagaatgatgtggtttggctctatgtccccacccaaatctcatctcaaattgtactcccataattcccatgtgttgagtcagggacctggtggaagataatttgagtaatgggagcagtttcccacatactgttctcatggtagtgaataagtctcacgagatctgttggttttatgaggggtttccacttttgcatcctcctcattctctctttgcctgctgccatccatgtaagacgaaactttctccttgccttccaccatgattgtgaggcttccccagccatatgcaactgtaagttcagttaaacctctttcttttgtaaattgcccagtcttgggtatgtctttatcagcagcatgaaaacagactaatacaaaagtggtaaatcattggatttaatttgtatttcccttttggctatagtgatattgaacatctttttatgtgcttattcaccacttgtgtgtcttattttgtgaagtgtttattctagtatcatgttcatttttattctattaattatttatatgtagaagattttaatatgatctgtatgtaagacttatgtcagatatatgtctgatgaattttttcttctaattcttacttgaatttttattttcttaatggtatttttaaaactgtctcttttaaatagcagaagtttaattgtgatgaagtaaactttatcaattttcttttatggttagtatttttgtgtctcaagaaatttttgcttgtgctggggttacaaagattttcctgtattttcttttataagctttataattttatcatttatgtgtaggtttttgattcatcttgaaataattcttatctatggtgtgaggtgggggataaagtttattctttctatatgaatattcaagtgttcatgatgatatttatcgtagaagtacctatcagtctttgagagttatctattttgatttgacccatgaatgtacatataaattttaaatgtcacatatgaaaaaataataagtatatgttataaagaaattttgactaatcatatatgtggattgactaaatttttaattttttgaacattagtactttatctaatatttctcctccaccattcaccaaatacttggtaaaaatttattgattaaataattgaatgactgctgtggcaaagccattaatatttattgttttttgtccttttctatttactgcatatctttttagtccctttacaacatttgcacatgatttggcaactcaatgaagtcatcatgtgaaaatctgatttcttttcctgtgatattaataacatttcctcttgttttcttgtcatatatctcccccaagcatttcttgttacatgtatttttaatctgtccctgcctgaattccttcttctgcctttaaacaagctcatgtgaaaaaaaatattcatttttcagccttactagtcactaaattctatcctttctccttcttcactgctttacttctgtttctcaagtgaagtgctataatacatttctagcaacctgtgactttttctatgagaaatttgaatgtttactttaaggaaattttatgaagtagccttattctgtttcagctgtgtgagaactttaaaacaatgatttattagagttttagaactgcctttaaatttctgtttttaagcccaccatgaccaaatcacttaatgattaagtttttccagtttttgaacctaagatatgtggttgtactgacattaatagattgtcgaagaagtaatttacactgttggtttctctgccctctctcctcctcctttccttagcagtcccttgtcatttggctttgccttccaccattttattgaagttgaaagttgttctcctgacagtaccacatgcagcccaggtcacccctgaggccattccaaaagaggcagattggatagtaattggttccccttccattattataatgcagtgtttgatactaaaccccaagattcaggatgcctgactcaagtaaatcattgaagcccctgtgatgtatttttcattctaatcttcttcacagacaaccacaggtaagaactggcattatgtgaggtcgtgaaactgctcagcctcaacaatttctccttgtcactacatagggtcccagtgcacagggcttgggcctttgtcttagtcccttttcctaagtcatgagtggatccctggcctgcacattgttcctttatcactgtccttatgacatttctgttttctgtgctgccttgttccagcctgtccctctgtacaggaaatggaattttgtcttatgagtcatcttggtgtttgagccttttctcctacgggaacacttcccagtgctaaccgttggtctgcctcactcctgagcaatcagccagttcctgaatttctctgtgttctgaattgccccttagattggttctctagtatgaataactttggaatttggacctgagattgtggcatagcaccctcttaaacattgtaccttctcactcttcagggtcagactagggggtgaaatttgtttctccagtccctatcctgcctagctctgaattcttcactaaattagaaagtacttaaggaactgttgtaatatcagcagcatataacagtgttacctgtttaattctttgttgtcactatttttacatcctggtctgtgacatgttcaaagtttttctttaaaatgccttttaaaagagaaaattgaaacccattcccacttaaatatagataaaatgatcacaattatcattttatttatcaaacagttattgaatttatgctatacacctaacattttagttaagataaattccacatttttaccaatacttctcccctatgtaatgtcaaacacaataccttcctcctcatagcagttatgcagtagatgagttgtataaatacaagagttatataaataaaaataaaaccacagttttactgtatcttcggaaaactcacattttggtatgcaagtcaagatatgcacatttgaaaaaaattatgccaattaacggtaataaaaatatatcagagttggccaggcatggtggcccatgccagcactttgggaggctgaggtggacgcattgcttgagctcaggagtttgagatcagcttggacaacatggcaagacttcatctctactaaaaatacaaaaataaaaataaaaaaagccaggcgtggtggtgcatgcctgtggtcctagctactcaggaggctgaggtcggaggatcccttgagcccaggaaacggaggttgcagtgagccaagatggcatcactgcactccagcctggtgacagagtgagaccctgtctctaaataaataaataaataaatgttaattcattttgtaggtcattttaacatttatcataaaagtaagataatcatgcatgatttttaatgaggcaagacatgactatgtgttaggaacacctaaacaaatggttattactatcacctttgagaggagtcatttttatcctaaagagcatccatgacctcccagatatccagtaaacaaattgttagggaaaaactttaaaaatgtctattagggcaaaattgtaaatgtgtcaattcttctgcctatctgctgaaacattgtggggcagtctgcttgtacttttattgggagcttttcattgcttgttgcaatcttctccctttgctcagctcctgaagtcctgttaacaataaacttttatcagaataagttttcgtctcaggagacctgatagtcattttataaaaataacatttcaattaaaatactgcttggggaagtttcttctggttttcttctgttaataaaacaaaatttggcagggccttgatcttaaatagaaactaatgcctgtaggtattaaaagaataatttaatatggaagaagtctatatttaataaatgtttatagtgcatattttataactacttttttcgtagtctttttttagaactgttgttctaatatttttcaaagattttagaatcaaatgacattaagttgtgattccatccagctgctgctttggatgggctaagattttctgcctagcctatacctctgggaaaactttttctttgtatttctcagatatgttaattgattgcgtttgagtagtcctcctcctcttttgctgtatcttgtggtaagactttagagcctcttttcgcagtttttctgaactttttctttttttctgggtctttgctggaaggtttctgaagtctctagaaagattgtaacttcagcatgttcaatgataatgcattcaacgaactcctaatctcctgcaatcccataacttttctgtttcaacagcacactcacatggtcctgtctttgagatcttgaactttaaaagtccactttctgtgtccttctgtaacacacacgagctcatcataatctcttcctcccagtttgtcactcactcttggctttctttctcttcctacccaggttggaactcattttaaatctaacagcagtctcaccagcaacagcagtcttgccacattctctgggttctgggttcttgtcaaatctcagatcaatcatctgccccctctgagctgctccttgcctgggtggtgcttaagaaaaattgcctgacattgttcccagtcatccttaaataaaagttcaggcacagtcagctcttcttgattccccatcagtctctcacattctctcaccaactgtctgaaatctttacaagtttcctcaaacactcaacctaacactcagcaaactgtctgttatgatcctttcaaggaactagagtccattaggcatgcgacctattaatttcgttcatctccatgtcaaagtttaactaattaatcagccatcctttcttccttttttcttatctcacaggaaaaaagattaacctcctttctttttttcttttctttttcttttttttcttttttgagacaaagtctcactctgtcgtccaggctggagtgcagtggtgtgatctcagctcactgcaacctctgcctaccaggttcaagggattctcatgcctcagcctcccgagtagctaggattacaggcggccaccaccacgcccggctaatttttgtatttttttagtagagacagggtttcaccatgttggccaggatggtcttgatctcctgacctcaggtgatccacctgcctcagcctcccaaagtgctgggattacaggcgtgagccactgcgcccagccaatgaaactcctttctaaggcttcttttacacttaccttcatttcaagtaatgagtttatctctaaccttccatttgcactacacttggttttgatgcattgcttctaattcttcatttccaatttatttgttatgacactgcaatttggctttagttctcaccatatcaatggacctcctccaaggtctgaaggcattacctgatggccatttttttttttctgagtctctttttcttctcatcttccttgacttatgctgcaggatttatcacttctgaccacttcttcaaagtgttctgcaaatgtgctacttcctttatttatatgacaccccagagacctgaaattcactagaggtaatcttggtaaagatgaagctaccatgaaacgtttcccccttatttccaataaatgctttgtcaaactggaaagagaccactttacttatatttttattgcagctgccttttaagcaatcaattctattttaaataggctacacataattatattttatgtcttctaaatagatgttaacaaaatgaaacaataaacctgtgcgataagaagctattatataaaaacaatgtatcaagaagattagcttaataagaatgtacactgcatgggcttgtgaaaagaggaaagggagtcactgagttaggcatgcttgttaggtgacttttggggatgtgactagagacagacagaatgcagaaatagagaggcatactaaatatcctaatggattgggcttgctgagacagatcaaatttgagatagaaagacggggaagtaatctaaggtgatatatacaatggttcctgcttgatttgatattaaaaaatacttagtgactatttagcagttttttatccgagtctaactccctacaactaggccggttgagtaaccaaaatatgctactactttagataaaaactaacattttcctttccaaaaggatagtttataaatcttgaaataataatgtgaaagcagctaccatttaatgagtgttcactatgggcaaggaagggattttatatttttacttgttaatcatcactcccaattctgtaaggagagttttattatccttattttttagatgtggaaaatgagtctcagagagtttagataacatgcccaagttcactcagctggaaaataggatgggctcccatcccaagtttccagtctgcaaacttcttgctctgccttttcatgagattgcataaagctctagattcaacaacagagagtgagttgcagccctaagtttattatttactgatgcaacaacagatgaatcatttaatctctctcagccccattgtagtcttctgtttaaaaaaaaaaaaggtgatgagaagtataaggagaaaatcagtgaaacctgaaatgtagacattctataggacaagtgagatggttccttcaacagataaatggaatgaataaaaaagagtgggaaggggaaaatgttatgtattgaaggagacttcataaacttatcaatcaaatgcaatgtctggcctttgggtggggggggctggggtgttctggacttaagaaactgagaaaatatgtatgagaaaataataaaatttgaacatgaactccatatttgatgatactaaggaattgttgataatgctgtaaaatgcgataatgatattagaaagtgttatggaaaaagtgtcatctgttaatgatccatactgaggtgtaaactggtgaggtgatattaaatgtgagatttactttaaaatactcttacaaatataagtaggtggagatagatgagaaaagattggcaaactattgataattgttgaagtggagtggtggatgtatggtaattcattatattaacctctctccttttgtgtgtgttttaaattttctagaagaaaaagtaaaagaaagacagagtggtgttggtttcatgggtatatatttatctaccaaatgatcaagttctatacattaaatatatacagctttttgtaggccaattatatctcaataaagtggatttttttaaagacagataataaataaaaataagatagatatttccaggttaatgtttacgtgtgactttaaaaattatatattaaggcatctgtgcatggcaaaatataattttattttttcaattaattttttaaagtattaggtactaatgggatttttaaaactcactgactaatctataaaccctacttgtcccatcaaatgcagtttcatgcttgaattggctttgctacattgccacattaatttgtcaggattcttctatcgagaaattaactacccaagttgtaaggaagttcttttgttccactagacattttattaagagaacaaattcccaccactgtattttaaaattcattagagtgtttttttttctaatgtttaatacaggttttaagtttttaatgctggtttgaacttgaaacatatgaagataaaaggtttaaacaaatcatgtgagcaaatttactgagtgtatcatgtaatatggatatcacactcttgtaaacaaatgaacaaattatttttacatctgattctagtgattctagtcataagagactaaatagttccaacaattagcaataattcaataagaaatagttttcctaaaagagccctaatattaaactcagctgtcattttaaaaaaatcttttccatatgacttctaaatcaaggaatcaacaaaagcaagcttgtttttttttctaacttgaaaattttataaaccatttaatatttttgactaaaagaagcagactatatttttgcctgcattaggtgatcactacattagtgatcagtgttaatttgaagaaagatggtcaagaagtacttgaaatctcacttgctttttgtttgtaacttttgtcagatttacgattatcttgtcatagtaataaagcccacaatgatttaatacaagcttgtgacgatgatgctttactctgtttatttctgtaccactctgattgctcaaggatctgctcttattgttccacattagccacgactgccaagcccactagtcaaaacaatttcacaattgaacattaatggactgaagaacattagcagaagcaaatagaagcgggataccatagtaacccatgtagtctgaggaaatgatgttctattaaagggaaagctaatgtcccaaaataaagctttacataaacagtctggcttctcatgcttaaaatgtctcatgtgaaatgagctttcaatttcatattgtccatattgcttgttttagtcatagtactttcaaaattttatgaatatttaattcatttttcaaatttaaaaacaataggttattaaattaatgaggatggggatatgattattttatagagaggtggttagtttagggtgtttaaggttatgtgacgaactttaagagatccaacggcaaatcataattgatagatcaatgtgatttttgatccagctctaacagaaatgtcacctcacccataaaggtagttgggaaacatgtttctcattctatctcctttttctcatcttttaactcatattggtcaatcacctgtttataaacaaacatttattacagtggatcttatccttttttgaggcaaactctttaatactggaacttttggaaccacccttgagaggactaaaaaagtcaaaatagcactaaacacataaggaataattaaatttttaaaatgactctagaagagaaacttctcacagtgcctgctcctataaaagtaatcacagtttctcacaattcacgtcatcacctttcaacagtgtgtcactgattttaactgtttattgccagatgaacatctcttagtactcaggaggcaaattcctgcacgttgcactccttttagcatctcttaacagttgacagtacacctcggaggggtgtggtacctagcataggtgagaaccattgatttattgaatgtttgtggggtacaaagccctttaataagttttagtcacttttatcatctgtagtttgatttcagttacatggagaacaatacaacatgagggatagattctaatcaaggaggctaacaagtagagatttttagcatatgttcaatcaaaagaattctgggatgggtcagcacattttaatgatgagaaacaaaatcaagtctaaacaatattaattctatcattgcaggcccaagacactggtaagagagagagaggagtaaggagaagaacacaggatgaatagaaataaggaaagaaggagcacatgatgagcctgcaatttacaaccgataattaacttggggataggcattgctgttaattttataatttgtccattttgtgactgagaagttgacttagtttaatctgattctccttgctttgtaatatgtatttaacatatttatactagctaagttaagtgtatagggttcaaaattatgccagcagaggaatcatctaaaaaatggagctgtgtttaatttcatgaaaacaggagaaaacagcaatagtagaaataatgagttattttaatggttagcttgcaaaagaggaatcacctatattcaccgtgacttatgtgcaagatgattgcaactgcacatttgccaggcatcatcttagcttacacctgctgtccctgtgtaattactaagagcatcctatttcattcttaaagagttctggtttgcatgataaagaatatgaacaccctactcataaattgaagttacagttatatagatttgtacttagaattagggagaaccttctacaaattgaaattgtcctgtaatggaaggcattgccttaagaaccaatggaaaaactagcagtcctcaatcagatgctgaaaaactattagctgtcagtttttaggaggcctaaaccagataagggttagagcagcagatgtattaatttgaattatatgaaagtgccaatatttgcctgttttagacgtatgaaaatgtcaatttgttaactgaatacaatgtctgttttagacatacaaaaatgtcattgtattaactgaatacaatgtctaccaacacctgggagtctattttatgtttattgtgttgtaaaaacacgttccatgtttgaaaagtaacatgctattttttttaaaaattataaaatcttaaaagttctccatcaggaagtataaaaattaaactatatctttatttgttacaaatatagtaagatattaaaataagaaggatgcattggaagttgagagaaaagttgggtatattttaatgctatgctgtcctgaaatgtcagagctatgtactagcttttcctgcaaggggtaagattcctagcaaataattcagaataaggtttttttttttttttttttttttttttttttttaccaaagtgttctaatatagtctgagaatgctgtgaaagcaatattaaattaaactaaaattgatagagtttaagattactgagaggcattttattgacccaaacaacacaacacacaacaagaaacaaaggagaagatatgaaattaacacacatgggatagggtgtaagctgggggaaggactgctctacctgaatcctgtaaagcacttgcttaatatgccctgcctggctcttggccacattagcctttcttactgaaggtatggttgtaaagaccagagttaccttgaagaagcggactcagggaaggaaggtacttagagccaacatatccttgttctattggagatatttagggctaagacctgggtaattgctgtagctttcatgtgacctgctaaatagtcatgtgttttctctgcagatgtggaggcagagcataaatggaaccaaaatggaaccatgatgcatattacaaatgggtggctgacttggtgatgatatacctttcaatctggaggtggcatgatctgtaccatggcttgttctttctatctatttccatctatacgttctgagcctctaaaatcttatatgcatagttcgtggtacacatcttttattgagactattgccttgttaatttctaattctagaaacttaactctagaatgtagtagcattactttctcatccctccttatgaaaccactccatagtcaatgctgtactcagcactgcatgatgcagaaaatggtattggagaattcaaatgccttttgcagccttttttctttttactctgtccccagctgcaataaattttcactcttcctcaaacaaatagagcttcatcaccacttagaattttggcgtgtgttactccctctgcctggaacacacttttcccagacatccacatggctcattcttttacctccttcacatctaaattcaaatttcaccttcttagaaaggtcttctctggctatcgtacttaaagttgctaccctggatcaactctatgtctctcttctattttttttcaataacacttggaatcttctaatatatcatatacttcattgtatttatattctctcttttctcctccagtagaacgtaatgtctttgaagtagggatttttatcttgttttattttctctattttgtataggaacatatatgcatgttattagttactaaatgttaacaaccacattttcttttcttaaaatttaacttttaagttcaggttcaggggtacatgagcaggtttgttatataggtaaacgggtgtcatggagatctgttgtacagattatttcgtcacccaggtattaagcctagtaccctttagttatttttcctgatcctcttcctcctcctgccctccatcctccaataggccccagtgtgtgttatttccctctatgtatccatgtgttctcatcatttagctcccacttgtgagaacctgtggtatttggttttctgtttctgtgttagtttgctaaggataatggtctccaggcccatccatgttcctgcaaagaacgtgatcgcattcctttttatggctgcatagtattccatggtgtatatgtatcacattttctttatccagtctatcattgatgggcatttaggttgattctatgtctttgctattgtgaatagtgctgcaatgaatagtgcatgtatgtgtctttatgatacaacaatttatattcctttgggtatatacccagtaatgggattgctgggttgaatggtatttcttaggtctctgaggaatcactacattgtcttccacaacaacaaccacatttttatagataagtttgaaaataaaaggaagataaaaggtaaattgacaatttaaagagaaacaatatattaggcattttgtgccagtttgcatgggagtttcttggttttaacatgaaagtcctttgtcctgggaaccctctcagccctgtgcaggccaggacagttggtcactttttattcttataattgtctattattgtttaaattttgtaatcacctgttcctgtcttagtgtgagatggctaccgtacattattttattttatttctgttctatttctacttttttcccgtgctactgctgacactactatggtttccagtaatttttaataagattacaaatgtttatccaacaaaaaggcctgggggacatccttctttaactgataagtctgtaaatggtataatttcattggtcttctggattgatttgcagaatgaatacatgttcttcttgctaatacttttcatattattatgaagaaagtaccagactagcaaacatctgaattctagtgcaaattctgccactaatctcaactcacctcaccaacctggcctttgttttttctttcataaaatgaaaaccgatgctaaagcaaactctttacacaaccagcattctaggatagtaacgattctgtggggtttcttctgacctgcagttgaaactgttccttttgcttggtagatggcttggccactgctatgtcctcaatcaaagaacttggcagttggggaaaagcaggagcctccctggatctagaaaagtcaagggaattttggttcccttatgttaccagtgttagtgcctgacctgccttttcccaactaagatttcctcatgataaaaagtgcgaaaaaagtgtgatgtagctcttaaacattttcctattaaagtggctgtgttccctgctaaattaatgtttaagggatccagctgttttgtgagcaatttaaaacataatttgatgatttactatcaatttcctcataaaatgtgcatggttatgactaaaaaaatatacacagagatatgaggctgaactgtgtgtgtagaaattaaaggaaacctggccattcatattttttccttatcctctaaatatttagctgtgtgctatcctttcataaatttgaataaaacctattagacaaacaagtagtttcatctaaatacaactctcatgtttagatttacaaatcctttggggaaaaaatgttagcaaaagcaagtatcatttgcaattaaatactttatatttaaatgatacttaggtgtttagagatcacattttttgcctattaatcctcacagtatggataccccaaataccttgatttgatcactatgcattacgtatatctaacattatttcacatgtactatgtacacatgtaaaaataatcatgttaataacagaatcctcatagtgatgttagaaaaaagcaagtgttaaaatcagattggattcagatctttacactatcactcactaattgtaagtacttgggggaatcagatcagacctctgatccttagtttcggccggtgtgtaatggtgattgcagtgtctgtctcatttactcaaccctttcccaagttgttggaggactaaatgaggtaatgctaataatgtatctagaagaatgccagacaaataagcctttattattattattcctgtttacagataaataaattgaggctcagggaggttaagtgatttgtccaatagacataacttgtaacttgaggacccaggacttgtttacaagtaatattttaaaacttgtcaagaatccatacagcagatcaactgagtacagggctgaattatgacttgttgggccatgggcatttttgccttcatgggccccttccaccatagggggaaaaaaaaaacttctaaaaatgcaggtgggattgatttgaatatatacattactattatattcactttgtcgtcatattttaaaggaaattaaaataagaatatttttgcaggtctctacatgcgtcataggccctgggcactatgcccactgtgtctaatggttaaaccaatcttaagttacgaaaaaaaaaaaaaaaaacactaaactgcttcatatggagacaaacctaacatgaataagggatccttctatccctatgtttggtcttgcaattcagagtgttccagtgaggtctccctgccccgctcacagtgacttcctaagtatactatagttagctcctaaactgagttagattaaacggggacacttgccaaatccgattgcctcactctctgtgagtgatggatgagattatacgaatttaaaagtctgggataaagaagttaatattttaaaacatgtaaaacacaacagttcttccacatcagataatgaaatctaagattaatcacaaacaaatgtgtactaggaaatgtagtaattcatcacgtcttctccagaagtcgtatctatgttaaatgttccaaaacagtgtcaaagtctgtgtctggagttggtgtaatccggaaagaaaaggagcccagagtcatgcattttaagtgtgtagttttcatagaataatcattgggagaaagaggaatgctacattaaaacttttgtagcattttcttcatggtatttgggttccattttgagggctctatagaatttagaaattgcaggtttgaactgtataaaatcgttggaccatcttcaagaaacaaagctaaataaacatgtcattccttggcaatctcaagataagcctgcccttctttgccggctaatgtttggtgtggtgtgatcatctgagtttcctcagacaggaaggtttatgaatgcagggaatagaagctcatgggaaaatgccttctgtaaccttttccctgttacttttcttgaccgctgggagctttagtctcagtgacataaagtgtttctatggcatacaatcccatacagatcttaactactcatttactatactgatgtggatgtcaaacaaaaaaatacttcattaaaatgacatcaataatctttctgatgcatgaaaatgatgtttcaaacgagggaaatgcattagtacagttgtatacttaggcatccaaattcttagacccagaaactgatttaaaactgaaaaagtcatttacgtaaatcattgatgtgtcagctaagagcttgtaaatttgtcctctctaaaagcagttttacgttataaagtcgctcaataaaacctatcaagaatcggatggagggatttattactgttatttattacaagttttaacatggtcattttgagtttgctttttaagagactatccactaagtgagttagtgtgctctgaaagagtgtacttaaattttgcttcaaatggattctggttattatcagtttcaaactaaggaagcagaactgtttatgtaaagttaacttagatttattaaacttttaaagagtttgcttgggaagaagctgtgcctacctttcccaaagacttacacatgttcaaacaatgttaacttgttcaagaaacatccacagctacatgttaggaattatagtaagtattgtaaagtcagaaaggaaagaaagaataaaaggaagaaatgaagaaaggacagaggaaggaaggaaggaaggaaggaaaggaaggaagggaaggaagaaagggaatggaaggaagatgaaaggacaagcagtgtagcaaattagttaaataactagggttatggagtcagatggcctcagtttgaatgccatctcttctaataacaagaaacaaaactttcaggaaattacttaacttgcctctccttcagtttcctcatctgtaacacggggataataatagtctaaccttctaggactgttatgagaatcaaatggatttatgtatgtaaattgcttaggatcctgcctgtcgcttagtaagccttcaaaaaatgttagctattagctgaatattgttgctaccaaaaaactcgtagtgtaataggaaaacagcaagatacagatgcaactataatatagcatgataaatattgtgaaataaatctgaacaaagtgctagaggaggcacagagatgataccaatggagaaaaacacggtgtctaggaaaagaagataatagataagggatgaaaaacataaatgcagaacagcacaaaggaggcaagattaattctgattagttgggttagacaaaacttcaaaaaggaagtttcctgatgcatataaagatttagaaagtatgcagatgtaagggcatcagaaaaggcatggggacataaaacacaaggtaaatttaagaagtagtgattggttaagtgaaccttgagggagagtggctgagtagagggagataaatatggaaaggaagattagaatcaggctatccatggctttccagaaccctaacatacgaacactatgaagccattacaggattacatgaaaaggtggtatcatcggattcgtccctaaaaagataactttaagtgaggaagggtgcaatcatgtccacccaaaacacaagcctagaaaatggaaggtggctgagaaatggttgagagccaaccaagagatagtcatccacttagaggcaagaactgcaacacagctcatcacaaggaagtgggtgctgacttccctaccttgatctgcaggcatcagtggagccacatggtagcttgggacaaactgcttataaatctaacatatatttcatgatctactgataaaagtccatttatttctttgaggcatgtgccttaactcagtggagctgcctttgaaaggcattatggagcaatttaaattaaaatcaagtctggaacccaatattattcagaatacaacagaattggtgacgaagtcacaatttttaaaatttatcatttttagttaaaatttctcatagtattttcaccagacattactaatgttaattattcctgctgggatttgatatatgtgaaatagtgatattcttatttaaataataatgatcctaatagccaataaataaataaataaataaacacactttctgcaatgctcaaaatctgttggcagtaaaataaccaagtacagctcagtcttggaatattgtaggttgacttcctcctctaaagaaaggtcaatgaatttgtgattatccatgcaatactgttttttaagcttttccctatacattaggaagacttacagcaatgaactgatttcagagatggttgaaaatattgatgtcatctacgtgttcagactaccagtcctattctctctcccttctggttttcctttacccatttctctctttgtttgtttgtttttttttgttttccttcctccttgctctctctctctctctgtagttcattgaatctttattttttaagaatcacttttctttttttcttttttcttttaatttttttattatactttaagttttagggtatatgtgcacaatgtgcaggtttgttacatatgtatacatgtgccatgttggtgtgctgcacccattaactcatcgtttacattaggtatatctcctaatgctatccctccccgctccccacaccccacaacaggtcccggtgtgtgatgttccccttcctgtgtccaagtgttctcattgttcaattcccacctatgagtgagaacatgctgtgtttggttttttgtccttgtgatagtttgctgagaatgatggcttccagcttcatccatgtccctacaaaggacattaactcatcatttcttacggctgcatagtattccatggtgtatatgtgctacattttcttaatccagtctatcattgttagacatttgggttggttccaagtctttgctattgtgaatagtgcttttaattttttttgaggcagtctcactctatcgttcaggctggagtgcagtggcgccatcttggctcactgcaacctccaccttccaggttcaagagattctcccacctcagcctcccacatagctgggaccacaccccactaatttttgtattttctgtggagatggggtttctccatgttgcccaggctggttttgaactcctgagctccagtgatccgcctgcttcgggctcccaaagtgctgagaaccacttttcataaaaattattagatcataagacagcaatgagaaatctctattttaatattaatacattaataattactaattgacattaataaaaattcttaatatacgattttacgttttaaaacttagatggaaaaagttttgtaacatagtatatagacacaaggtcatgtaatcttttgattttttttcactaactagacttgtgctactaaactattccctagtcactactaatgtcttctttcttgaattcctggtttcaagtgatcctcctgcctcagcctcccaaagtgctgggattatgcacatgagccactgcacaccactttaagtcttctttctttggaattttagtaacattgcaaaacatcttttcattttggtatagtttaattgttttttattatcagcactcagcagaataattcaaaagctcttgttacaatcaaactgacctgtagctgcctgaaagttgtgcaacacttgcatgctagaaactattatccaacttagactttcctattctagaatataaacaactcaaaaattataagcaaacgtagtttctcttcaggtccctataactcaatgcaaatgaaaatatttcagacaaattattttaaaggagagagtcattttaaatcaaaagcctaaaatttcattaaatgtgttctcaattagagttgttaacttttaatattacattgaaggaactaaactggaattatgagttgtcatagaaacagcattgctgccaaaactctaccttaattaaaagcctttttaaaaattttaccatgaaactatttttaggaaaaaaatgctttagaaaattagaattcaatagcaataatttttatattaatggatacatgtaaaattcagatgtatgatgagatatggcacactctggctgtaataatagctacataaaacatatagagataaaatccagttatttataaataagattgaagtattatctggagtgtttcatagtgttacaattttatcttcaaacttaggtttattttatgaaatcaaaatagcataaaatttaaatattttaaaatttaaaatttttaaattataattattttgcctaaggttttacaaatatgagtcatttgaaaatatgtttatgtacctacacttactgtcttctttatactgtgagtatcaaaacaaattcagaaatggatttgtttttaactgttgatagggatatgttgctaagtcttaatggtaagagtggccatatttattttagtataattcagcaattgatataactggcaatagaatatttacatatatacatttcttttttatttaattatgttttcttgtgtatatgagaaagattggctaatattaaatattaatgtccattaaaatacaaagcctcaacttatctcttattgtatcaggggaattgtaaaataaatactccattaagtgaagtgcattaacacttcaaatacatgctggctataatagtcatcactaattatggatcaaaagttctctaggaaccttattaaaaatactttggttcactttattatgttggacagggtccaggaacctattattaaaaagtacccttaccccaaagtcatactgataaagctgatcaacaaacctataattaggaacctctggtctaaggttccagcgttcttttaaaaatggtctttaaagtaatagtaggtactaatatttgaatgttatctgacatataacctatttattaaatgtccacctttaaatatttttctgtgtttaaaagctacattaatttttcccctttatccatcaaaaacctgagcacatttatttgttcacaaataggtcttttctcaagcacttgttgccatagatgtttttcactgtggattttctcttaaagtgaagacagtgcccttatctgccaagttgttctgacacttactgtgaaaaatcatgaatagctataatcaacttttaatgattgacttgcatccagatggttgtcagtaaagcctgatttggaatgcaaccttaaggcagaaaacgtgattttcctgtgaataaaactggcttgttatcttcctaatttaaggggaaactacaggattgataggatgtgcccctgttctcgctttcaaatatttcggatgggtagattctatagtggtggaatgtctactgacagtcaccagtgtgacattgcatgtagtacaaaatagctgggcatttgtttctgatgagaattatggtattcaggataggattgattatgctgcagtgacaaacagccttcaaagttcagtggactaaaaaacataatttatttcttgcttaaactgggtgtcaattatcagttgaagattggcagggggttctactccatgtcatctttgtgtatcatctttacgtgaatactttatgtattcaggagatctcgttcgtgaaagtgtggttgacaatttggttatcagactaaagtcttatggttgcaaagtgatatattttcaaaggtatacagtacatagatttactgataaaattatagccactcaagaagagtttctgaaatgcaggtttctatatactacttcttggaatcaccatataattagatttattaaaattagattaagtttaataagtgaaaattagatccattatttaaccagagaatttaggtactcagaaattccaattttcaaccatactgattaactgacatcttaatgtagtgagtattttattctgtttaccctgtgctcgatctcacagaattgaaacagataggtttttatattacaaatataaacttttattttaattcccattctaattaaatataaaattttcattgtttcctttcaatatgtgtatttgtgcatgctgtagacatgaatttagaactataaaattatgtgtcttagaattagaagggaacttatgaaattaccttatttttctatctgttttccacagataatgctataacaaaacatcaaaatctgtgaaataccaagcaaagaaaaattcctagcaagttagtgaactgttttttgtttatacctcagaatagaggtgaaagagttagaacatgtataatattcagatttagagcaatcaataagtgagcctacatttgcatttcataagtatatttgtatttgttttttataatatgcatttcacaccaaataattctggatttagcaaaagcaataaagctgctgccattgataagtgctgatggtccaaataatcaattagcagattaatttttagaagacagacgaaacagaacataatttcacttactgggcctgtctactttgccatgagcaagtgtctgttttttagcttgcagctgtaaaatccatacgtgacttttccatatgtaattgtgatagtagttgtcaagctacatttttgcttatccagatgtttatatttaactagctctgctttatagttatctcattgaactcttaggcccagcccaaatgaaatgagatgttaaagtattgaatttttatgtatgtctcacatatttgagatacactgggtcaaattgttgatttattttttttaatgattttcaagttctcagtttagaagcacgattggctgatagtttctatgactcaagatgaaatgtattcactgcttaattgaatgcaacagttgtgttttgtttacaaaatcttatctaaaatgaatgctttctgccacacatcaagtcagctactgtaggcaactcttttagtccagctagcaaatgggcagaatgcccacacaattaagaggaaaattaactgaaaaaaaaaaaacaacagagtgagcatcactttccagtaaattggatgtccttgtgttgatgtccataaagtagtttattcctttcctttctttattggtttatttcctctttcttccctttcttagtttcttttttaatatttcatttttattttgtttcagtattttatatttgagccccatttttgtagaatagatttaacccttcttagaagccaagaagttagccttttaaggcatcatggatgctggcagaaggcataaggctcctgggttcagaagcaaaactctacttgtgcacagcactgcaagcagcatgagtatcaacatgtgcatggattcttcttgtcctcaagtcccacaggggcaatgtgacatagactcaggtggacactgctcatgcagtggctttgcatcacagttgaggaacactgggcttgggaacccattttacaccgtgaacagtaggcaagcctgctctttgtcccaatgggaaacattacctcatccctcaaggtggcttgaagcaaacataatgtgagaagtagcctgggtaaaaagtggttgtggttccacagtcttggtgcacacacggcagcacatgtaggaatgaagagacccatgaaggtctgtatctcataacatctttatgtgtgaaaattacaaatgttttgacatgcatgactctattttaggtgggtatgtgtgcatatttcttatacatttttggcatatgactaactgaatgtgtatatggtaaactgttaatatgcatctacctattttcttaatccagataatgctctagaacttcagcatcaagtggattattaacatcaattaattatggttcagatccgttgccttaaaaaataaccttttatggctcagtaaagtttgtctgcacaacagaacagggatgatagagtgttggctgtgattttactttcagaagtgagtacagattgctatgattgatcacaaatgtcacggtaaagtgccaacgctgacacttgaaacacctcagttgaaatgattggtttgtgacatgcatggaaaagtattccaaatttgtgatgaaaaatgacattctctgatatcaccctgtcggaatattttcatctcttattcaatgttttcttcagtgttgatactctaaattggtactgcttttcccccacttccagcttgataatcaggtcctaaaagatagctgcaaaatgtgtctaatcagcctacaattttcgtagttatcttctaagaaattggatttcatcagtttgagacatttggataaaaacaaatgactagaaactaccccttacttgtacccattgttaatgtaccagaaggtgtaagcatttatccacatttacatctatttaaaaaatggaaatttagatgactactttgggaaacacaggttaagctgtagaagcaatgaactaagaggacaaaattgtctgtagtcctcaagtgctgcgaggcaaagttggagtttaattaaattatttctagagtccctagaagacagggtctgcttatatcaaaagcatttttcttcaaattatcccaagaacacgttctgttgctcagtgtgctttctgttaatactgctgaaacaagaacaagcaaaaacatcttttaccataagccaaacttgcatttatcatagttcataaaaacaaagagaagctataaaagttacagagtggtaacaactagagcctttctttgagataaagaaaatcagggagcagaatattatagggcagggagtaatgataggtgggtgagtcaacgtgtgagggtgatattggtagtagctagggtgggggcagtactgtccctatagctgggtcctgggggactctaccttggtcccttctctggcactgctctggccatgccccactctacagatgagaagtccatggagataactggaaatgtcctcctagagtctgaacacaccactcttcttgactgtgaatgaggaatctggagcttttctttacttagaatataattatatagcaattaaaaatcatcatgacaagtcaagaaaaacatcatggaagaaagaaaaaaactttataccttgaactgcacttttttcctgctttttaaaaaggggccttgcatttttattttgcactgtaacctgtacattctataactgaccttgtatgtagccattctttgtgagaaactacttctgcttattctcaaataaagatacgatagctagcacacaggatataagcatccccagcaattccactccaaggaaaatatctaatagaaatgcatacattcatctaaagccatgtacaagaatgttcacagaagttccatctctcatagcccaatactgagaatcatccaaatgcacaattaattctggaaacagagtacatccacaaacaacaagatacattaatctcccaaagataatgctgaatcagagaaaccaaatacagaagagtacacacggtgtaatttcatgtatatgcattttaaaaataggcagaactaatctatggtgttagttactgtggtgttagaagtcacagtaatggttacactcggtgggggcaggataagtactgaaagaggaataaatggaactttcagtgtcctgataatattttctttcttaatctgggagccagtgttaatctagaaaagctcatcaggttgtaacttaagatttgtgcattttctgtatgtatgttatatgtcaataaaaagttaaaaaaaatacagtagtaaaaaaatcttgcattcttctattcactgctactcgcctactgttaccctccagaggcttaggctatcttttcttttaatctctgtttgcgtgtgtctttatgtttgtgtgcttttgtttttgtttttgttttgagatggagtctcactctgctgccaggctggagtgcagtggtgcaatctcggctcactgcaacctccgcctcccggattcaagcgattctcctgcctcagcctccgatgtttgtgttttaattttcagatcaagtaccatgtctagaaggctatgactttgggaaggaatgcagtttgacaaatcttaatctttctaatcagaagattgatggtttacagaaatttcacgtgcctttcagtgtcataaacactactaaaaattccaccaatttggtctctgaccaagaaaaataaaaaacatgacaaaatctaaacataaatgcttgttactgaaaagcttttccattcaatttgttgttgtagttaagatcccaagaactcaacagccatgttactttgctgacctatgctggcacagttggaggccagtatttgattttggcaaagagaaatggaaagtgtgtctttttcagacagattctatgtttatcctgtttatttatggtagttaaaaaattaagttgttcacccacagaggcttccctttttctcagtgacctccattttgtaatcttcagtatattgaaatacttctcctggcatccacagcaaagagctttctaactaaataaacttagcagtcaaaggtctggtctgtacgtacccttgagttattttcaattctcctgagactgaaatcactatagcaatgacattttattctacctagatccttattggagatgcctattaatataacatttatcagaacagattagtttattttggtgttatagtaacactttttacggaaattcaaactgtcccacctcctttacacagccttttctgtcttgagttctttcctctatccacagacaaaaccgtctagctcaatctgttttagtagaggaaagtacagaacaatttgaactaaaaatttagaataaggttcaattaccctctcagacatctagtagcccaaagctctgtcacaaggtaaggttttgagatccagggatgcaactgggagtgtagctaaacatagagctaagatgaactaagaactactttatggatcaaagaaatggaatgaaatgaaatggacaggatagcatagagtccaaataatcaattggatacatgtaatctatacatgtatagatgtgacacttattaagatgtgtcaaagacaggagaaatagctggaacatgtgcgaagaaccaggagaaattccctgaaccatgagagaatatgggaggaaatcttttctagggaatttatggccttcctgttaggtgatgtgggctgattcctataagtaatggatatccgtaaagtcagaggtcacagaatcctgaattgttctatacatgttcaatggccccattcaccttctctatctaccacttttctcttaagcatgattagttcctcttactgaaagagtctaacaatctgcctaagttcctgaagattcctggcaacatacacaaaatggagaaatggcatctttctactttttgtttactttcctttgcccatactggcttattaaagactattaacataaagcaaatccttaatttaagggatacattatttttcttaaagatctgtgattatagccaagtagtaggtcccaaataaatgacaaaaatgctggctggttttacatcagcatagtatgggtgagtttaagtgcaatagtcttctcaaatctctaggagggtaattgacttaaatgtgtcacttcatttgtggatagcattacaaatcctttttccccaaaactacgtgttgcttctttcaaagaaaacgctgtactaccattctatttttttcttttacttttcccctcaactagcataaaccctttttaattttcagtttttatgctcctccttcatgaagctatttctgatcctctctgttaaaatgaatactcaaaactttgtgctcacatagtgctttgtttatatctcttctatggctttgcactataattatttatatacattcttgtcttttctagcagttggcaatttctttgaaaatggagcattcaccgtattcattcttactgcacaatatctagcatggcacctgtcttaaattaggcaattgatatgcattggagagtttcaatacgtggacaaaaaaacaatgttccaaggacagaattcatgctacagttaacaaagatttcaatccatgattgtaccagaggcaaagaaagtatgttattaaaggagattacgagggagggaaacataattttaataaatgaaatggatacccaagtagattaatattgggactgaatatatgagttatacagaaacatagcacaaatgagctattatactgaaagctccgaagattttaatattaatttctgagtttacccctttaaattagactcatagttgaaattaggaaaatcgctttcttcatagcagattctgtgcatattcctttctccttgagttattagcatggtaggtcaatgtacttatcaaagagagatctggagctttaaacaaaattaaaaattttctgatcaggatttaaatcaacattttctgactaaatggcttttacacataggccagagggaaaaaaaaaactcagctttttggtaacttgtctttctttctgacatagatgaggacttaaccatttgaccatcgggtctgtcttatagacctttatctcagctttggtttcaaaataattttctgaaaaagaatacagtgtcttaatagtctacttctttaccagctgccaaatgaaagaaaagtgcttctatgaaggacaagtaaattttctcagaagtcttgggtgaaatacttgagatttttttctttggtacgggcttagatgtagacaggtatgagctcaaatcctggctctgttatttattctctgagtgatcataggattgtcatttaaaccctctgagttgattttctcatattgaagtaggaatcaatgatcatttttgtacagatatgtaaatatgcacagataccttcatctgtatgtgcatagattcatctctaaaaggttacaggaaaaacaggttgcaatttttccctccagggagaggaactggatgtgttgcaggtgtcgagatgggagagagacttactttttagggtatactcttttatacctttagaacattgtaccattacatgtattattcttttaaaactaaactgcttgatttgaaaaataatgcaatatgaaataaaatttctaacacagttcctgacatggtactcagtaaatattgtcttcatcttctctattttacctccaacttaccctccctgatctggtatccataagaaaacatgtctgctcttttatggaaattttagttctaccgtattttttcttaatctatccttgtgttccattaaaggaagttttgagttttccttttgcaattgtttttaaccatagaataagctaaaatttaagattaatttccacaattgctgagttttttgttatttatttatttattttgcctcttgttggtggggataatataccttaaaaactaaatgtttacactagtaaacaactagaatagataaatgctgaagatatttatgtttctagaaaatctaaactttaataacatagcttgtctgtttttggtaagacatacagatctaaaagcctgatgataatatattcctttaaggaacatttatgctgtctactatatatgtgtctgataccctcactctcgtgttacttcatttgacttaatcagacacatttccttctccttgcagaggtaacattgcaggagacagataataaacaataaagtaataaataagtacattccttagtatgttggatggtggagtatgctatggaaataacgcaaaggcaatcacggggaggggacatgagagtgctggcagagtcttcagctttaactatggtggtcagagtggccttgatgagaaagagatggagcaaagacttgaagtggatgagggaacaagccacacagaacctgggggaagagtattcctggcagaggaaacaaccattacaaagactgtttaagcaggagcatgctggtatgttcaatgaatagcaggggagccagggtagctgcagaaagtgtgattaagaggaggcgtgggaggagaggaggtctgtaataactgggataaggctgtgtagagtctcttaagtcgtattagcaagctcagtttttaccttgagtgagatagggaaacatggatggtttttggcagagaatctgactgctgttcagaatagatgatggaaagctaagagacgaagcaggaaataatatttattggtgtactataggcaagaaattgtgtcctaagtcctggatttctatgtgaggtgaaggagaaagataacgcaaggataacttaaaggtgtgtgggttagcaccttgaagaacatgccaccgttcaccaagatggggacatcagaaatggagggtgaaaccctgggaggtcatttatcagcatattcagtgttagatgtctattaattatctaagtggagatggtgatgggatagagagctttaggctaaagatataaatgtggaagccatttataaataaagcctaaataaataaataaccaaataaagcctaaataaagacttgaaaatagtcatcccattttagcccccaaaacaagccagggtatcctggttgattctaagagaagagtgcagacctggtagaaaaccaaggaaaagacagtgcactgaatcggggtgttttctctgaggtcacttcagaatgaggtggccatttacagattgtgggtttgggacaagctctttttttctgcaggggcttctgtcagggaagtcaaataactggcactttgaacttgaggcctggatgagatgctttcttaaaatctttgaaatctttgtgtgagtgtgtgagcacactgtgtatgtgtgtgtgtgtgtgtgtgagagagagagagacagagagacagagagaaaggaaagaaagaagaaaaacaagcaaaacaaacaaaaacctagtacagacactattactttaaagatgcaagcagttttccatcttgcaaaggtaaagatagaaatacacttttggtactgaatatttctttgtccagaaaataaccataagtattgacataatggtaaagcagaggccatgactacaagtggaggtgttaaaaaaagccaagatgagtcgaatgctctgctctgagtgattgtgtataaaatagtatggagtctggagacaatcaaattatgttataattaagtacaatagctaggaagattgaagccaatttgcagccattagtaagagcaaatcaacatacaatgtatttgtgtatacttataatcctgagttttcattttaaaatatttgttcatattttctttgtaaacattatatatatttcattgcatatgaataagattccctatattcatatattttatagtatgatgcaaaaatataaacaatattttcaattaaatttcagtgatggcttcaaaaatattgattaaaaggccaggcttcatttctcatgcctgtaataccagcactttgggaggccaaggcaggagaattacttgaacccaggagtttgagaccaacctgggcaacataatgagactttgaatctacaaaaaatattaaaaattagccaggcatggtggcgtgtgcctgtagtcccagttacttgggaagctgagataggaggatcacctgagcccagggaggttgaggctgcactgagctgtgattgtgccactgcactccagcctgagtgagagtaagactctgcctcaacaaaaaaaaaaaaagaaaaagaaaaagattaagagattactatgtatttggacatagtaatgtggtctttggatattcttgacagagataaaatatggtcgatggtctttggatattcttgccagagataaaacatttaatatcttaattactaaatataagaaatcataaatggtaatattgtaattctggtaccacaatacccaatttaattgttatcacaattaattgataagtatattgcaaaaacacaataatagtttagaagacatagacctgtataaaatgctaaccttgtcaattaggctgcaaaatgttttaagtgtaagaatttttagaggttggagcaattttaatgacaaattttctagttgttttcttatcttagaagaaacatattatactaatattgtaagaataaaattcaaagatcacctagttaggtctgctgcttatggcatctgaaaaccttcagaattatttcctatttaaattatgtatatgtactgtgaagtggttagttggtatagtgctgtatatctattaaatgttagccagggaataaggtgataactattaactctaatttatagtgaataagcaggaattagacctgcctgcttaatgttaaatttccaccaaaatgcccaaacaaaacaaccttgaactgtgactatacctgaattgaccgtgtccttgcaggtggtgacattgtaaattgaattatgcacactctaagtggatgaactgattcatgcagaacattcaggtgtcaaccaatgagtattatgggcctatttgtatataagacaatgtatccactccatagtccaattataaaacataattatagttgcatttattcttcatatgcagtttgtacatgtattcacacacaaacatatgtgaacgcatgtatgtgcatatacatattgtatattcaccttatcctgcataggagtctaagggacagagaaagtgtcttattattctggagccctgaacctctcttcagtataacacattagaatctctagttataggtatgaaagagtctattgactttcttgcaaaagagttccatatgaaattatgttatgtaatatggttccatataaatgatgactatttctatattttaaatagaaaactcagtataaattaacttagtttttttgtgtgtgtttgttttgtttttcatttttgagacggagtctcgctttgttgcccaggctggagtgcagtggcgcgatctcagctcactgcaacctccacctcccaggttcaagtgattctcctgcctcagcctcctgagtagctaggactacaggcacgtgttaccacgccagtctaattttttgtatttttagtagagatgaggtttcaccgtgttagccaggatggtctccatctcctgacctcgtgatcctccctcctttgcctcccaaggtgctgggattacaggcgtgagccaccgtgcctggcctatgtttaggtgatgttttttgcttcagaatctttgaaaaatctttctttacaacaaaccttcatgacacgtgcttacctatgtaacaaacctacaaatatacctctgaacttaaaatttaagaaacaaaaaatactatataaaaacaaacaacaacaacactttctgatttgtctaccaagtctggtccaggtatagtacaaagaagtgaaatgttctcagccaaaacataaaagattgtttaatagttataaaatgaacatttaacacaaaatttctgggagcaaatatgagaaaattctgctaatatataaaagataactatagaaaagggccgggtgtggtggctcatgcctgttaatcccagtgctttgggaagctgaagtgggagagtcactagaggctaggagttccagatcagcctgggcaacatagcgaggcctggtctctacaataaataacacttttttaaaaaaagtagctgggtgtggtggcgtgtgtctgtagtcttagctactggagaggctgagatgggaggattgtttaagcccagaggtttgaggttgcagtgagccatgattgcaccactacactccaagcctgaatggcagagaaagaccctatctcaaaaaaagaggataaagaaattttaccaaatttgtagcttattcaaagaaagtgtcacatgtgaacacaataaagcaccagagtaagaatagctttctccctatcaattgctcactcagtgaagttacaaagaaaatttcataagtaagagcttatgctttatgggggtgatggataagataaaactgcatgtcacacctgtttatcaaaatatatgaccaggccaggctggagtttctggggctgctgaatcttcagggaagggaactatgaggtagattggagttcccatatgagtgtaccatgggactaaacaaagacgattaacaatggggatatcttcaaagatgacattaaaacagttattgccacaaatattgctgtttttatagttagaaatttagaaaaatagcctctgtatacaagcacaactcatacaaatgacttcatcaataggatgctgtggatgaggagttagaaatcttggcttcttgagccagattggctacttcttggtcttgtaatttagataggatcccaaatcgcttgaattttgcttctctccttaataaaatgaagggaattattcatgtccatgttcctctctataacgttgtgagaattgggattgaaagtgttgatgtttataagagtactttgaaggagtaacatactattgaaaacttaggttttattattaatgaacagccaaattcctgtatgctcagcaccatactaaacaatgccagagcatgttagaaaacagtttacactttcgaagcttctaggaggaaataacactttaagtcagagtccagagaacaggaagacaccttagaagttaaattacgtatccaaactctccattttacaaatgagaattctgagacctagaagatccgtttgatttatccatgattctacaactagcctggcataaccaggcatcatgactctaaaggagaggtaagagaaattctctacaatatatccatttgatctgttaaaacattcatcatcattaaattatttttaatacccagatttcggttaacttccttctgttttaacatcagggctacagaaaagctagctattgtcccttacattctagctatttaatttatatataacatagtcatgcaattttcacagaaaaccctttcttaaccacttttcctcctacttaaaaatctgaagatgctacatgtagttaagggctagcttctcttttgtattctgtttctaatttcaaacttcccattttctgcagttttacaagaggtatttcatgaagtgagttttatgagacaaggtgcccttggcttagtttaatgccacatgagaaaggaggtgtcggaacccaaaatagcctttagaagctttattcttcagtattcatttcacttggaggctctttgaaagttttgacagcaaactagtcttcagtgatgagagcaggcattacccatgcagaagttatggtggtgaattttattagacatactttctgaagaataacatttaaattggatataatttgcctgaaagcaaatagaagtacagttgcatatattacaaatgaccttaaaagcagccatttgcttattttgaaactcttctgacaattttataaatctacaaactgcatatacttcattttaacgtttaccttggccttgtcataattcaacaatccccataaattgttctttaatgaaagttgcattttacagtataatctcagccatctatgcccaaactacgcagcaagagcttgctttatcaggattattctgaggcatatttacatctctagaataaagtaggatattgaatatatgattatcattccctttgccctaagtaaattgggtttaggactttagaaaatgaaaactcttctccctctttcacaaaacataagaataattgcaaaagtttcatggaatctacatggagtagacctgctaaatcaaaatttcatggagtgttaatatttttaaaatgctctacaagagattatgagtgggcaggttttggaaccactgtcatagatggaagtagaatatttaatttcctctgaaagagggaccagcccttgccttttaactcccaattgttcaagatttagaagtgcagtaggctccagcagatagaacaggacttgtagaactcaggccatttttatgtgagcattttaacacaaagaattgaattgagtcacttttcaaagcagttatgttctgatgattatttgagttacatattattacagtaatgaaagcatcttattcaaattaagtaagcttaatttttgttgaatctagattgtgtttgaattttatagctcttttaaaaagtaattttcaagaatgagatttttattgccatacttttgtttacagaatggaaattcatggataagagcatctagtttatactgaacattttctcaggcaacttgagaaataaaaaagtaatatgaaatgaggtagggtaaaaaaaatgcacctttgagaaatacaaatttcattgaaagtcttcacaatctattaaacaagtggaagtggttctattcattgtgtctcttttagttctactaaaggactcctagtaacacaccctgtaaaattttcttttatgcagtggtacaaagaagaggaaatatgccttgaggttagggcaaggttatccttttgtaaacatatagaaaaaaaacatcttcagcacaaatccatgaggaagaatttaattaaaattcatattcttcagaaacacactgataatcatcaacagaaaataaggctaagagtttcaagcacctcattaaattcagtctagttaccactgaaatattggttgctactattgggtgcagtcaggcaaaataaaacagatgacttacttgtctgtcatctcaagcccttgccttctggttaaaaataaaaccggctgggcacagcgggtcacacctgtaatcccagcactttggcaggccgaggcgggtagatcacgaggtgaggagtttgagaccagcctggccaatatggtgaaaccccgtctctactaaaaatacaaaaattagccaggcgtggtgtcaggtgcttatagtcccagctacttgggaggctgaggcaggagaatggctgaacctgggaggcagaggttgcagtgagccgagatcacaccactactctccagcctggatggcagaatgagacactgtctcaaaaacaaacaaacaaacaaataaataaaaccatatgcttagtggaagggtggaatcagtgatagctgatattgtgatgagtaaagtggttttgattacataggtacttatgcaagttaaaattctaagtgcagaaccaacaagaaaagaactctcatgttagatcaagaaagtgaactaacatttattaaaagcattttacacgctcatttcatgaagtccctgtgaagtgagtgatattatacctattttacagatgagaaagctgagacccaaagatggcttatgtaattccacatcaaacagttactgggtgttagagtcagggttcacatgtaggtgctgccagctccagcatcctcacttctcttgtggcctcattcaaggcagtaagaggatgaactcaatggatccaaagtgtcatgcatctttgaatgactgtctcttctctgtagacttacctctgaaatgatggcattagaatattttaatccattcaaactgtgctaatagtgtgcaggtcttgctgaaggacatttaaaaaatggaggatccagtaggaacatacctatgtgatatagacctaatggctctggaacatcaaatgacaggtaggtcattgaggatgaaaattgacaaaggtagttttggtttagtgtctaatattttgacatagacattactaataacagaggggtatcacactttctttttttttaaaatcctatatttacctttagtgcactgaaaaggatcattttgctttttgtcaaaaaggtaacaacattcattaagtccaatttgacataactctatcctgtgatacttagaataggcgacctttttagatcagctgtcgaaggttattgaccatggatggggaaaggaaatgaagcagctttctaatgatagcttctgtttcttcccaagtgctctggcatctgaaagtacaaaaggccattctccaaattatttggaaactctagtgaaaagctaatttctagattctaagggctaatttttacagtggagaagatgaaatgacatgttatttaccaaaagttttaggtaattaataatttcatgactttgaaaatgacaattatttacattctgaagattccacacacactctaccatttagatggtaaattgaacataactctgtattataatgtggttaactaagtatgtttcatataatgtttacatgaaattaactgtgaaactcttaacatgtaggatattttctttctttccacttaatgttctgctttattttgtatgtatttctttcctttgaaagtcacaatctttccatctttttctgttcaaatcctttccctacctttgaggttgtgcacttcacactgtacatataaggcaaagtgtatacattaaactccagataaggaaaatacaacctaacatgtatttaccatttactatgtaccaagtatttaccacttacaatgtactcttctaaatactattttatatgtgtattttattttaattctcatagccactttgtatcatagggacttttatttttattctttatttaaaaaaaaaaaaaaaagggatacatgtgcagaacctgcaggtttgttacttaggtctatgtgtgccatggtggtttgctgcacctattgatccatcctctaagtttcctcccctcacaccctacccccaacaggccctgttgtgtgttgttcccctctctgtgtccatgtgttctcattgttcaactctcatagggacttatatatatatatatactttaagttctggggtacatgtgcaaaacgtgcagttttgttacataggtatacacgtgccatggtggtttgctgcacccatcaacccatcatctacattaggtatttctcctaatgctatccctcccctagccccctacccgctgacaggccctggtgtgtgacgttcctctccttatgtccatgtgttctcattgttcaactcccacttatgagtgagaacatgtggtgtttggttttctgttcctgtgttagtttgctgagaatgatggtgttcagcttcatccatgtccctgcaaaggacatgaactcatccttctttatggctgcatagtattccatgttgcatatgtgccacattttctttatccagtctaaaattgatgggcatttgggttgcttccaaatctttgctattgtgaatagggccacaatagacatatgtgtgcatgtgtctttatagtagaatgatttataatctcttgggtatatacccagtaaagggattgctgggtcaaatggtatttctggttctaggtccttgaggaatcgccatactgtcttccacaatggttgaactaatctactctgccaccaacagtgtaaaagtgttcctatttcttcacatcctcttcaccatgtgttttttcctgacttttaaatgatcaccattctaactggcgtgagatagtatctcattgtggttttgatttgcatttctctaatgaccagtgatgatgagctttttttcatatgtttgttggccagataaatgtctacttttgataagtgtctgttcatatcctttgcccactttttgatggggttgtttatttttttcttgtaaatttgtttaagttccttgtagattctggatattagcccattgtcaggtggataaattgcaaaaattttctcccattctataggttgcctgttcatgctgatgatagtttcttttgctatgcagcagctctttaatttaattatatcccacttgtcaattttggcttttgtcgccattgcttttgatgttttactcatgaagatttgcccatgcctatgtcctcaatggtattgcctaggttttcttctagggtttttatgatttaaggtcttacgtttaagtctttaatccatcttgagttaacttttgtataaggtgtaaggaagggatccagtttctgttttctgcatatggccagccagttttcccaacaccatttattaaatagggaatcctttccccattgcttgtttttgtcagggttgtcaaagatcagaagttagtagatgtgttggcgttatttctgaggcctctgttctgttccattggtctataaatctgttttggtatcagtaccatgctgttttggttactgtaaccttgtagtatagtttgaagtcaggtagcgtgatgcctccagctttgttctttttgcttaggattgtcttggctgtatgggctcctttttggttcaatatgaaatttaaagtcattttttctaattctgtgaagaaagtcagtggtagcttgatggggatagcattgaacttataaattacctagggcagtatggccattttcatgatattgattcttcctatccatgagcatggaatgtttttccatttgtttgtgtcctctcttattttcttgagcagttctccttgaagaggtccttcacatcccttataagctgtattcttagttactttattctccttgtagaaattgtaaatgggggttcactcatgatttggctctctgtttgtctattatttgtgtataggaatgcttgtgaattttgcacattgattttgtatcctgagactttgctgaagttgctcatcagcttaaggggattttgggctgagacaatggggttttctgaatatacagtcatgtcatctgcaaacagagacaatttgacttcctctcttcctatttgaatacgctttatttctttctcttgcctgattgctctggccagaacttccaaaactatgttgaataggggtggtgaaagaggacatcctttttttgtgctggttttgaaagggaacgcttccagcttttgcccattcaatataatattggctgtaggtttgtcataaatagctcttattattttgagatacattccatcaatacctagttcattgagagttttcagcatgaagccatgttgaattttattgaaggccttttctgcatctattgagataatcatatggtttttgtcattggttctgtttatgtgatggattacgtttattgatttgcatatgttgaaccagccttgcatcccagggttgaagccaacttgatcgtgttgcataagctttttgatgtgctgctggattcagtttgccagtattttattgaggatttttgcatcgatgttcatcagggatattggcctgaaattttctttctttcttttttttttggtgtgtgtgtgtgtgcatgtgtgtgtgtgtgtgtgtgtgtctcttccagggtttggtatcaggattatgctggcctcataaaatgagttagggagaagtccttctttttccattgtttggaatagtttcagaaggaatggtaccagctcctcttcatacctctggtagaattcggctgtgaatctgtctggtcctgggttttttttggttggtaggctattaattactgcctcaatttcataacttgttattggtctattcagttattcaacttatttctgatttagtcttgggatagtgtatgtgtccaggaatttattcatttcttctagattttctggtttatttgcatagaggtgtttatagtattctctggcagtagtttttatttctgtgggattagtgatgatatcccctttataattttttattgtggctgtttgattcttctctcgtttcttctttattggtctggctagtggtctgtctattttgttaatcttttcaaaagaccagctcctggattcattgattttttgaagggtttttcgtgtctctatctcctttagttctgctctgatctttattatttcttgtcttctgctagcttttgaatttgttttctctagcttctttacttcttttaattgtgatgttaggatgttgattttagatctttctgctttctcttgtgggcacctagtgctataaatttccctctaaacactgctttacctgtgtcccagagatcctggtacattgtgtctttgttctcattggtttcaaagagcttatttatttctgccttaatttcgttatttacccaatagtcattcaggagtaggttgttcagtttccatgtaattgtgcggttttgggtgaattttttaatcctgagttctaatttgattgcactgtggtctgagaggctgtttgttttgatttcagtccttttgcatttgctgaggagtgttttacttccaattatgtggtgagttttataagaagtgtgatgtggtgctgagaagaatgtatattctgttgatttgggatggagagttctgtagatgtctattaagtctgcttggtccagagctgagttcaagtcccgaatgtccttgttaattttctgtctcgttgatctgtctaatattgacagtggagtgttaaagtctcccactattattgtgtgggagtttacatctctttgtatgtctctaagaacttgctttatgaatttggatgctcctgtattgggtgcatatatatttaggatagttagctcttcttgttgcattggttcgtttaccattatgtaatgcccttctttgcctatgctgatatttgttggcttaaagtctgtttatcagacactaggattgcaatccctgcttttttttgtcttgctttccatttccttggtaaatatttctccatcactttattttgagcctatgtgtgtctttccacgtgaaatggtccctgaccaccttgcctcctgactgggaggcacctcccagcaggggtcaactaacacctcatacaggagagctctggctggcatctggtgggtgcccctctgggacgaagcttccagaggaaggagcaggctgcaatctttgctgttctgcagcctctgctggtgatactcaggcaaacagggtctggagtggctccccagcaaactccagcagacctgcagcgggaaaatgaacaaatgaaaaggaatagcatcaacatcaacaaaaaggacatccacacaaaaaccccagaaaccccatgcgaaggtcacaaacatcaaagaccaaaggtagttaaatccatgaagatgaggaaaaaccagtgcaaaaaggctgagaattcccaaaacccagaacttctcttctcctccaaaggattacaactccttgccagcaagggaacaaaactggacagagaatgagtttgatgaattgacagaagtaggcttcagaaagagggtaataacaaactcctccgagctaaaggagcatgttctaacccaatgcaagaaagctaagaaccttgaaaaaaggttagaggaattgctaagtagaataactagtttagagaagaacataaaagacctgatggagctgaaaaatgcagcacgagaactttgtgaaccatacacaagtatcagtagctgaatcgatgaagcggaagaaaggatatcatagattgaagatgaacttaatgaaataaagtgtgaagacaagattagagaaaaaaagaatgaaaagaaatgaacaaacccgccaagaaatataagactatgtgaaaagaccaaacctacgtttgattggtgtacttgaaagtgagggagagaatggaaccaagttagaaaacactcttcaggttattatccaggagaacttccccaacctagcaaggcaggccaacattcaaattcaggaaatatagagaacaccacaaacatactacttgagaagagcaaccccaagacacataattgtcagattcaccaaggttgaaatgaaggaaaaaatgttaagcgcagccagaaagaaaggtcgggttacccacaaagggaagcccatcagactaatagtggatctctcagcagaaaccttacaagccagaagagagtgggtgacaatattcaacattcttaaagaaaagaactttcaacccagaatttcatatccagccaaactaagcttcataagcgaaggagaaataaaattttttacagacaagcaaatgctgagagattttgtcaccaccaggtttgccttacaagagctcctgaaggaagcactaaatatggaaaggaaaaactggtaccagccactgcaaaaacatcccaaattgtaaagaccatcgacactatgaagaaactgcgtcaactattaggcaaaataactagctagcataatgataggatcaaattcacacataacaatattaaccttaaatgtaaatgggctaaatgccccaattaaaagacacagactggcaaattggataaagagtcaagacttatagggacttttaaaaatctccttttgtagatgagtgaacttaagcacagaaaagttaagtaatttcctcagcgtcaagattcaagtcagtatgatgtttatagtcatccactccctaactgtgtgatctcagctaagtgactaagcctctctatgcctccatctgctcatctgaaagaaggtcagtggggatacaaaataaatagatatgcttcaaagacttcacagcccccttggtggagatgttcagtgagcaggtaaaaaggtacctctggaatttaagaggcaaggtggagcacaatgtctggaaactagccacttacagctcccagtggaagcccagtgagatctccaggaagaacacatggagcaagatttccctatggggccagggaaggaagaaatattcagaaatgaaagggatgctgtaaaggactgtgtgggagagaggttcaagaaactggagcagaaccaagagagtgatgctagagaaaccaagaaactagtcagcaaggccaaagataactttttatattttgaggactaaaatcagatgactatgtttggcaatgaggtcatcactgaccttttgagagacccctttctagagctgcagcgatggtagtgggattgccgtgggttcagaggcagagagggcaggagggcgacagaggggacagtaagcagtcttgcagaaagagacggttgaagccagagagaaaacagctgagagaagggcttgcacataagggtcatttatgtgtgtttcttaataacatttaaggatcagagaaataatgagactgagaaggctagagagtgataaagtaagatagaggagaaagaagtaggcttataacccttctgaaaatatttacattttaagaaattattcagtgctgtaacccaagaaataactgatggtattttttttttttttaagactgagttttgctgttgtcacccaggctggagtgaaatggcatgatcttggctcactgcaacctccacctcccaggttcaagtgattctcctgcctcagcctccttagtagctgggattacaggctcgcgccaccatgcccagctaattgttgtatttttagtagagatggggtttcaccatgttggccaggctggtcttgaactcctgacctcaggtgatccacccacctcagcctcccaaagtggtgggattacagacgttgagccacgatgcccaaccgagaaataacagatggtaatttgaggttcattcaacaactaatgtttattaaatagtcacagatggtaatttgaggttcattcaacaactaatgtttattaaatagtcattatatatcagacaccattttaagtgtggggaatataacgagcaaaaacaaaacagaaaacaacccgctttcatggaactttcgttgtggagtctttctaaaataaacagtaagcatgcaaattaatggatagaaaatatgtccagtggagataattagtatgaagaaaactaaactggaatccgaaagtaggagtggtccctggagtggtgatggtgctttgcagataggagatagaaacccctatttggtaattagacaggccaggcctggtggctcacgcctgtaatcccagcactttgggaggctgaggccagtggatcacctgatgtcaagagttcaagaccagcctgatcaacatggtgaaaccccctttctactaaaaatacaaaaaattagctcgggctgctggcgggtgcctgtaatcccagctactcgggaggctgaggcaggagaatcgcttgagcctgggaggcagaggttacagtgagtcgagattgccccattgcactccaccttgggcaactagagtgaaactccatctccaaaaaaaaaataataaaataaagagacatttgagtataaatctcaaggcagccagagattcaactttatgaatatatggatagaaaaagtttctgatgaagaacagtgagtgcaacaatctacaactgcagagattttgacatattcaaggaacaactaagatgccactatggctggagtgaaatttgagagcacagggaataggaggttggcaatttaaattttacagccatatataatcatttactatgcctactggtaaagacagccataggaatgtatcacatgtgaattacagtttttatttttgttgtgtataatttttttacccctgctggtagttgtttatatttgaagttattacttagaccactttaagaacctgtgaaagctgtggattctttccctagagaaaagcccatgtttacacaaagaaaagaagttgcttacaattttgtagagttcttggaactctagaaacccttccataaagcccaggttaaaagctcttgctatggaggatgagttgctgtccaacaccattcttcaatgttactttgattctaaataatgcagagacccttacttacctgtccttgaagagtttagcactggtttattgtcacagtctctagaagtatttcatggtggttcccccatggaactctggcctttcagttccttgatctcctcattctagattttctcctcactctcttaaccacctgctcccgtggtcatcctctagacctaataaccgtaccccttccacaatctcaggttctagcatctcagtctccagccttcaagttgcatctcgtccttcaagttccctccctctcgtattccaactccaaaaattcttgatcatagtagaacttaaaatctgttcatctcaccacttttttttactatgtccctgaactatacctttatttctctccccaacttatactcaataatccatcattgcaataatgaccttccatgtactctcaatgccctcgttccatttctttctatgttattcttctggcaaaacccaaataatattacaatgaacttttaaatgattcacaccagcactttggtggtgtcattgaataaaaacaaactcatgcttaatattctgtgtttaaattcaccatcaacctcaaataatcccttaatgtttcctggcaatcattccatgttttcctactgctacaggcttaaatactctcttagaatctatttcacaccttcttggtctctgccctgtcactcttagatatagtctttgtgactttgcttcttatttcactgacagaataaaagcaatcagaagagaacttgagacatttcccgcacatctacctccctaacagcacctatattcgcatattctaccttcattcctataaacgtagaagagcctgcctgttaaagccatagcttctacttaggtgctaaatcgcattccttctcacctttcactttactccagacatcgctccctctcttcactccatcagtttgtcctattggtttagtgctttcagcacagaaacatgtttttatcttttctacttagaaaaagccctcctcaacccacatttctccccactcttcatcatctataacaaagtcctaatgtgttgtctgcagtgcattctctacttcctattcctccatacttctcaaacccactggaatcaggctttgtccctgtgtctccagccagtcttcagtgaccttgtgttgttaaacccagtggtcatagctcagtctgtttataaaaactgttagcagatttagaggtgatgaaatactccctcctttttgaaataatttcttcacttggttctaccctcacctcactcattggccactccatctcaatgacttctgttgatttttcctcatctccttaccattaaaatttaaagtattttcaaaaacctctgctccggccatgctgacctctttacttttccctgaacactcaagcatattcctatttgagggatttaattgacttctgaaaataaatttttctctgcctggaatgctcttcctgcagatatccacattgcctacattttctttcactcaattctctactccagtatcacatgatcactttttccaatacacttcgacttgctccttccaaccagtcattccctctctcccttacactcattaatttttccacagcattgatcatcatctaacattacatatttactcatttgcctcttttctgtcttgttcaaagaaatgtcagctctactaaaacaggaactttgttttatataccatagtgtccccaggacctagaagaattcctagtcagctagatattcaataattatttgttgaatgaatgagagatagtgaaccaatttagcatcacaggtatctctgttgagataatgtttactcaaaatagtctgtgagctttttaagcacagagataatatcttgtttacattacaaataaatgagagccttaacatatgcttttaaatgttgaataattgaaagactgaatcaccaatattcagaaaaaggtaatgtgtgtgcctccctccagtctctgatcctaatccccacatggactttttttattcagggcttctaactcactcttaccaagtaactgcagggatagtctttaagaaaaaattattattgtgataaaataacataaaatttaccagcttaaacatttgtaagcataccattctgtagtattaattacattcacagtgttgtacaaccatcaccccatccatctccagaactatttcctcattccaaactgaaactctgtatccatttaacaataattcaccattctctgagaacaactgttctattttctgtttctgtgaatttgactattctaggaacctcatgtataattctaagaatcatacagtgttcatcttttttgcatctaacttattttacatagcataatattttctaggtttatctatgttgtaacatataccagaatttatttgctttttaagggtgaataatatttcattgtatgcatatgtcatactttgtttccccacaaattcatcaatggacatttgaattttttccccatttggctgttacgagtaatggtactataaacattagtctacaaatatctcttttagtccctgcattcaattcttgtgggtagatatgggtccaccattttatattctcaccagtaatgcacaagtgttccaatttctctgcatctttgctaacacttattttctgttctttttaaaaaatatatatatacttgtcatcctaattggtgtgaactgatatctcattgtggttttgatttgcattttcctagtgattagtgatgctaagtgtcttctcatatgttcatttgccatttatatagctttggagaaatgtgtattcaagttctttgccaatttttaaactggtttgtttgtttttgtcgttgttgtttgtttgttttgagatggagtcttgctctgtcacccaggttggagtgcagtggcgtgatctcaactcactgcaatctctgcctcctgggttcaagcaattctcctgcttcagcctcctgagtagctgagaatacagatgcacaccaccatgccaggctaatttttttgtattttagtagagacggggtttcaccatgttgcccaagctggttacgaacacctgagctcaggcaatccacctgcctaggcctcccaaactactgggattacagacgtgaggcagcacgcccagctgggtttttattttggtgttgttaagttgcaggagttctttatgtattctggatcttaatctcttattaaacatgtgatttacaaatattttctccaattctttgagttgcttttttattctgttgatagtctcctttgatgtacaagtttttaattataatgaactcaatttttttccattgttttgtttcattacccatgtttttggtgtcatatccaataattgttgccaaatctggtatcatagagcttttcccttatgtttccttctatgattttttatagttttagcttttatgttagatctttgattcatttttactttttgtatatgttgtatggtaaagccacatatgctttttagtcacatttagtgttataggttgacaaagtatctatgtaactttaaattaattactaaccaacaagtctatattttccattactctcatacttgagacttatatcttcctatttttaattgctcagcatggcctgaatttattaccatttttgctcctgttgactagtcaaatgtatgtttgtaccctgggattttagccctgatgtgtgttaataggataggaaaaagggcagtgaattcaaagtcaaaatcttggactgaatcccagaaataactagttccatgaccctgagcaaatcattgaacctttctgagctgcaggagtaatagtgtctacctcagaatttgttgtgataacctttgtgaaagcaactggcacgtaataaacacttaaatgtttcctgaacttattgctcaagactgaagcactgatttttttgtgagtgactaacttcagctgacttggttttgcattgagggcagtcaactgtacagtgaatggaggatggaagggacaaaccgtctatgctgggggaacaaaaaaagaacaagttccaagagacatcacaaaggagtacagacgtgggatgagcgtgtgctacccaatgtacccacagaacagtgatttattttcttgtaggtttggggcaaaatatgaaacctcaagaaaaagtaacataacagatttgacctctaacatagagtatgcttggcattaggtggaaagtctaaatatttaagattacatagaaggtctctgattttcatctgtttttaattttctcatatacaggtaattatgacaactaagtaactatgttttggaatcccctaaacttagacattaagatgattttatgcacatcattttcatatttaacaaaattagaattttaaaatatgcctaaatttgtatacatcgattatcttgtatgcaagttcccaaaatggaaattttagtggattagatgttgaagtcaagattcttgtgagggaattatggttgaatagattctcctccctgttctctaatcactgagatatagaaccgttagtattatcccctcctcaacgaaactgaaataatacttcttttcctatctcccttatagtaatatattgagattcaaatgaaatgaagcatataagcttgtaatgaataatttttccaggcatcttgctaggaaataaacagtaaaaattaatagcaccacctatatttatgggtctgtctttcactctcctatggttcttaaagcagaaatgtcttccctactggtgtagcgagtctctgattgattccctggcccactgagaaaatctatgctgtgcctgaaaaggctgcacagccctactgcaatgtcaggccctacagttgtgccttggatggtgtggcaacacactgacacgctggtctgctctaccagggtgtggggcttctggtggaaatcccttggaagctggtacagtctcacacctctggcagaaacagggtgcctcagagttcgtgagatgtaatacttgcgttactatcctccttgtgttcctgggggcttcctgccctattcattgacgatagccagacctacctctccagacaaggaccctccaagcagtgctaatgctgaagatggattttttcagcgctcctccgacaggcacttaaatcttccaaagaatttcccctgcctccaagaagttgaaagaaacttttggctcttaactggtaaacattagggcaggggtagagatgtttcttaaaaattcatttttttcttgtctgtctccagcctatgttcaacttcctaatagtctctctcttccctcttagagaaaacattccttattatagttattacttctctaatgaagaacttctctttagaactcttgtgactgagtcccattgatagaaatagctaatctcttatttggagagaagaaatgggagttttttgtttgtctgttttcatttccataaatttacaaaatatatcgaacagcattgacaataagccacaattattagtcacaaagaagagataaaccgggtatgtttttctgtcctttatatatatgtagttgttttccattgctttaattggtttataagttcaaaggcttctataaagccatttattttagatttatttgttcaagctcataaggttaaaataacatttgttttattttgtaataagtcagcagacaactttttatgagtcttacaagatgtagaatagttatattatgtataacactcagaatattgagtattctaaaacattcagataagaactcattttgtaggaactaagcatagtttaacaatcaactaacatgtaattaagatattttcaagaaatatactctctgattttatttctgggtctacagcctagttatttatttatttttgcgaaatcatttaacgtatctactttatcatttattttctaaaataaaaagaatatagtttcacctatctgtatcactggagtgttctacaaattcttttactaaactttataaaaatggtgagtgtcttaagtaaaaagcccatcaagataaaaataaaaactattggtgaatcacataactttttaattgtctaacagagtctgcctcatgagaagtgaattcagcttctgtgttagtttattttcatactgctatgaagaaacttctgagactgggtaatttataaagaaaaagaggtttaatggactcacagttccacatggcttggcagaggtaaaagaggagcaaaggcacatcttacatggcggcaggcaagagggcatgtgcaggggaactgccctttataaaaccatcagatctcttgagacatattcattatcatgagaagagtacaggaaaaacccacttccatgattcaattacctcccactgggtccctcccacaacacgtggggattatgggagctacaattcgagatgagatttgggtagggacaaagccaaaccatatcagcttctaatagtctggaatctatgaagtctcgagttgattctgtggcttactatgtgcccaacaccatattaagaaattttcatacaatattgaattcaatcctggtgattcttctcttatctctttttataaaagagaagacagaggtttagaaagaaaatataatttgcccaagatcacacaacttgtaagtaggagagaaggaattcaaagtgcaacgtgactttggagctcttatttccaacgattagggacagaacaccacactgtccttctaaaggtaattaccttgaaattttaaatccagagtaaaacatcatttcctagaatcctagaatggtgaagctggaagagaaattaaaataatatctagcctggtggtttataaattgcttcctagccatgaaactcttcccttatataaaaatcttacgtggaagcttaaagctataaaacatgcaaatttggagagctctatgaggagagaaggggcaatgggaaggtttgtacaactttcagcttgaggtgctttctaggtgagtgtcaaagaatccttctagatgcaagtcctaaaggaataatttgcaaaaccactgtaaaggccaagatctttattccattagtgaaaaaacaggtgttcagcaatgtagttaaaatgaaaggatcattttactccttgtcaaagtaatagactcccttctttgtggctcctctctctcatctttgatccatatagtaggaggataccgattgtattttgttcttttcattaattgttgaaactcattattaacagtgcctgatacttcataaaaccaaaaaaaagcaaagattttggaaggaaagttaatttttcatagctacatgttgatttgtaactaatcatcagacttgttctaacatatattgccttggggagaacttgtgaactattaaaaatgaaacaccatgtcccttcacagagaaataagcaagaattagagaagtatgccaattgaaactacaggagagctcgaaaattctggctgtgatctcatgaattggaattcagtcagaaggcaccagtaaatgttctttctggaaaatgccattattcctgtttttaatgatcatcttggttttacatctcatgcaacatgcaaaacatctatctgctttaaataaacagtcactcacaagtcattagcagttatttgccctaaatgctattttttgctttttgttgatagcagattatttaagcattttattagaacctattgcatgagattgaatgtgtaaatagatacattagtaaataatttaattaatgattacatattgtatacctactagtgaaataggacaaaatattttgcaaaatatttcatttgcataatagcttacatgtggaatatttttggtttagggtataccttggaaattagatctcatggagacaaaggagtcacaaaataagtaacagtgaatttgctattataaaccatcaagatcttctgtcaaatgacatgtctaaatttatattaatcataggtcttttgtaactagtccattgaaaattattcaactgaagttagctacgaacattggaaaagtgatttattgctaaaattaatagctaactttcaaaaagctggttgtattgagtcctgaaaagagcaaattcaaagcaaatatctacttattgctaatatatacttacaaacctaacaaagataaacataaattttattcaaaaatgttttttctgttccagataatattgtttcttatttttacttggatttatactacagtttttaaattttgtaaatttagaaaatattatttcttgagcctatgtgaagctgtatttttctctcaagtcttctttggcaaatttcctcttcatcagtgcggcctacacaaagacagagccctcataccccagcaccttaggatccggcaggttacaccagctgtctgctgaatgagtatgctcatgctctggtaattatcctccactcaaataaccaacaaaaccaaccagccatgttcttgggtcacaggataaaaggaactggacagtatcttcctatattgagcttatgttgtcactaatattagggtcaatacctagcctcatgcattacttagaatattcattaattaaacagttattgtatttgtccagtcttgactatgagccaagacgacttgtatagcttccagttggcccttattttataggtcctggtgaatgaaagacactgaatataggcaacatagggcctaccagcctttaaatccaccagagaatgcagaccactgacatagtctatgctactctaaacaagaatgaaatgtgaaaatggaaaactgcttcttgatttatcatagtcttagaatcctggagagactgaataaatattcagaatattacagtctaactctaaagaaaataatcccattacatgccaattaaataatgtgtatcatctttatttactttgtcacgccaatttttatgtttcttgatgagttactgtgcttgtcagcaggagctgaagtcattctgggcagcttctaaagaacagctgtacagatacaaatgagccagctaggaaaggtgcttaaacatacttcttacttctattgtccttttgagacctcagaaaatatgtttggggaaaattattccttagattgccacaggagtagatgaagtctacataacatcaccccattaatgcgtattatgctaattgttcaagcaaagtaacttccatttagaaatataggagtaaataaagatacacttacagctaaatatgaatagatttaagatagaaaattaaggccagaccacaatgagcattgtttagttttcagttaacttaagcccagaaaacaaaaggttaaacagggatttagattttaaaaaaaatttaaaaatctcttttgttccctataaatttcatcatccatgtcaaagttaacagtgttggtttaataacatcaataaagacctgacagaacatgtttaggttatgtaaagatatgtttttagtttttctcctaactctgtataattctgctaagaatttcagtcagtagatcctcttacagaaatcaaaaagaatcatcttatcctgagataaggggcatattgcacaatttctttttttggcaaaagcaaaaattaccgaaatgggaaaatcaatacatgacgagaaataatcttgcattttcaaaacatgaaggcatgaaaggtaaaatgagagagagggtgatgaaaagaatatcttcattctccaaggcagttctcaacacatttttataaacataggaagaatgactaagaaaataggataatgagtaattcatgctgagaatactaagacatattgaaatcaatgtgggctgaacaaagtctttttaaaggttttaaaaaaagaaaggaataaagaagagctcatatcatatagattgcagctgagggtgactctagtgaaaattaggaccactagtgttctgcaaaattttagaagtcacagagaattatcatgttgctgcaaagctattcctttcctcctagagtctccaaggcattgaagtgagcatttggcagcagctgtggtcctgtgggtgaagttctttttattcacatgattgtcatatgggcctcaagatgaagagctccagggagagtgtgaaaccagcatgctactattgcagcatttaattttcggcaaaacagccttagcacctcctaacaatgctatctgtgaaagctgtttcttgattgtatggacttatgtgtataacattgttgatctttctaaatgaaggatattgaaaatgacaaatggcaggaatcatttctcgatatgaagattaggactggtgaggccagggaatagcatgatgtgagcggtgattttcagtaggggacaactggggtcagagggtgtgtgtaggttgaaaatgcatcattggcattgcagttttatatttagaaataacaaatataatttgatttgtgttacaaactatagggattgaaattcttggctagtgagaatacagattatagtgatctatattgaggggacatattaagtcagctaaaagtgtgagcctgaaattttcatgtttgtgaaagtagagaaaggttttaaatgtttgagaatctggtgtatttaaaagaaaatatgtattatagccagagaattctgtatttgaatatcagcctggcttgttgtatgctggggcacctgacttatacttcctaagtcttattttattgatctgtaaattgggaataatcaaattttcagagttagataatcatatccatgcattaagagatataaatgcaatagtatttaaagtgtcaggcatatttacaaaaaagtgatttgttttctcccccgtctacctattcccttctccttctaactcttgctcaccttctctttctagctttctcatgtctatttattttcccacccagaatttaagcatactcaagaatcaattaagaactgaaagagagccacctccattgttcctaggtccctgccccgttaccacactggctgtctcctagtagtaaaactttctggtccacattcattatctttgctgaagggtttctgctcttgcataccttcaggctttcggacacatcactatgtatgcctctgcttttccttgttgcagcactcattgttatgtatgcctctgcttttccttgttgcagcactcatcatcttatacgatgattgccagagtacttgcctatctgcatttctagtctgtaaaaatgagaactgcatgtttcattttagaatttgccatggcatgcataatacttggtgcatagtaggtgttcaacatatatttgttaatgtaatggctgtagtcctttaaggtggatgatggtagcattgagtggagagaatgatactatgcagaatgtcctagctcaatgaatcatagttttatccaatagtactcttatcctcaaaaaaaaaaaaaaagtttgtgagaaatgttccaagagcatctgctttcttaaaaaattaagcaaaaatatttgaaacaactctggagctacatatcactccacgtgtcataaagtataaatgcatgtgagtgctaacatctggtttgtatgagaatatacttaagtgtgtgcattaagatgcactgcataagtaaacttgtctaaactccaaaccagaaatgtattatttggaagcaaggtgaaaccaaaacacaagccttttaaacctaatcataggctggtcagaggaagaacaatgaaaatacgattgtccttaaagtcttacaaaaggatgtaagtaacttttcactctttttaatgagtgtgtcaatcctacagcaatttggcagattttctttacttaatactaagccaacacatatccaaatgagacaaatgtccatgtttttaccttcaattttcaaaaattagtaatatccaatttatacaatttttaaaatgttttcgtatattcagagtctgcagtctgcataacagttactgaaagtaaagtacaatatacaatatttattgtcatgcagttttaaaaagagaataaaaattaaaagatatactcatcattcttagttttctgaatatcttctcttcaatcccaaaccagaaatgaagacaccaacaatatttttacaaatattttaggtattaacaaaactgacattgcaaattcattcttaacactatgagcttagtagaatgtgaagtactttagattagaattcaaaagacccacccttatctgggccatttaccaaacatatagtcttgggcaaattacttatttcctttgaatctcagctcactattctgtaaaatagtgataataattcctgtttgcttaattaacatttacttaatcaaatgagaaaaatatgtaaaagatctttgtaaaagtttaaacgtataatttaatacatcagtataatgcactacaactttataaaacattacactctttcaaagtttgaccacataaattacctcatttttatgttaaagtcccctgttaccctactgatcacatggatgagttagaataatctgatgtgcatcttgcttatttagaacctgtgcagtacatcttcaactcctggatgcatctgcttagcaaggtcctccaaccagatttagagacttattcaattactgctcagagacaccaggatgtctcctctgagttcacaacttccagattcttctggtttcttacctcttggtcaatttttattgcttgtaaagccacttgtgaacagagctttgccagacacctatcatcaatgttcccagtggaaatggtgatgtgtttgccaggagatgctctttcttggtgctcttaacactgcaaaccctttaagggcaaaatgtatattgaatttcccagatcctctctgccaaaaccccatagtggaccttgaaactgtagaaaagaatatttctctctcctactctgtgctgggagtctgggcaggcactaaagcatcctacatgtgccccagtgtcccagaaagtccctcactaaaatagatatcccagatatgtaatctttttctctaatagagtcagttcttgaagttgggcatggggaccattagctgagacagacacaacttgtactttttatcctcatgatcccaactcctcctcacaaggagcccagaagtaactcttcttttttcaaccaatacatgtaaaataaactggtgtggcttccttgaatggataatcagacattgctttcttttcctttctgctatagaatttaacttttaattatatgcattttgcttttatttactaatatttgtcttctagctttctagaagtaagttctgagagagaaactctgtgtcaatagcttcagtacttggcacatagtagatggtaaaaaaataattcttgaagaatgaatggataaatgaatgcttgaaaaatatgctcaaagtaataatagtttcaaacttattaatgaaaatgattggagagaccacatgcatataaatgtattttaattatggccttaaaaatcttgatgtcattccattttttctgaaggcatattaatagttttacaatttaaaaggtaaaatttaagaattaatcaaggagtattattaatcaggatattttactaagccattctatgatgattttttgagtttaaagtgttcacggaaaattcagggtctagctaagaaaacataccttccagacccctaaaccctcacctttacacacagttttgttttgatatgcttgtaactgggacagtctcagaagacatttagttctaagacaagttaatctaactgaataaatataattttccccaaggtttctttttctaaaaacggttttattgaggcataattaacatataatacattgcatgcataaaaagtatacattttgataagctttgatatatattcatcaaattactactccaatcaagatcacaaaaatagacattaccccaaaaagtttccatatgctccttgaaaatttctccctttgttttttctctggcctcctggtcccaggcagccacttatctgcttttgatcactatcaattcatttccattttctagaattttacataaatgacattctttttgtcgggtggctgtggtgtcttcttcttccgctgctgcttttttctttaagaagcagggtctcactacgtttcccaggctggagtgcaatggctattcacagatgcaatcctactgctaatcagcacaggagttttgacctgccctgtttctgacctggtccagttcacccctccttagacaacctggtggtctcgcactcccaggaggtcaccctattggcatagtgcatcccagaattcctggattcaagcaatccccctgcctcagccttcaagtagctgggactacaggaattgactttactaggcttctggtttcttttactcagtgtaattattttgagattcattcatgatgctgtgtgtatcaattattcattcatttttattctctggagtagtattctgctgtattggtgtatcataatttgtttatatttttattggttgatgaaaatttgggtttgcttttagtctggctattaagaataaagctcttatgaatgttagtgtacaaatctgtgtattaacatattgtgttcattacttttgggtaactatctagaaatggcattgctggactgtataagaaatgcatatttaccgttagtagaacatgctaggttttccacagtgactgcttcattttgtattcctacaatacgtatgtttcaagttgctctacctcattgccagcactaggtattcccagtctttttaaatgagttaccctttaatattagatcaattacatatttgcataactgatgattactcaagtgtacttaagtggacttcttcatattatctccccttaaaaacctactaatgtttcatcctatatgcaaagtaagactcaaaataaataaattgataaattaaagtgtttgtagaagccacacacttcttaccattcctcaatatgctcaccaatacagatcaatacaggtgaaataccaaagtgtatgaaaagcaaaatatgaaaataaaattaagtgtcaactagaacaagttaaagatgtctgctcttactgctattcaatgtggtctggaaattctaggaaatgcaacaataccagaaaaagaaagaaaaatctggattagaaaggattaaaactgttatttgctgaacatctgattgcctatgtagaaagccggaaataatttacttttttttttgagacggagtctttctctgtcacctagactggagtgcagtggcacgatctcagctcactgcagcccctgcctcccgggttcaagcgattctcctgcttcagcctcctgagtagctgggattacgggtgcccaccaccacacctggctaatttttatgttttttatagagacgaggtttcaccatgttggccaggctgctgtcgaacttctgatcttacgtgatctgcctgcctcggcctcccaaagtgctgggattacaggcgtgagccactgcacctggccataatttactttttaaaactcctagaactaataagtacgtttagcaagataataggatatctaatatttacaatagcaacagatattctgaaaatttttagagtaaatctgataaatgatatgcaagatctatgtattaaaattttaaagcattgcagaaagaaattaaagaagtcacaaataaatagagagatatactatgtttatggtcaagactcaagatgtcagttcacactaaattgttctataggttcaatttcaatataaccccagtcataatcccagcaggtttttttttttggtaaaacataaaaagtttattctaaaatccatatgaaaatgccaagaacctgtaatagccaaaataaatttgtaaaagaagaacgaagttagaagactgacactacccgatttcaagattgattaaaagctacagtaatcaagatagtgtggcatcactggtagatagtagagaaatgtaataaagtggagtccacaaattaacccacatatatatggacaatctattttttacacagaggtacaaaggcaattcagtggagagataatagctttttcaacaaatggtgctctcaataattggatgtctatgtatagaaataaaataaactgctaggagtatctcacatcatatgtaaaatattaactcaaaatgaattataggtctaaatgtaaagcctaaaactataaaacatctaggagaaattataagagaagagccttgtgatcttgagttaggcaaatattgtttagatataacacaaaacatataatctacaaaattaaaaaaacatgatggacttcattaactatttaaaaaccacaaaggtttgctccttgaaagacattgtacagagaatgaaaagatgccatggacagggaaatatatttgcaaaccatatatctgaaaaaggacttacatcaagaatatataaagaactctcaaaattctataaaaggaaaaaggataataaaaataattcaactaaaaatgggaaaaaaatttaaaagacacttccatcaaagaggatacatgaatagcaagtaagcacatgaaaagataactcatagcatcagaagcattcatcactagggaaatgcaaattaaaactgcagtgagataccactacacatctattaggatgactaaatttttattttactctgaccatattaagcattggtgataatgtggaggtactagaacttatataatgctgttgggcatacaaaatagtacagtcactttgggaaaaagtttggaagcttcttaaaaagttaaacttacacctaatatgcaatccaacccttccattcgtaggtatttatccaagagaaatgaaatcatacaagatatgtagacttacatgtgaatgtccatcagctggggaatgaataaacaaattgtggctcatccattcaaaaaaaaatagtactcagcaataaaaaggaacaaacttctgatagaggccataacatgagctattcttaaaagcattatactcagggaaagaagccagtcacaaaaggctacagatggtatgcttccatttatatgacattttagaaaagcaaaactgtaggaccagaagtaggaagggaattgagggaaaaggcaatgatgcagcttttaggggtaatggaaatgttctgtgtcttcagtgtagtgatggtaacgtgactatatacatttgctaaaacttattgatctgtacacttcagaaagattatttttgttacataaattatacatcaatgaacctgatttttaaaaaatatatttatgcacatgaaacagtaagcagaactgattaatagtagagaaaactgggacatgctgaagtggtcaggaaagtttttctggagtaggttcacttggttagagagtttctatctaaatagatgaaaagcagaagagtgaagttataatatgagttaggaaaaacttactgctattcaataatccaacattttggtggcttaacagaggaatgttatatttcttgcccacatggcagttcacttcaatattcaggaggcattcttcccacggatgaggcaggatctcaaacctagagagtgtaggtcttggcatcctccactgtgtcttctgtatctggcctggagacaggggaagaaagatatggaagcagagcgcttatgtggcagatcgagtgggagattttggaggacaggcataaaagttgagtatatcatttctgcctgcactctattggccagaacatggtcacatggccttgtttatctgcaaaaagcactgggagatatagtttgagctgggttcctagaagaaggaaatgagtttgatgagcacataacaatgtctctgccacaggtatggcaacgtgaaagtgagatgtgcagccatggagcagtgaggagttcagtttggctttaggaagctggtaaaatttgtaagagaatgtggcagaaattaaaggaggacattaaatgccaattatattgtctttgggggaataaatttgcgttaaatacatctcgtttactaggataatatttgcctaccactcaaagatatactgaggatggaatagtgtaatatagtcaaactatctctcaaggtttataaagccctaaatgagtatatgacacatattgtattaatctgaaaaaaaagttgctacaattgcaaagcatttctttctttttcaatgatttcccttcaacgttcaaagtttttccataacttttgacctttgctatttcctccatagccccctgaaggaatagttatttcctttgcctatcttgttctcctctaaagagaagatattaataagttattaactataaaggaaaggaaaccacaggatttcttagaacacttctttggattcctgctatgttatagctaagcatataatggtaccatctgtgctaataaaaataacaataatgtgtgcaatgttgaagtgaatgatagactcttatttcaaagatgaaattaagccctggttttgtctcttctttctgcagatttcatttttgcctcatctatattttctgcttatctttagtatgttccttgtgtcttgcctcaattactctgataactctgtctcttcccttagggctgtctgccaactagtcacttctaaaaccaatttgatgttttttattgcattggcattctctcctctctctttttaaattaccttcttggtgcctttgattcctattttaactattttattgagttccaaggcaacttttccaccatacttgagctattcacatcaatcacatgcagttttttcacttctccatgtctttgtgtcagaaacattcttaaaattatggttttgatattttccatcagttgtatttcatgcatattttacctgactgcatatatctgaaaaataaggttttcttcattgattcattcttctcgcccttcaaacaattgcacatgtgattttgactgaaattactgatttaatattcaaattgaatagactttctcatctttgatattttttgattagagatcatgggtacagttaatgctttatactcttagaaggtaactgtgacttcatcagtaggaagctggccttctaagtttcttctgacactttgggtacttatttgttttgttttattttatttttattttctaggtgccacattttattggcagaaatggagatgccttaagttttggttaggtgtaagtgcaataaagtatatttttgtgtatgtgattacccatgattgtagaattataaggatggtatgctcaatgttattttctattttgtcacaatttattgtctcaatataaacacaacacactgatttttctttacttaagtttacaactttagaaggaaaaaacatggttctgtaaaataaagggatagttaataagtcttgtctcctttcagaattaatgcaattgagtctcttaaataaacaaaaatcatatccaactttttacgtaaaaggaaaacctgaatttcatgaagctcttcttaggttaatttgcaaactctgctttttccctgtgtgaacttctttgtcactttttttttttttaaagcaagactaatgctatttcataaccttactaatagatatttacctggcatttaggataagttgtagaaataaggacataggtaagataagggcataaatacgattccaatttaaaaaggaaaaataaacatagcagaattctcagcttgtatgtgtgctttgactaagctgaattttaatcaatgttagagatttataggttgcacgctgcactttataaggaaagaagcatatatattttgccttcaactaaatataaaaaagtatttggattgtttcaaaggctttcatactttataactcacattgtatctgtaaaaaagatataaaaacatacaattggatgaaagtgaaaaatttttacatcattgttgtttaaagtttaaaaaactatgcttgaccaaatatcacattttattacaatttactaatttctagatcattttattttattttatcctataaaatattctgcctggttaaaaatgaagggggagaaaacatgatccacatatggatttacttaatttatagttgcttattataccaagatttgctttataaatttctcaatgactttaaattacatttcggactttaaaagagatttacagcaatgtattttatttggcacttcaatatttaatatatttttagcaatttaaaagtgatgatttgcacaaaccacatccatctttattggagttaaataaaagcaatttctcttatattgcttacataattgatttcattatagaattatccttgaaagaacaacctttttatgtttcctagttattatatatgttatgtgtggtatttctccctgagcactctaagctggatgtgattttgttctgatttaggctataattgttaaacttgtgcagaataatgttgtcaacaaggcctgccatattaaaaagagtaatttctccagtggacattatttttcaaattcaattttcatttaactgtcagtgtcttaatgctaactgttaaaaaacgattatatttagttttcttgaggaagctctatatagttttccataatgattgtactaatttacagtcctaccagcagtgtacaagggttctcttttctccacaccctcaccaacaacttgtcatctttcatctcttttgtaattttagtttttgtttttgtctttagacagtctgtatctgttgttcatgctagagttcagtggcataatcatagctcactgtctcaagccatccccccacctcagtttcccaggtagctaggactataagtgtaagccatgattcccagcaaagcatttttttttggtagagatgggatcttgctatgttgcccaagctgtttccatgtttttatagtagccattctgacaggcttgtgacgatatctcattttggttttaactttcattttcctaatgatccagtgattgtcttactctgttttgtgctgctataacagaatatcacagactgagtaatttataatgaacagaaattcattgactcacagctttggaggctcaaaagacaaaaatcaagaggctgggatcggtcaaggaacctcttgctgcatcatcacatggtggaagggcaagagagggtgacagtgaaagcacattccacctttataaggaacccactcccacaacaaaaacacagtcctgtgagaacagcattaatccattcatgaaggcagagctctcctggtttaatcaccttttaaaggtcccaccctctaatgctgttataatgataattaaatttcaaaatgactttgggaggagacagacattcaaaccatagcagtaatgttgagcattttttcatatatctgttggtaatttgtatgtcttcttttgagaaatatctattcaggccccttgcccatgttttaatcaggttatttgttttcttgctattgagttgtttaatttccttttatattatacatattaaccacttaacagataatatgcttgtaaatatttctcccagttggtaggttctctcttcactctgctaattgtagctttgctgtgcagaaactttttagtttgatgtaatcccgtttatctacttttgcttttgttgcatgagcttttggggtcatatctaaaaaatcaatacccagacccatgttgtatagtgtcacccctgtgttttcagtgtagtttcacagtttcgggtcatacatttaagtctttaatccattttgagtttattctataaagagtgagataaggatccaatgtcattctttttcttcatgtttgtcaatactttttattgaagagactttcttcttcccattgtattcttgcactttcatcaaaaatcaattgactgtaaatgtttgagttcatttcttggttctttcttctattccattggcaaatgtgtctatttttatgccagtcccatgctgttttaattactatagatttatattatagtttggaatcaggtagtatggtgtcttcagatttgttctttttgctcaatattgccttgcttttgtgtgtgtgtgtgtgtgtgtgtggttccatatgaatttttggattttttcctatttctgtgaaaaatgacatggggataacaaaaaactatatggagattactcaaaaactaaaaatagaattacaatagaatccagcaattccacttctgtgtatgtatccaaagaatttgaaatcagtatgtcaaagagatatctgcactcccatgttcactgcagcatgacttacaatgctgtacaatattgtacgtatacatggtggcatactacacagtcttaaaaaggaagaaaattctgtcatttgtggcaaaatagatgaacctggagagcattatgctaagtaaaataagccaggcaaggaaaaactaatactacatgttctcatttatgtatagaatttaaaacaattgagctcaaagaaacagatagtagaatggtggttaccagaggctgggggtggaggatatgaggagatattgttaagagaatacaaagttttagttaaataagagaaataaattttttgaactctattgcatagtatgatgactatagttcaaaatagtgtattgtatattttaaaattgctaagagagtaaatttcagatgttcttatcacaaaaaatagtaaatgtttgaggtgatggatatgttaattagcttgatttaatcattccactttgtatacctatatcataatatcacttttacctcataaatatatacaattataatttgtcaaattacaatataataaaaataattatctacttttaagataataaaaacaacaacagtaataaatacatcacttttatcattagagaataaattttgaaattctaatgcttagcaacaattttagattgtttgatttttataaactttataatctctttatagagctactgataatctcttgcaatttgtaggatttccaaagtgttgtccgaattcagaggcatacagtactgaattttagaccatgaaaaaacttggaattaatttagagcagggatcagcaaactatagttcatgagctaaatctggtcagcagtctctttttataaagttttattgaaacacaggctcatctatttatgtattatctgtaagggtaaagctgaaagtatgccctgtaaggcctgtatttggccctttaaagaaaaaaaaaaatggcttattcatgatgtagaggaaaaacttacttaacaacgggggaagttgaggtacctggagattagttgctatcttattttgaagttccccaaaaatagactctgaaaaaaagatttgaatttagtttgtttataaagtggaagtaatccgaacaaacattaatagaagattggagaagagagacaaggaaggaagaaagccaataatgtgttattaggcaagtgttattaattcatgtgttttcttggtggacaactgaaactcaatcctactgagcgactctggggaaaaatgtaatgcatgttccttagagttatttcatctgagggacaatggagttggggtctttatatactaattttattggaggtttatggcaacactgcctgcatcaagcaagtctatcagtgccattttttccaatagcatatgcttatttcatgtctctgtgtgatattttagtaattcttgcaaactatattgttattatcatgtgtgttatggtgatcagtgacctttgatgttactattataattgttttggggcaccactaaatcatgccatataagatggccaactcaattgataaatgttgtgtgtgttctggctgctccaccaaccagccattcccgtgtctttctccctctctttggccttcctattctttgagacacaatattattgaaattaggacagttaaccttagaatgacctctaactgttcaagtaaaaggaagtcagatgtctcctactttaaatcataagctagaaatgattaagtttaacgaggaaggcaagttgaaagccaagacaggacaaaaactatgtctcttatgccaaacaattagcctagttgtgaatgcaaaggaaaagttcttgaaggaaattaacagtgctactctagtgaaaacatgaattataagaaagcaaaacagccttatcactgatacggagaaagttttagttgtctggatagaagatcaaaccagtcacaatattcccttaagccaaagcctaatccagagcaaggccttgactctcttcaattatatgaagatagagagaggtgagaaagctgcagaagaagaattttgaagctagcagaggctggtttatgaggattaagaaaagaagccatcggccgggtatggtggctcacgcctataatccagcactttgggagtccgaggcaggaggatcacgaggtcaagggccaacgtggtgaaaccgtgtctctactaaaaatacaaaaattagctggtcatggtggcacacacctgtagtcccagctactcgggaggctgaggcaggagaatcacctgaacctgggaggcggaggttgcagtgagcagagatcttgccactgcactccagcctggcgacacagcgagactccatctcaacaaaaaaacaaacaaacaaacaaacagaaaagaagccatctctataacataaaagggcaagatgaagcagcaaatactaatgtaaaagctgcagcagtttatccagaagatagaggtaagatcattgatgaggtagtttccttaaacaacagattttcagtgaagatgaatcagcctaatggaaaagatgccatctagtactttcattgctaaataggagaagtcaatgccaagctttgaagccagacattgacttctcaaagcctcaaaggacaggctgactctactattaggggctaatgcagctggtgactttaacttagagccaatgctcatttacccttctgaaaatcccaggccccttaagaataaaataacagagctattctgcctgtgctctagaaatggaacgatcaagcctggatgacagcatatctgtttacagcatggtttataaatactgtaagcacactgttgagacccattgcttggaaaacaagatttcatttcaaatgtcactactcattgacaatgcacctagtcactcaagagctctaatggagatgtatacaattaatattattttcatgcctgctaacaaaacgtccattctgcagcccatggatcaaggagtaattttgactttcaagtcttattatctaagaaatatatctcgtaaggctatagctgccatagatagtgattcctttgttggatctgggcaaagtaaattgaaagcatctggaaaagattcaccattctagatgacatttatgattcctgaaaggcagtcaaaacataaacattaacaggaattggaagacattgattccaaccctcaaggataactttgaggggttcaagacttcagtaaaggaagttactgcagatgttgtagaaatagtaagagaactagaattagaagtagagcctgaagatgtagctgaattgctgcaatctcatgttaaaacttaagtggatgaagagttgcttcttatgcgtgagcaaagaaagtggttccttgaaatggaatctactcctggtgaagatgctgtgaacattgttgaaataacaacaaagtatttagaatattacaaaaacttagttggtaagaaaaaaaaaacttagttggtaaatcagtggcagggtttgagaggactgacttcaattttgaaagaagtactgtgggtcaaatgctatcaaacaaggttgcatgctacagataaatcttttatgaaagacatagtcagtcagtgtgacaaacttgattgttgccttatttttaagaaactggcacagctacctcaaccttcagcaactacctccctgattagtcagcagacatcaacacagaggcagaaccctttaccagcaaaaagattacaacttgctgaaaggctcagaagattgttagcattttttagtaatgaagtattttaaattaagttatatacatttttatgcataatgttgttgcacacttaagagattacagtgtagtacaaacataacttttatatgtactgggaaacaaaaaaatttgtgtgactcacatttgcgctattgcagtggtctggaactaagcccacagtatctctgaggcatgccgataattgagggtttctcgtaggggtattatttctattgcaatctatcttaccatgtgcaagggcagaagaggcttcaatagccagagaaaaaagtcagataaagagatgcaagaactgcagttgaaagttgggctggcatgtatggaaatgttaagggctgagttattatgggtgtttgctaaaatccagcctaccactattaatatccactgttgcctccattaacttcaccccattcctgctacatattcttctaggtggcaagagattacaatttcttttaaaaacccaacaacttagtacaggagacttaatggtagattttgtagtccttactgctgcaattaatcctaaaactataattaataatcatcatgcccctcctctatcactcattctagattcctctcatccttggccagtagttctgtaggtgtaggtttgtcctatgggtaacaaagactttcatcctgaggggcttgagcccctggttactatgaccttttcagacagaggtcactgtaattgtttgtccatggttatcactaggcttgggggcaccaagagctcctcagtgagtcccctgaattctaagacatactgttcattatcattttgcatcaatacttctttctcatcattatgattatgatttatttgtgtcagcatactcactgttttatattttccttctaatatatcaggatcaggataacaaaatgatcaggtagcagccatagtttagtagaacccttactctatcctcccttgtaaaagcacccctgcaccactaccacaccttggaaatcaagtgtgtcttttacagctgagttgaaagtggaacatgggaagcacacatcacccaactgggtcacttcgagagataataaaagggcacttatagtttgactttttggttctcagagccatgtattccacctgttagagacacaacaccatatagtagccactggcatttaaaggataatatccaaatctcacagagtaacagtgccatccacagactggtttgtttacttgtgcctttaagaaacaaatccaacattctgtcaggccagcagatttggggtaatgcaatatattgtaaaatgagtgatatttcagtcatttacattttgtcatctttcctttgctgtaatatgggttctttagttcaaggagatatcatataccatcttgtgaggataaatctcccattttccaagtccttggataatattgctagatgagacacttagaaaagctaaacccatatctaaaatatttattgatcccaataatgaaaaattactgctctttccaggtaggaaaatgtcagatattatcaacttgcaaccaacttgcaagttcgtctctgattatgagaaatcagtcatttgacggaggaagtagcttgaacaactttgcaagagagagcccatgcatagcgtacattcatgtcacagtaattattcatttcatgggccattacacaacaagtgtaatagccaagaaaaacaaaaacaacttgtcctactagacgtgtaattctatccatttgtttgttcagtgcatctaattcagaggacatttatacaagaggccaagatatacatactttgtgcctacttctataattatttccactatttcttctctagacattgttatctttagtcttccaatcttgctttttccaaagccacttactaaacattcaagtcatttgtaactgctcagtagtccatatatatccttctcttaaatatatgttctgcccctgcacaattgatggctagatacactgctcaaaactctgcccaatgggaaggcttgtccatactattgtctttcagggatatcacagagtgaggatctagtacagagctttgaactcccaacaattgatcgcaatggcctatcaatgaaccaagtccaggttttactctagctccatcagccagttatatggaacttcccatgaagccataggtatgaaaaacgtgtcagtgaaacatggaagctagtctacctattcctgaagcttatttatattttctcagtatatttgttatattaggctttatctgtttaacatccagctcacctgatgaacagatcagtgaatagtccaaaatggggcagaactgacttgaaaatctgaagaggccatgttaagggtcatgtttctttcttagtgctggatttgcaaagtacaataacttgttctttaccttggggcatataggacagcatgtcccagacaactggactactacaaacttcaccaatgtgatacacccctgaattaggaagatttatctcccactatctgtctgagatatgtcacagtgtggttgtccttattgctagctgctgctcaagtttaaatagcatgctgtcgtcaatacaatgcaccggtgtgactttctgaaggatgtcgaaatgatcaaggtcccttcagactatattgtgttagacagcaagaaagttagcaatcttggtgtataatcaagaacacattgttatgcaatcatgtgaatctgaactgcttctgatccttctttctgatgagtatggaaaaaaatttatcatttcagcagttgtatactgtatatcagaggctttcttactctgctgtagaacagataacacatctagcacagaaactgtaaacggagctgttgtttcattaaatttgtagtatttgactgccatgtgccatgttctaggctgtttttgcaggtccagaatggtgagttaattgggaatatgatggagatgaccatcctggacctttaagtcattggtggtgggactaatctctgccatttcatctaggatgccacattgcatttgaattacatccctggccagagaggaggaagcggtattaaggacttgtactcggtctttcctaccataatggctcttactgaaaagatcagggaaccaactgaaaggttctcctggttgctaagtatatcaatccagattctatattcaaggactagggaaataatcaccagatgagtttgtggacatattatgtccactgtgagacagacttgggccaggcctccatttattacctggcatctatataccctataacagtcaggccttgatggtattcagggtctcttggtatccaacacaccttaaaatatgtatttttccccagtgtacagagaccctggtatttcggcgaaaatattggggaattgatactctacacatttgctatggtgttgcaggattcttctacaaggggacctagctttcctagttaataggttttgaatctactactgtttctgcttggaacactggctgagagattgtaaatttccgttgtagtcaaatactagctttttcagctcccctgatcttgatctgtttttaaatgtgtgtgtgtatttgtatatattcaaccttatattccattacttatatttcagcgcttaaagtctagagtcctcaagacttcttctcaggcatattctctcggtttttgctaatatataatattgatatcctgtggttaattaggttaataatcaccttcctcctatagaagggactgtttctccagctgggtcatgctgagacttaaccctaattatttttctggaagtaatgaggtaaagtggggcaagattagcttgtgagccatctgcttcaggtgaggtctttgtatagtctccagtaaaagaaaggctgctatcctctaacaactcggggtgaggcacttctgttggggttctaagaaattggaggactcagttttaccaaatgcatccacccgcattgtccccatcccacatatcatggtcatattctttcttctcagggccttacttcaccatataggacttactggttctgttttagcctttctcacaataaggcaacatattactccagctggagaagacaggtgtgtttaaatacagccacagagactttttggtctttgcaccttgccctgagtttacagtgagctcaactgatactgtcattttcttgctttaagcgctgcaatggcacttatcaacagccgcccaatttcataggtcctataattaccattgcctttacagctctcagatgctatgtgtaagtatcttcttccatttgtattttatcccaattcttcacagatgagttaacaattgtggtgctgtagtacaccagggattatcaccactgcaattacagccagaaatggaattcttgttgccatatgtctaacaagttacccaattctgctaacataccctgagtatctgctacttaatataagacaataatgtctttgcatatgattcctccaagcagaccagctgctggtcaggatcattggtaaggaagggggaagtaatagaggaaataatgtgttctttagcaagttaccactggtcagctggagcttgctggggaactctaggaaacagtatggaacacacacctcagagttataccataaatggagtgagagggtagggtattcatataccaatcaaggtgtgattctggaagcataggcacatgcataggcagagtgggctctgttatacagggaaagttctcaggtagagatttagctgctggatgttggaagtagaggagacatggaatgaaatggtaaaggctgaacagatatgggcaaggcactgatagcatcttttataagtgacatctaacgtcttagtgtatgtgaagtagaatggaaacaagagcacaggctttttgacttttttggtaatcctacgttagactgttactttcacatttgtccttagggaacgttgtctagttttcacttacttaaaagtggctttataaaaatgagccccaatccaatttaatgatcagacctcctctttgtggccagcccaaggataaagattaaaaaatagctcttgtttttttctccactgggctcaggaaatagagtttaataagcaaatgggtgggaggaggaagaggaaaagagggttagtaggatttttttttttcactaatgggaaagatcaaaaccaagaaaagacagtggaagctttgtgtaataagtaacagtttttataaccctgtaactgccaaaaattactttatagttaaccaatccaatggcagaatatagatcataatatatcatattagtcagtgttctccaaagaacagaaccaagaggatatatttaggaagagatttattataaggaatagctcacatgattatggaggctgagaagtcccaagatctgctttctggaagttggagacccaagaaagcagtgatgtaattccagtccaggtctgaatgcctgagaaccagagcagcctgtggcataaatccttgaccaatggcaggagaagactgacattccagctcaattaggaaggcagaaagaaaaaaggggtgagttccttctttttccacctttttgttctattcaggccttcaatggattgatgatgtgtactcaacatgagtgagagcaatctattttactgcgcccataaatttaaatactaatctaattgggaaacactcacagcacacccagaaataatgttttatctgagcactctatgtcaagttgatataaaattaatcatcacacacatccagtggctggtgggatagattttagagcctccaaaggcaattttgctaggtgttcctcacttgaagatcggtggcctctttattagttagccttatttttcttaggcaatacatcataggccactcattgctatgcccttagggaaaggtctatatctatatcggtatctatacctatatctgtatctgtgtctatatctgtatatctatatcatctatctatgagtaggatttccccagtagtagccacatatactcagacatccaaatatttgcaaaaccaaaagtactttcttcagttcaccctagttgataagtaggcaaatgtgtgccttgacttcatccccactgtcctatatgtatgacagtgggggagttgtatcaaaactaagaaaaagatgatagaaatctacagcacggcattggggcacagcagcccagagagcccgaggtgagctcaaaagcaaccccaaatgtcaaatcaaggcagtatactttaagttagtgttttttggccttattccatggactctaatgcgttacacgtgcctacatttgagcttaccatgattatatttttagtttctgtatactgactggtattaaaattgaaagcttgaaagcattaccttgcttaaaatattcaaccaattgtgaactcagagttttatgttttgcctgcattcccactatttaagttaattaacgagtaaatttctagtatctagcaagccacatctgtatgactagactatggtggacttctttctaatgctcaaatattggaaatgtgaccaataaattctaatttcttttccttataaggaatcaatagttaacaacatccaggtttcttcatttttatagttcttgttcaataatgttaaatcaaacatttttttctttctcagtatatatatattttattcaaaaataggacttaagctaattttacaaagagacaaatttggaaagttttaagttattttaaaagtagacattttagctctcaatctgaatgatcatcagaataatatcagggaactcatttaaaattctgaaattaagccatggtcatatccctgaagactattaatccgtagataccattcagggcctggaaattggcatgctgtaaaactctcctaataattctgacaactttttagatttaagaaaacatctgtgaacacaccattgatgtgactttaagaggtttgtcttccattaccaactaaaacactttatgaccatctgatagtagataggtgatttccattcttttgaatttctgttattcgatttacaaagtagggataagattaccttttattcactttgggaggccgaggcgggtggatcatgaggtcaggagatcgagaccatcctggctaacaaggtgaaaccccgtctctactaaaaatacaaaaaattagccgggcgcggtggtgggcgcctgtagtcccagctactcgggaggctgaggcaggagaatggcgtgaactcgggaggcagagcttgcagtgagccgagattgcgccactgcagtccgcagtctggcctgggcgacagagcgagactccatctcaaaaaaaaaaaaaaaaaaaaaaaaaaaagattaccttttattttgattggtcgtttttggttgcaataaacggagacttaaccaagttacctaaaattagctgcggaaaactggggcactcagctctgggcactacctatccttctccctctcatgggccaaaggtttctctttcctggcatttctgtttccctctgttcccttataactttgatttgtcatcacacctgatgaccctgattgccctcatggctcacctctgtaaacaccctttcgtctttacctgccactattaactgcttgattattactctttctcaattcacattttttaaaacagaaagtctattggtcccagcttaacttttgtgccaggctacatcatatagtacttgatactctataaacttaccacccttgaatcagtgttcaccttttgcccgattagctgatgctgaaagacacagggtaatgtgatattaaatatggctgcctatggggatcctatagaaggaaatttggactttctcttaaaacagaatgtgtgagcagcattgtcaatgtctacgtagcacgtttacctcatatgtgtgttttcatgcttacttgagatcttgtatatgaaagcaacctgtgaattataaaactcatatgagttattaatgccattattaaaagcataacaatgccatgaaaatattagtgtttcattccaataaaaagctaaaattaaatgaaaaacatacctttctgtaagccaatgttattttgaaaaattatcattaatgagcccagattaattgctctctgattaatttacatttatcacgtttacttatgttgtacaatagctcccccctcatccaaggtttcactttctgaggtttcagttaagtgtggtcagctgctctccaaaaatactaaatggaaaattctagaaataaacaattcgtagtttttatattgtgtgccatcctgatttgtgtgattaaatcttttgttgttccactttgtcctgccagagacataaattatttctatgtccagcgtagctgtgctatatatgctacttacccatcagtcatcaatatcatctgctcctaatatcacaccatagacatcatcatggcttgatgatccaggaaccctgaaagcaggtgatcctccttctgagtattgtcagaaggtcattagtagcttaacactacctcacaatgcctatgtcattcacctcacttcacttatcatgtaggcattttatcatctcgcatcatcataagaaggataagtacagtacaataaggtgttttaagaaggagagataccactcacataactcctcttacagttatattgttctattttattattagttattgctgttaatctcttatgtctctaatttataaattaaatgtcatcacatgtaggctgtgtttatggtactttctgtagtttcagacatccactgggagttttggaacacattccccacgaatgaggggacactattgtattattcatactatcatgatgtacgtggaagttgcatgtgataattagttcattaaaggctataggtgtttttttttccttcaaatatgtgttagcaaatgaacaatatcagtaccaggtgagaggaaaaaaatatagatcattaatactgaagtaactaaaatgttcagagtaataatgttgctgcagaattgctgttctctgaagattttttttaaaatcaaagcgctactgtttttcctaatttattttcttgaatgtaagttttaatgatacaagggttgttgcgttatttgttgtctggaaattccatccttttactttcaaatttctgaggaagaatttgatgcaactttctttctagaggatccagggttctcagcttgtaattcttaaataattcttacagagggtaactgatgactgtcaattctgtggtatacctttaaaatatcagctaatgaatggaaaggttctaaatcttgaaaagagtacctgcttacactcatctatacatttgttgaaattcattgaactgtacactcaagatgtatccctttcactgtaggtaaattatacctcaattttaaaaattaaaggagttactttttatgtatgatatactgaattggaaacctcacaatgatacactgacaatattttttaagtttgcaaaatagtatatacaatatgacttcatttttataacaaaaagctatgctatatatacagatatttgtatagatgcatattattataaccactggaaaaatgtggaatgagaaacatcaaacttttaatttaaaaggtaagaaagagagaggagatagagaaagagttttactacttaatttatgttctcctgaaagatgttgcaattgcatgtatggtttccactttcttgtttctgttttctgcattatgatattataaaaaataaaaatagcaaattttgtactattattcagaaatacataattttgatgagaatagattctgagtgtactacaagaatataccttgaatattgaatagtctcactattgtggaatacatattttaaaaagaaataattatcaaattctgtgtgacagataacctaagcagaaattagggctaaaacatgttaaagtgttattttaattaaaaattatttaaaatatgaaaacatgaaaaatggagaaactagtaagataatttttttgtttataaatgtcataaaaattgttagatctatagacactgggttctcagaagcttaattgttgaaaatttaggcataaaatataggtcaacataaataaccaaaaaataaatttctccaaaatatctgcattctaatcagatgataggattagtagagagagagagcctctggtctttcagaagcttataaaaagaacacttgtgaagccccttatacacacaaagcatatccaattatatgaatatttcaaaaagaatatttcttacctttatcatagagacatttatttccaagttggcaatacagttttatagatcatactatactactagtcttcttttttaaaaccaagaaatacgtcattttttaaactacaagtaacagtcatgcttcctgagcatctgtttcacctcccaatgatgcaaaacgatatttaggggaggggaaacacaatgaatatatttattctccaaattgcatacaaatattattaaacaaaattttaaaaattttctttgaatgtcagaatttaaatcctatgaataggcaaatagttttctccaaaattcagcaatgccctttcggcagacccccagctctgtctttatccaggactttgtcattcttctgtgtttgtactgcagcagcttatttcctacttgtttccttgtccctattttccactcattcttccactttatgctctaaactgttgctggattatgttccaaattaaacaaatcctattagtctctcatgttcccagagggaattggtatattttttctgcagaaaacttaaggtccctaaccacagagataaatagttacaaccagagccttgaagagttgacaatccagaggcagtacagtcatgtaaacacataatcataccagtgtggtaaatataaaaaagagatatgcactacgtgcaatactgttaccagaaggggtgattaaccctgcatcagtaggtcatgaaggatctcacaaagaagtaaacatttgatctagttcttgaagactgactagcagtttgacagagtttccaggtgtagatatggtgagaaatttcttttggaaatctctgaaggcaataggaagactgaagagtttaatcttggttgaatgtgtggtttatgaagatcagtggtaatgtacatgaaggattgcctaggcaggacgagaggtttggagggtctagaaggaggatggaccagttagtagactgaattactagttcaagcaagagatggtcaggatcagagctaacattgtggctgcaggaaagaagaggaaagtttaaatggatgagctatgatggagaatcagtggcatttaatgtataactgtacatgatgagttagtgtaagtgtgaagtcagaacacatgaaaaccacatttctagcttgcaggactgggcgaatgttggtgccatttatataaaattcagtgtaggtgggtaagagcagatttgggggaaagttcatgagctccagctggggttatggaaggtgaagttattggttaaaattctaaatagagaactcaagtaggaggtgctgataggtggcagtagattttcagtggcatgtagagtaaaatgagaagagaagcaacaatagaaccctcgacaacactatcatctaagcagaagaatgagaaaggaaacagtaaaaggctctaaaaaaggatggattagattggagcaaaataagaaatcagtgcagtgacaggcatacaagccatagaaatacagagtttcaaagaagggacatggggaggccccttcaggcaagcagagggaggctggattctttattctttgtatatagggcagagactcatctgttacagttttttcatgttttaagattaaccaaagttaccactagttctacccttgtgtttttcattttatccctagttagtattgctagacaatagccgtaaggttgagagaaattagtaaacacctgaaggctttcagtctttccaccaaaagatttggatattactaaacatttatcttattttattttattttgaaaaaagatgacttacccagaagatgcatacaaacatactaatacatgcatactcaatatacttttcttctcaagttttggcattaattaattttggtaattcctgagcttaatggacaaaaaaggctatagaatatgtaaaattgtcttcagacctaatttattgatgatctcaatcactgagcatattgctttagagtaaaagagactttttaattttttaatttaattccacaattgacagttatttacttttcatatttttcatgttactatggcatgcatttttttctagcaaaattgaacatttttattaggataatttaatgtaacctttaacaaatttgtttggaaacctactgtggggtttatgtcaatacagaatatgtttgatccatacatagctgagtctgtctcaagatgagattacatttctagttatttttctttgaatattttttataatttttgaaaatcatcactgattttatttacattgatttaaaacatcaaaaaagtaactcgtaggttaggagtaataatagaatcaaaagagaagatgagaattttagaattaagtacatacatttgccattagtaggcaaaaggcaataataagtttcaggcttagaaatccaataaggaaattgaacgaactgctacatttgagaaaataactgtagaaaatgtccttcctgttaaaagctaaaagggcccctcttgaaatctgctttttcttgaaccagaaaactaaacaaggaagagtttgtgattaaaggagagatacaatattaaaacacagggagtgatgtctagccctagttaaaatatttatatccatgttatttaacttgttctggctgctatgttaccactgcatctccgcttctgtgtcttttatgtgaagctgggctctccctcaaatgatgtgaggggctctgaaaaatgcctgcccataatgtctttcttcttggtctgctatgttacctgaaatcttagtaattgcaatggtgtgtttttaaataaacaaaactttagctagaaagggaaagaagtatttcaatctgtagcctccattaatataggcattagaattaatttatgcaattttctaatatctaaacgaacagaaaaagaacactgagaataaaggaaacagaataggtaaatattggtgttgtaatgggagtgggtggggattctaacttcgggaatcatgtagattctaaaggtccagggaactctaaagaattatggacaaccagaagtagcaaggtgaggaagagtggtatagcaaaaggaatgtgaatccaggagcaagaggcctggagtcctagtcctgactgctcctaatggcaaatctctctgaaatgatttgattcattgtcaaaagaaaaatcttaaaccagattactatttttaaaagtctttcaaaatctgaagttctgaaacatgttgatttcttaacttctaatgtgcatcatttctaatattcgattgtactcaagcgggaatgggctgagggattgatgaagtggcaaagtcagagagggaagcaagcatagtcatccacagaaattccacaagcaggtttggcagctccttttggataacacgtctgacatggatgctacattggtgatctgtttaagagttcaagtttcccccaagctagttgtacttggcgttttctgtggtgtcttccacaggcagaaactaatgttattggtagttcttattgcaagtattgaattgctggccatgaaggtaattctgggtagatttgccagaatctgctatgccttacatcatccaggagaactggatgattattacagactgaacttaaaagtatgccttatgaaaatgatgatattcaaacttaagacagaatgcctgttgatagacgaacctgttgactgcagtttcttgtagtccaggacatagagattacactgtgatttgtaaattgcatttgcactgtgtacggcgattacctttgatagctttctgatttggggaaagtaatttgacctctttaggcctcacttgcctaagttcacacagttcttgtaaagtaagcatggatagtgactggcatatcaaaagttctcagcaactattaactgctatgattttattactacaaacattctattggaaggaaataaaatagaagtcttcattccacatttgcaaactaaaattgtactgaaacacttatcaaatgttaataaatgtctttcattgttttaagtaccaataatttggctttccttgtaaaactctttttaatttttaattttaaatgccatgtaatacacttgttctctctttgaactgagatttatcaatgtaaacaagaagaacaattcaattcattaaattaaagaggatatttgttccaggctgaaaaattaagtggtttactacacataaatataaaatttccttcaaacaaaaaacacaggttcctgcctaagtgagaaaaaatgtattgtctaccatcagacattacattcagagtcttaggctcagtggaaagagaaaagcttacaagtaaattggtcagctaagcagttctttaggcataatttgaccagtttgtttcttagtaaacctgactttcaaccacaggtatcttttgtaatgctaagtaagaaacaaacttgtcttgtctttttcagctcagtagagttggttggtgggatgaaagtgttcccaccttagtgcacagaaagttcagcaaactttattagtgagtcaaactttactcaagtagccctgtgccaaacagggctagtattctaggtaatagagttcagtggggaataaaacactcaaggatctctgtctgcatgtggagtcataaatagataggtaaatagacgtgatagatagatgatagacagacaaataaaaaataaatagcctgacagaaagaaacctaccaaattctcataagttttatgtagaatgttaaaatacatcgatgtggtagaaagtgactgggtgattattttcgactgggttgtcagggagggcttttctgaagaggtgtcatttaaaatgaagtcttagtgggaggaagataccagctatgtgaagattatggaagagtgttctagaaggaaagaagagctggtataaagatcataggggaagagtttgtttcagaagatcaaggaacagaaagaaaatcaatgtgagtaaaccatagtgcatgatgaagagattggaatgagacaagttcagcaaggtaaagcaggggcaagattatgaagtcaaggtaaggagtttgggttttagtcaatgccctactgaaagacattggaaattttaaacataagagtgagatgatccaatttatgtttaacaaacaaacaaaactctggcttcttgtaggaactgaattgcaaaaggactaggctggaagcatggaggccactgagggaactgggttaatgtatggctagttgttcatcatacctattacctctttttctttggcatacagtcagattgccttttccagcctcccttaaagttagatgtgatcatatgatagatttatcctcaatgtaatatgagtggaagctatgagcaccacttccaactcttaaccataaagccttccacatacaaccatccatgttctttccctctccaccggcttaatgtgaatacagcgactatggaagaagccatgtattgaaaatagtgacatcatgtgatggaaagagcttaggtccgaaatcactcactaatcaggaactcacaactaagatttcttatgagtgagaagcaaactgattatgtaatgactggattgaggattttacctcttacagtgtttagccttaccttaactaaaataggtattgatgcagtaaaataagtgatttagatggtggctgtaatgatgaaggaaaggtgatgaacagataacatatacaggagataaaataaaaaaaaacttgattgaaaatcagagaaaagtggtaaggagaaaggtagggaggacccctaagttgctcgtttgtgagctgtgtaaaaaaggctgtcatttacaatgttagatatcagaggaggaggaaatgtaatgagttcattatgacacctgttgattttgagctctcgaagtgccctcccagagcagctttctagcgtcatatttgagtctggaaataaggaaaacattctttgcttaaattagcattaattgggctcatactatgccattgtgctaagcacttcacatatattacttcatttaattttctctacaaatcaagtaaaagtaaagcaaactattcattttccagctttacggatgaaaacactaagacttacagaggataaataacttgcctatattaaagtttcatgataagtagtggagttgaatctgtacctttccattgatttataatagtatttgtttgatttatcattcatgggtctgcaagtctgctattcctctgctgaactcagctaagatcatctgggcctggctccaggctgcaggttagactcaagtctgctccatgtgtttcctcactgtcctcagccacctactacttggaatatgtatgttcttactatggtgggtcacagaagcctgagatgccaagccaagctgctgcatttaaggctgccacttgtttcaagatgctgactttccattggccaaagtaactcatattgtcaaagtcaacatccacatgggaagtggttaggagaagaaggttatactctactctctcagttttttctcaacttcccttccttccctccctctgctaagtgtccttagacataatttgaccagatcgtttcttagtaaatctgattttggccacttccttccctccctctgttaagtgtcctgttgattaaattagtggttagcaaatttggtacaaataagggtcggttcatgcattttaaatgtccttagcagagggagggaagaaagggaaattgaggaagaaaaaccaactttattgcttgaacaaaaataagatgatgccagagaaaacaagaaaagaaaacactctgaagagtgtccagaagtgaaagatgctgcagagctttgaaaaacataaaaaccaaggagtatccttagatatagctgtgcagaagtcaggatggcagaagcaagagtggctgcagtgccactttgatgggtggaaggcaggcactggggagggaatcagaggcggcaaaacaattatctgcgtgcaagtttgctatgaagagaaagtacaagagtataagaatgctggcttgaggaaagtgaagatagctaagctaactcgtgcattggttaaaagtgcatggctaactatccaagaaactaccaactaattgtgtgaccttaggcaagttacttaatctcatggtgtctcagattcctcatcatgaaatgaagataaatgtaaattacttcataaaatcaatgtgagatgaaaggaattattatatgtaaagtgcttaataaatgttagttattattgttttatttccagaatgggaaaatattcaacatgatcctatattgatgacaaaaggcttgcataaagaaaagattaaaaatttagggggattttatattatgtccttattattaaaaaattaccacccatctatattttctgttgacttaggtaaatgggagaaatctgattattttcttctgaatcattttagccaacatgccccctttaagcaagataaatttgttgtgtatctgataattaatgacattatataaaatttcaacttatactcatttccctccaaaatatatttatatgcattttagcaaagatagtgaaaataacaaattagccaatgcttctccaaatttgtgagtttgctcaatttaattttatgttccaattttatattttaattatcagtcatcttattaaaatcttagtgatatatcagtcagtaaaaatcctctaatgcagctatttatttgtaagtataaatgttattttgcatttaagatttgttctagctaagaagtaagctaagtcaatttaccaaaaactactttcatctgacaatttcttgaaatctttcatgtattgtaagacacagactcctcaaactagaatttaaaatcatggacaatgcagcctcaggttatatccttctgttctttcatatatgccatttcctttccttactgcctcttgttctcccagactgattcttgcaataggccaggtaagggctgccaggtcactagccgcttgaaagctgggacctgatacagttgtatcccagagaaaaagaaggtatgtacttgattgttataacttttactattaaaaaaccacctcctagaaatcctaagtggcaataggcttcatgtgtcatcaaagttttccactatctgtaaaaaaagatgttaaaatgaggtttgataatggataatcttttacaagccatgacgcttttcatagagtcctagctaaccactaatttaatgaaaagcctcctcctttgtactttcacttcataatctttacaactttgtcgaaatgtgtcaagttgtagtgatggttctttgtcttttgttttcaaatacagaccccagttcctaagcatgattcatttccttctgggtgaatacatcttttgtttccttctaggaaaacttcaggttgtatctttgtaaaactcaagatttaactcatttttttctgagctaaaagttgaaaagattttttttaaaaaaactcataacagtttcataaataaataatatcaaaatcccggagccctatattgttttgtcattttctcaaatctaataatttgtgttatatagcatttaatgaaggctgccaccaagtcttaaagtgtgtgtgtgtgtgtgtatgtgtgtgtgtgtgtaactcaggtaccctttataccaaaaccatgttctcatattgataaggtggactattcaaagatatataccagtttaagcaacttgttttattatttttggaaagatttggtggtcaaaacattacatcagaatcactttatcataacatataggtgaccatttactactatgtgtaaaacttacctgaccacacatatgtggacactcaacaagtgtccagtgattttactttgccattacatttcctagtccttgggaacgattacattgagttgacagtttatactttaagatttgaaaagaaaatatttctttcctattgcttattagtattgattaacacctaaggtatttactaaatttactacccataatcttagtgttatttccagctttatatagatggaaatagcatggattctgagaaagttctgcttgttttagacatgcctcttctgtgattcaacagtatggctatgcacaggttctgtaaaagtttaaggcgcagtgtccacattttccaattgagactatttcattagggcttttgtgaacattaaggaagttttaatagtttattgaatgaactggactgccaattgtaattgaggactaacagatttattaagacacaaaacatgcatgtagactatatatttatatattgggtcaatcatttataaattgcaaaaaaataaacaaattaaattcttggtgtatgtaggaaaataatgccaagttttggaattatatataggtactcacacataactaacacaaatctccaatattaggatatgaaatatgatatggatgtctccttacctacaaatattgggatgtttgagtgtgttgcatgcaatagagctgagagttgaaatttggtgagaatgtatgctttggtgctgaggttttcataatcttgagttaagtaacaatgacacctatgaacttaattaattcaaaaggatgaattttattcacatagaaagtttttcttagggaagatgtttgatagctaaaattagggcagaacatcagaggacccaggtcactaacttgaaatgtatgtaaggaggcttgtatgtaaggaggctacagtgacttttcctgacaatgatcatctcttcttggagcagaaaggtagccaagacctacttgagcatggatagtggagacaggaaagagctcaagagtgacaaagtagtgaggataagtgagtggaatagtggtaaaagattaggattatgcttaaatatcttctgtaagagttagaggtgagtgagttgagaaaccagagttaactggataggcctactcccatatcaagattaaactgtcatcattctgtctgttaaaataacatcattaagggtaacattgttccagatgacagaaaggcacaggtatggggtgaatgatttgggtgatcaataataaacatacaaaatggtatcaataatatatttgtttcttttctttatcattttagtctcaggtttatttttctaaaatttcttaactatatttaatattaaactctaagacatttagtgttagaagcaaaattgacaatttgcttattcacagcattaaaaaatattttcccttccagtcaatattctcttgctaaatcagagtgactgtaaaacaatctaagcagccgttgagaggggaaaattaaaaaaataatgaaattttcacaaactgatttctttggacacactgatatttatcacactccactgatttcttcagttctcttctggctgtaaaagcacgtgttgaatatggtgtacatagagtatgcacagttattttttctttcttagcagcagtaggaagaacatcttttcagcagctggctctttcacgaagcagttgattattggagtttggattgagttttctggtctaggtggttagcattcagatgggtttcttgagattacttagctattttactggcagcattttaaagttgcatgaccatttgctccacaggcttgttttaagcagtttctttgagaggcaaggttcttttaaacatcactaagacaaagcactcattataacgttctttagcatttctttccactggacattttaaaagcaaattgcagtagaaaaccagcatccgtgttatagaacttgacagaatatcacaccttcaaaggaaaatgaagtaactgatgaaaacacaaaattaatgctaaaattaaaaaatgaaaatgactcatgcattttagaatacacagactcccttgagatctagatcaaacttgattcttcctactatctaaatggactttctgttataattctttattttttatttcctcagttattctttctgccccagaaaaaacaaagagattatcttctgtttgtgaaaaacatctctataatttttccaataccaaatgggtaatgtccatttgcaccagccctgtaacttatctgtttcgtcattgttagtttgtgcagttatttaggtacatcattaaaaagaagtttttaccttgctgccaccttattactatcattttgccaatttagtcaggcagcaaaaaaaataaaatcttacttttgaataaggtgatggatggtcacatgtattgattttttttccagcttgaaaccccctaaaattgaaaataaaaatttataaacccacaaaatcaaagaggaaaaaaagagaaggcattagagaataggttattttagcgaatttttgaaaaatgtaaacagaaggaatagtggtaactggcagagcagagtcactaggcataggactccccctaacagaagaaatgaagaaaagcctttacattttgagagaaaattcttttcaatctagaatattctgtcagactatcaatcaagtgggaagaaagaacaaaatttttagcattcagaaactcagtgatttatgtcacatacacactttcttggaaactactggagaatgtgcaaaacagaagaaaattcagaagtgaggtcatagaatccagaaacagggaatccaacaggaaatgtggtcaagggcagcctcaggatgacagctgtgtaagatctggagagcaacagatctgaatgtgagccagagatacaggtccaagataggtttccagcataaaagaggaagtgctgattgatatttggaagatgtaaatggggcttagggggaaaatttggatagacattcagaacataatgttagtaaaaaatgcagtaattcattactttgggtaataaaaaaaacccaaaggcatggaaatgtaatcttcatacactattcagctatgtaatgaacactgtatgtctgatcataaaaatgtaaaccttgattattaatgttacaagtattataaaacagtatttttggtaacttagggtaaggtaaaatggagcagatatataaaaaacacctaagtccttattcaccgtaacaggaggccaataggtggtatccagtatcaataaaccaagagatagcagaataagcataccattttaaaatgtagagtaaaatcccagaaaaaaacaatcaaagtatttttaaagagatgtcccagtgagcagaacatagggtaggactaagtggatgaagaaactgctaatttttataaaaagatttcagagataggtagagagaaagagaaattaaatatattttatttcattataaaactatatgtatttgtaaattaaatatgccatttaattttgtccataatttactccaataaagatgttttaaaagtgaagttcaaagaatgagaaagaccaaagaaaaccttaatatttagatttacaaagatattttcctgaagatatgtagaccctataccattgaagctgtaaaggatacatgataggtattcagggttgatattcttccaagaatattgactgtggaaagaaaaagaaagcaggattttaaaaatctggtccatgaatatatattctacaaggaaggttgctcttaccagtaaccaaagccattctgttttgatggtcattggcttcccagggaacaagtcctaaagaagactgataagatttctctatttttttatggtgctgggatgctttgggagtttctgtacatcatgataatttaggttgtgctcgtctaagaattacagagtggcatattttctcctactacagaccgttgttgaaaatctgctcatcctccaactcttgacagtgaatattcattgcctacataagatgaaaaactaaactaaaaaactgataatttactttttaagaatcctgcctctatgccctattttcattataccttggttattgttttggtttaggattttggttattgtttaaaagaacataatttataagagtctctaagaaactataaaagtctctgtcatttaccaatgtaaggtatctgagttggaaaagaaatgaacttcaatcttggaatttaaactttaagcttttacattaatgcttctgttcctaataccctatacaaatctgtataaactgtgtttggcttactttaaaaagttaaaaattgtaaaaagaacttcacatattcttgggttagtcaattctaccagatttttcttcccctccaaattaatcattgctgggctactatagagaacagggttgaacttaccagagtgaaggctccttctggaatgtcaaacaggtattcacttctgaggcccctcttacatttggaccaacatgaatcactgtttcagttagatttttagtgttgataagtatccatgtaattttgaagtctagtccataatacataaacaacatttctatttaccactatacactagatcaaaactatgaatgaactgctaaataatcaaaatgacttataaaccactcatatgatagaaatgtaaattttactgatgatacttctttaaagactctattttaatgctaaactttctctatatcttagtctaccaaaacatagaactgaagccttttagtgtttatggttaaatacctggaaaaataatgtcaaaagtttatgctccagctcatcttctcctgcagattgatgattgtttgtgttatatccacttttgtgtgtgtgttatatccactagagactttgaaattagaagactcaactcaattgtgtaagcttgttaaatcacatccttaaatgtgatccttaagtgtgaaaatgtgcccattttcagactagtgcttgtcttgatgtgagttgttgtagggacacaggaaagggtagagaattcaagacttactaagaaattgtcctatttaatcactatattaaatatgttttatgaagaaattttgatcttccaagaagaagtcatcaggatctcttggccagaccacatatggtaaatatatctgtctggtactgtgaattgattgacattgaatacactgtagtggaggatggtacttgacagttgttcagtgtaaccttgtcatggtagggacacagtagagtaggataagaccaagtgacagtgtgagccattctaggtgagcagctttctgacagtgttacataccatattgttttttccacagggcagtttaattccatctgaaacacctgctgaaactcagtgcatctcaatatagatggaactgtgcttacctcagttaaatgagaaaaacttcacttaagaatcaggtgtctctcttgcacccagtagctctctagcaaggatctagaccattaagaattccttaaagacaacctagggcaattttttgttgttgtttagtacattattttatgtttaagatcagaaattcgtcttgccaagttacttgctttgtttgcctcatgtaggggcagatatgaacttacaagagaagcccaactaggtggagaattctgtcatgcatatgcagtgagactatggtggtctcttgggaaatgctcagcacttgatctttacttttaaaaatcaaaaattcaaatggatgatggcattcccaaatgaattgcttatcgggggaacccgcccgcaatatttcaacgtatattctttccattttccctaagtgttggctgatctgagaaatgaagagaaagagtacaaagagaggaattttacagctgggactccaggggtgacatcacatatcagtaggaccatgatgcccaactgagccacaaaaccagcaagttttattaaggatttcaaagggggatggtatgtacgaagagggattaggtcacaaagatcacatgcttcaaagggcaaaaaaggagaacaaagatcacatgcttctgaggaaacagggcaaggacaaaagcaaagatcacaaggcaaagggcaaaattagaattactcatgagggtctatgttcagctgtgcacatattgtcttaataaacttcttaaacaacagaaaacagcgttcgagagcagagaactggtctgacttcaaatttaccaggacgggattttttccccaccctaataagcccgagggtactgcaggagaccagggcgtatttcagtccttatctcaaccacataagacagacactcctagagcagctgtttatagacctcccccaacgaatgcattcctttcccagggtcttaattattaatattccttgctaggaaaagaattcagtgatatcttccctacttgcacctctgtttataggctctctgcaagaagaaaaatatggctgtattgtggccaaccccacaggcagtcagaccttatggttgtcttcccttgttccctaaaattgctgttattctgttcattttcaaggtgcactgatttcatattgttcaaacacacatgttttacaatcaatttgtacaatagtggtcctgaggtgacaaatatcctcagattacgaagataacaggattaagagattaaagtaagacaggcgtaagaaattatgagtattatttgggaactgataaatgtccatgaaatcttcacagtttatgttcagagattgagatgaagacaggtataaggaattataaaagtattaattttgggaactgatatatgtccatattaaaatgaaatatttgcaatttatgttcctctgccgcggctccagctgcttcctccgtttggggtccctgacttcctgcagcagttgctatttggagcatagcttctaagaccaatttttgttcattttttgtctacattctaggaactcatgagagccatgtctttattagttttcttgaaagaaaccagaaacaaagaaacagagaaaagagagagaatggaaaaaggaaggaaggatgggagaaaggaaggaaggaagggagagaggaaggaaatgatttttctggtcattaattttatatctcttagattcctccttcctttctagagttaggagtattatttattatcctatatgttgaaggtgttgaaattaattgtaccaaaatttgtaatgccttgttaatatataattttccaaaggtaaaagtattagtcatgtgcaaatataaattgagcatatgccaatgtttctatttaaatcattaataatgagggaatcagtaagaagttatgactggttgaaagagcatttagaaagttagatatacataggcaatgtttcaataaaatggctgtgttagaagcaaatctagttgatgtctaatgagattatgaatttacgagggtgcctattctgccaaataaaaattattttttttcacaccagacaaaaatctgcaagttaactaaacagccttgctaaaccttggccctttaatcaacatcaaagagtaagatgaactaaataccttattctagataccttttggttggctttgcctttatgtgacagaaacaacatgccacctacctttctgccttatttgcaaatctcaagaaaaactttctgacaccttctgggtactgtgtattgcggttctgggcctactagcctgtgatctattccttgctttatccctgccctgcagtgctctgtataatcatagctaaatttcccaggttcctgtcagctgacttgtgcttggatctggccagtggcatataaagtcaggataggtgaggaggaaggtaaaagccagggcattcctctccctctctgtctgccttgaggaagcctctcttacattagttgtgtctcttctgtggttcaagattgccgtgggcagtccccactggtgtttctctcttctgcaggaactcccaaagccactggggtctggtgatcctgcctccctcttttgaccctccaaaagcttcctgcagttgcttatttgggttatcctcactattccctggttgttttctcatctcccatcatccaagtaatcaattgcaagaattaaacttagttttaaatgttcagagttttgttttcctagttagaccttaacttatttagtagtatttcattttttattcttattgttaagccttgctaagcaactcagaagtttataccagtgatgatgcgttctcaaaactacttctgtcaatgtcaatataatgcttcaaagatatcataaagaaagaattatttacaatgattctgagagattatggctacaaaagctacatttctacagaagcaagggaaattctgtaaaaccaaatatgagttttttgtcattcaactttagttttttcttgaaacttaggtattcatacatacatgaaagaaggcagagagggaaagagagagagagaatcaatcaaattggagtctaaaataatttttataatacatataacaaccttcacaataaaagttgtcttctcaatcaattcttttggactcgatttgattgctttttatgccacaaattgtatctccaaaaaattggcctttcaagagacgcttcttgaaatgactcaatttttctatcactgagtatcaagagtaacagaaggacttctatgctctccaatagtatctgccatggaaatatttctgtttttagatatttttgtgttgtgtgatctattgtaattggaaaaatatcatgttgacttttctttctgtggtttttttccgtatgcatgtttgtgtaaaaatctatttttaaaagattttcttctctgctagtgcatttttgaagtgtgtcggtacatggtactgcattaattaagaataaatatcccaagccatttgatatatttgtgtcaccccaaaattcataggttcaaattctaacccttccaaggtgacggtaggaggttgggcctttgggaggtgattagatcatgggggcagagctctcctgaatgggattagtgtcttcataaaagacaccccagagggctggtttgctccttctaccatgtgaggttacagtgagaagacagccatctatgaactgggaagaaggccctcaccagacattgaatctgccaacacctcggtcagggatttcccagcctccaggactgcgagaaagaaatttctcttgtttataagccacccagtacatggtattttgtttggtctaatataccacttttaaccattcctttgttatttttggtggaactggtgctgagattgctttgctcagccaatatagtaatagattttactggttttcaccaccttagtgcttcaggagcacccaaatctcagagttctttgcccaaccaaccttttatctcctcactttcattctttctaagccacaatttaatttgatttttgtaaaagtactcaacacacttttttctttcctctgattttgcaaaaagaaaaaagaaaagataaattcagccatcatagtttgtttcatcatatttctctttctcttttcacttaatgtgtattttcttctttatgtctacctcaaacctgaaatatgtgcctgttttcagttagttcagtagataagcatgatatatgtgacaaaagatatatatatatatattttttatgttaaatctatttttttttatccttggcttagccatatgcctaaaagagcctagaactgtatctcaacatcactatcaactttggatgcttcataccttttcaaaaccttttaaattcaagatgaattttgacatctttttatttttcaggcttttaaatttgtcatggtcagtgattcaaaaactaccaagtaaaggatctgacttctaagttaagtcactttccttgtgacttggacattttacttaaatagggaactacatcattaaaattctttttttaattatcaaaagatatcagtcaattccccagaagtgaataatcacaatgttttagctcttttagtccttccttcttttggaggaagatttatatttccaaataaaatgctgtattctttcttgatttatcaatttcagactttatggacatccacaatgataatagaggaaataactcttgtacattaacttcatcaacttccttactctaatgttctcaaaagagatattgtgccttattttgttttaaaattactagtgtttatagtaatatgactttgtatatattattcaactgtcaatcagatagtaaactatgactgtttcctatctcatacaacttctttcttcctcctagattcataattattgtattttttcatacatatatttcacaattttgtaaatgcttgatctgtcaaaacgaatttccaaacattctatcagttccattggtcattagttccattttttcccttacaggtttctctcacacttcctttcctctgtactcatacttcaatctggactagttagtttccaggatggacacatacctcttattgtaagacttcccttcccaacttacctgtcttagattttctgttatgttcttgtactggtcaaatgcatctcctcagtggcttcttgaaaaagagtgcatgaaaattcaaatttttgaagttgttgaatatttgaaaatgcctttattctttcctcaaactagattgagagtttggctgagtatagaattctaggtcagacctaagaccatctgcataacatgcaggacccagtgaaaaaatgaaaatatgcagtttcttgctcaaaattatcaagaatttcaagatagcgacagcagagcactaaggaaagtgcagggccctcccaagtgcaaggccctgagtgactgcacaggtacatgcccatgaagctggccttgggaggtcctttcagcatggagattctaagttctgggaaagtgactatttctttgataattttgtctaattctcttctgtattccttatgtgtagaaccccaattagctggatattagatctcccaaaccggctctctaatgtttttctttattattctagtatccatcttgctgtctttttgcccacttcctgggatagaaattggacttttcctctaccccttctgttgacattttcatgtaaattattagtgttaatttccaaaagccctttcatcaccatttattccatttaaaaagtagcatgtttttgcatcatgtatcaatctcttttctcaaagttttttgtttgtttcttaatagttcttttcagtctctgtttcagtttattaagtcatattaatgtttcagtggtgagcaccaataaagaaattttttaatctaccaggagttaatgcaaaccataaatacccttttgtctatttctttttgaacaatataaaaattataccacagttaaatgatgtaatatgactcagttatttcagatggttaacactgaccagaaacacttgattggttccttgtttagactcgatatgatcttactgttttcttatcttcaaggagaaacaaattgatcttgaaagcatttctaactctttgaatgtttacatctctgtacttacgaggaactcttcaacaaactggaaattacataatgtccatttttgtagaaaaagttaatacctcttgaagtaaagaaatagtttacctaaattgtgacttttggggaagagagaatatattcctttgtacttaaaagagtttttttcagtcacatattctctgcttcaataggattattttgctcctttaaatgtagactgtaaacacatttttaagagtaatactgtttgccatactatttttgttgtatatgtttaaggtagaccaacatgatgttttatatacatatacagtgaaatgattagtacactcaagcaaattaacatatccatcatttcacataggtagcttttttttttttttttggtggtaaaggtacctaaaagtctactctcttagcaaatttccagtgtacaatgcaatattattaagtgtagtcctcatgctgtgcattatgccattgatcccgtttgttttcattgtgttcaattatagaaattgtttggggaattatttatcctataaaataaaggtatcatggagctttacagttatatttgcctgtatgaaaaaaatactggaaaagtctttacgtccataaaccctgcattttagattaaggttagggtttaatttcctgagcatcgacctgcagaatagataagacttcattatttaacagattttattatcaactttttattgttttagagtcaagcaggacttactgaaaatgacacagtagcttcttgttctgatagtttctatttatgcgatttcatgcgcttctgcttatggccagattttaatgttaatattaatatatattataggtatataatttcttttaactttagctcttctgattcttagtatggatttcttacaaccatatccttttcacttttgtatttcaatcagatcacaagtgggaacgttgatagttatataataattataaattattttaataaattttatttattgaattattacgttttattcatgctctgtcacatgagggatatcctgggtattttgtatcctaaaatttaaaaagacatgcatagacacacaggatttttccatatgagaacattgttacttatgtaggtggtcattctgcaagattgggttatgtaacggtagcttagaaggtattcagagtacttggttataaaaactgcatcatttgacattgagtaacttttcatttggaatgtagcagttctgtatttgaattaaaatactcaataattttctacaactcagtactctttgttcaaaagaagaaattatgtgtcttctgcaattgcttgatttaaccacagagccaatcaattgctttcaaagatggtattgctatttttgtttctgtcttcttttatgtgtcctgatcgttagaaggtaaggaagtccctttaaaaactaagcagatcaaagtgtgctcagcacatattttcaggctgatttttaaagtcttaggaattatcaaagatttgtgtcattctctttgggaaaagatcattaatgatgctttagatttttttcatgtctttgataatataacttagaattctaaatattttaataaaatagatgaaaaatgaaggtatataccaatagcctctatttagcccatagcctttttctttctcaaattactgattacatattttagcttgcaatttgcaatttgataagtgcagacacaggtatacacttgtgaaaccatcaccatataacaagaaaattaacattatccattactctcaaaagtttccttgaacctcttcttccctgattcttgctttcttcattcttaaacaactagtatctactttctgtcactattaggatcatttgcattttctcaaattttatataaatagaactcctcctcctcaatgattgcatctagttttgttataaaaataatttggtcacctagaatgagttcagaagtatttacagttgatcaattttctggaaaagtatgtataaaatattattacatccttaatttttttattttttatttttatttatttattttttttgagacagatttttcactcttgttgcccaggctggagtgcaatcgtggcgatcttggctcaccacaacctcctcctcctgggttcaagtgattcttctgcctcagcctcctgagtagctgggattacaggcatgcaccaccacacccagctaattttgtatttttagtagagacggagtttctccatgttggccaggctggtctcaaactcccaacctcaggtgatccacccgcttcggcctcccaaaatttaccagagaagtcttctaggccaggagttttcttatgcaaagggtttttagctacaaatttcatttatttgtttcttcttgatatttgttagtttgtgtcttttaagaaaataattcattttatctaagttattgaatttattggcataatgttgtttatattattttatttgtataataacaatcaacatttttgtctactaatttatcttctttgtcatatctgggttaattttaactcatttatttttatcctcatcatgggtgaatttttctgcttgtttgcatgcctgaaaattttttatttgctgagagaccagttggggaactatcatatcaaaaagttgaaattatatgaaagtcagagaaatgtgaacgttgtcaatgagaaacaaataaaatgtggcttagtttctatgtagggagtgatcacaatgaacaggcatcttcaaaggacttacgagataggtagcatctcagatacgcctggtaaccaaacataatttaagacagtaacaaatggtaggaacatgggagaaagagagttcagcaagagagaagcactgggatctaagatgatgtgagggtttttgaggaagagtgactacaccagtttgcttagaaattagggtgtgcataaaagaagcaacgggaaatacctgcagtttgacatttgaccacattgtttgcatgtcatacacccctcagagattgcaaataccttgaagaaggtattgttgtgcacacacacaggtacccatgcattatatatgtatatatgtatatataagtgtggttttgtgtgtatccttgtatatataaactaatgtatacatatgtattcttatatatgtactaatatctatatatagatatttattcttttacacagccctaggtgcagtaatagatacccaataatcatttatctaactgaactgggttttttaacacctttttagcaaagttgtctatactgcttgatacaacagctgttaacttggtttgctaccaaacacagtagccgtcctcatccacaattttctgggtcagaaactgctcagattagaacatcaagaacatgccctcaccctaagctttgggaaccagaacaacttatctatgccagaaattaagaacattgttttctactcagcttgtccaccctgattgatgaaagaagcaaaatcattattaaaaagaatttttgctaaattaagggaacttgtttattttatgcacatgactttgtgcataaaatattttattttcagctctgagaatttgtctattggatggcttaagaattaggtaaataggatgtgattatcttaaaaataaaaaaaattgtacagatatatacaataaagccttaacactttggaacccaccagtacagaacatacaatcatttgaaaattattcatgaagatgtttgaccttgtattatctaggaagaaagtaaaataatagccgaaataagattgttgaggattgttgtatatataatttgattacaaaagcatatttgcaattaggatagtgatgatataaatgattacaattaggatagtaataataatataaattattccattaagctcgtgttctagttgtaaataatatttttacaatataaaggttttcctttttatgtaaatagaaatgtgcactcattaatgaaaatttagtgcaagaagcaaaggagaaaaaacgagtcctagtaaccccccaatatacatttctatccagtcttttggggttggcatagtgaatataggcgtgtgtgtgtgtgtgtgtgtgtgtgtgtgcatgtgtgcatgaggggatatggttttactgagttataactatatgcgattacattttctaattgggtggtaaaaccttactgaagtgtttttccccagtggaagttttatgtccaattataggtttatatacctaattatgaattatcaagacataattcataatattttgtttttaaaccacattgagatctctgtgtgaaagggcatgttcattgtgcaagcattagagcctcttgattttcacaagtcttatcagttatagttgcagatgggatgaatcccctaggaacaaccacaggctgttgtgagttaggaaatgcacttgtccatggtctcctagggtactcatcatctcatttgataatgaagatttctccattcttgacaaccttattttgcttcattctctattcatttatcagtgtgttttgggttcatttgcctataaaagaaaccacaaaataattgtggcttaaatgcaatttttgttgttcttgcatcagaaacaagtccagagatgggcgatttcattcaggtggacccatagcatgatatccaggccacttccattttttcttttctaccatgcttagtgtgtggctttcttttgccaggtcatttatgatcccagatggctgctggcctttagagagttccgctgcattccagacagcaagagaactccttccggtacagttagctctctccaaagaactgttctgaaagtttcaccaacaacctccatgcacatcatctgtggcaagaatttactcatgtgaccatacctagcttcaagagagcttagaaaatgtagtgtttttagtgggaaaatcgctaacaaataaaagtagaatgcagtttttcagggaaaaggaaggcaaccctttgaagtactattgtttttaagccaccttatattaccaagctgaactcaagtaattttcacaagaaagacatatgatagtatatttctaagccattgcaggactatggaaaaacaaaaactctatcttctactttcataaataaaggacagtttgactaagaataatgttcttgggtcataaccattacaaaaatctcaaaaccctctgtatcttgatccattataaccacatttggtgtttcagacaagcctcaaagccaggcttaatttttcctttctaagtaacctgttttggttgcctttttgttgtgctttgttttgcttattctgtattaataagacttatttattggtatatacaatttatttttcaatgttattgcctgctgatattttatcatacaaaagtaaatggcataaaaaaagtaattgtttacagcttcctgagtaagacgttttcatttaggtgtgtcttttttttcccatagagaaatgaactattgcttatgggtggagaaatgtcaaatacctttgctgaaattcttaacttgcctttgtatcttcacccttggcattgaaaattatccaaaataaattgctaggaaatctgctaaattatctctaagggagtgcctaaaagtagccgcaatctactctcttttgcaatacctctgaatagaatggaattaaattctgtctgatgacttaggaaaatagacaagtagtcttcatattgcttatctgtagtatggagagagtaaggaatatgttccttttgtacttggtaaagagcagtatcttcagaaacacgcagcttacaatttaatgcatagaagttgccaaagctgttacaaacttgttaaggtaatttgtatcaccttactttattagttacctattgctatataacaattatctcaaggcttggggcttaatacactaagattaattatctcgtggtttctgtaactcaggcatctagctgagtcctatactttaaaattcctcagagcattgggacacatcatcctaaggactcaaacatgagaaaatattttcaaatttgcctcaggtgaaaaatgagtgcagtaaatacactaaggacacatacgtatattttttcttgtctcaattaacttttaaaataatgtttgcctttcgtctgtctttattgctttatacagtgaataatagcgaatctagcagtcagaaaagcactctttgtttttttgtttattttatgaagtcttcttttaattttatttcttaattttttatttatttagtagtttttttggggggtacaggtggtttctggttacgtggataagttctttagtggtgatttctgggatttttgtgcacccatcacccgagcagtgtacactgtacccaatatatagtgttttatcccacaccccctcccactcttcctctgtgagtccccaaagtccattatattattcagatgcctttgcattctcacagtttagctcccacttataagtgagaacatactatatttggctttccattcctgagtcacctaacttagaataatggcctccagccccatccaagttgctgcaaaagacactattttattcctttttatggctgagtagtattccatggtgtatatatatacatatatatatatatgtatatatataccacattttctttatccactcattggtcaatgggcacttaggttggttccatatttttgcaactgtgaattaagaagagtgtcctttgaatattctcctagtgccaacattaaaaaaacagaaaaaccatagaataaattataggaatatacttttctgaaaatgtctatattgtcttgaattttcaggaagactatctctgaaatattatacttaaactagctacccatactcctaatattattgcgagctgaatataatacctaataattccttacataataaagactggtcttaattatatcaaaaaaaaatctgaaaataatgctatttgttgacctagaaatagctatgttaaaaatcttaactgagtgtatttaatactgtactattttccatatagttacaataaattccttgctctttctctctttggctacttttttgaaatagactaagatgcttggtgaagcagctggaaagaggtgatgttaacgtcgtcgacttaaagaagaatattgaatatgcggcatctgtgctggaagcagtttatatcgatgaaacaaggtaagttttaaccttcttctcttttatcttctttgattctctcccgtttttcttcctctttcttgaccctcctttatctcaaacaggaatttagcatatcttcctgtgaaaccaaaatcaaatcttattaaaatttgaaatgttcttcttcatgtagctaattaactggactatgattctctaaaattaatacacattttaatccaaatgtttgaatgtcataagatagtcaaacactaaagtgaaaaaaaaatctcctcttcccccatcctcagtctccttgggctcagacttttaaatgtcagagttacgtgtaggcttatactggttttcactgatgtaaggattttccctattatctcaaatgtcagagtccctttaggaaaatgggtgttatatgcccacacattctcatgagatgtgtctaacaggccctctatgcagggattgctaaggggcatcccaaatgtgtgtttttgatcatccaaacctagcctcataattagcagttgtaaggagattaggaaagggggacttatttgaagagggttgccagcttagtgctgtgaccctcaaagaggctgttcaccccctggaggatatttggcaaatccaggagatgtgaccagtgtctcttggtgttcaaagatatctggttcctaattctcttctcaaaaaggataaaagtgacaggctaatcagggctacctgtgaattcagagctaagagggaacctgtggggagagaggcatgcatttccagcatttgacatggaaaaggtgctaatttttttcacagccataaagcaggtagaatagaggtctcttaaagcaccaaagactacttaagtcaaatagtgaaaaagaggctgcatagagtaagtgatggtataagagccagggtaggaattataaaaattcagctaaaatagtagaaaatatatatattcaaagtactctcttggtgttagcaagttgtctctgaaggacccacaaatggtccccaggagaaaaaaaataggcagcatttgggcatttgtcacatagatgacagcaaaaccaccagtctagccagaccctttggtcctataatttcctgcctctcgcaccgcattgctaaacaaccagaagcagcagtgagtgggaatatggaggtgaggacacccactaggccccttccactcagcaggagtccatgcctgtcccaggcctaagcttggggaagatgagcaatgttaaactggatgggcaactaaataacattggtttttatttacctatgtgtactggacttcacaggcacgcagatacacacacacacacacacacacacacacacacacacattgtttaataagtaaaaaattcacatgatgaaattcttgcctctaccctggtcacagtctactctgtttctcataaatttcttatacatctttccagtgatttattacatatttttattttgtatttttgcctcatcctttcatggaaggtagtatactacgtaaacagtctctcattcttcttttttcactgaaaaaggaaacttaaaagtttccttttattttattctgattttttaaatatttgacaatgagaatttttactaatagctggcagaagaggccatattgagagctttgttgcacaagcgattctttctttgtctgcagagtgaaactcctctactaaagcatagcttggagaaattatttgaggaaaaggaaacaggctgggcacagtggctaacacctataatcctagcattttgggaggctgaagtgggcggatcacttttgagcccaggagttcacaaccagcctgtgcaacatagcaaaacctcatctctacaagaaaacacaaaaattagccaggcattgtggcgtgtgtctgtagtcccagctatttgggaggctgaggtgggaggatcacttgagccagggaggccgaggttgcagtgagctgagattgtgccactgcactccaatctgggtgacagagtgagatcatgtcaatagataaatgaataaaagaaggaaagaagaaataaaaaaagaagaaagaaagagagaaagaaaaagaaagaaagaaggaaagagaaaaaaagaaaaaggaaagaaagggaaagaaagaagagaaagaaagaaaggaaaagagaaagaaagaaaggagaaagaaagaaattattttcttggtgaatgttcactgaatgtgtatgaatgtacatgattcttctaagtaaacagaatccaaagtgcaaattttaaaaatatctgatgtttttcccttgctccctcatttttatgtgtgctcttattgttcacaagatgattcaacttaacaggtttaagatttattcaatctgtccttgaacagatattttcttttctatttatctataaaactttagaaccaaagaacgatttgaagatttcgttattcatcttctaatggcataatgctaactacctggtttgcctaagtgtcctgtctgtcatttaatagattattatatgctttatttatttattcatttttctggtgcatttcctttccctgagaagtatgactccatggatatttgctaacttagttccctatgatccctaactcatttaaatgtatattatacctaaagtatagccctttttcatttgaaaattgctcttttgcggggaaaagaggttgagcacaacgctgccctgcttcgtggtagaaattcatttatttttttccttcacataacaaaacattccatcttttaacaccacattattcctaatatttactccaaatttttattattttattataatgcttccatggcatcatgagttttaaattggattaataataataccccacatttgtatcatcttcaaagggctcttagtttcattatctcacattagtgtcaccacaatcctatgtgattggcaggatgattattactttctgcattttactaatgagataattaaagctcttagaagggaaacggtttgacacaggtcatggatggaagtgttggcaaaactgggactaaaacctaacccatgacttcttatttagtactccttcctctatacctgactcttctcagagtattcctataaaacagaatggtttttagtgacctctgaaagatttagatgacaacatataaaacattttgatagctggaattgtaaatcctgtagctaacacgtattaagggcccactatatgctaaaaaatcttctaagcattttatatataccattttatttaaacatcataaaagtcctatgaaatagaaactctattattaccagattgtatatgagaaaacttaaatcacagaaaagttacatagcttaccaaagggaagacagggagttgaagagttggattagggccttggcagtctgaccctagggcttgggctatgaagtgcaattctcatcctcatcccttttctaacatttgatgaaaaggtgacttcagagacactgaagtttgatgaaagtgcacaggttgtcaggatcatcagccccagtggtgtactgattgtgtggcatctctttccaattctgccttcagtagtttcatgtggctagcttgaaaatggctaccgtgggagtatccacacccatgaaaaataacatgctacaaatcagaatttatttttttctggagagtctgttgttaaacatttaccatcataccacaggtcagacctaagattacctcttacaaatctcctaagagctgcgatttcatgatcaaaatatcagcttaagattttttagaacaataataatttatgtggttgattttctatatacttagtaagatacacagcagtaaactgaggatgtttctgttgagatgtccatacaattattaaagtaccatttcccttaaaactatcagtaaaacagagattatgtaaaaggagtcaggtccaagaagcatttagttgcttttaaactttaaaaaccttttgacttctgaaatgttttttgatagaaaattcgatgccgtgagtattccagagaggtattgtttgaatgttgagctggactgaaagaaaaaagtcagcacaaaataaagcaatgtaaaacacaaattattaattggtttaaaacacacacacatacagagccttaatgattgcagaatttcagttaagaaagcaatcaaaacaaaaatctccctttaaagatgattttggtgagaaaaataaaaagtttctgaattctgactcttagtggagataatagcacaataccctaatgaatatgactgctggattttttaaaagacattttcaaatgcaaatgccaatcctttatgagtcttgtgttcagaactgtctctagaggctattgtttttcaaacttacaaagttttaatccagaaacatgtagcctaaaaaaatatgttcgattgtccttatttggattgggatattgccaagcaaagtagcatttttggcctcatgcatagcagggcaggcagctgcctgagagatatactttcaagatcggtattgtgcttactaatacctcctaaaaacacaatttataactttctttgtttaacatgaaccaatctgtctcataatttcgatgattagcgcttagactctggattcagaaagagtaggttgttcaaagtctggattctctacttaatactctttctttaaggaagttactttacatccctggctttatcatctacaaaataagagtaaggacaatgttcacttcgtaaagttgatatgagaattaaatgtgtaacaatgcctaagagtaaaatttaaataataacaagatatttctattttaaataaaattcttatttattacgtatgagtaaaatgcaaataactctgggatacataacacatgaagctatatgatttacatattctaataaaggtaacaaatgcttccctgagagcagtttttaatcctgagaaaatgaaaacgggtactggtcaccaaggaatgaaagcataaaattatggaaaagagtgcctttcccttaatacagagtcacattatctctgtaaaaacatcagttgacttttgcgtcttgctaaatctagggatccttaatttggggttagatactgcattgatgtcaatcagtactttgagaagttagtctggtagaaagaaattgagcgtcatttagggtacattagaggctaagatccttgaaattactgagtagagggactttccaaggaatcttcactcatttaacaaatacctgttgagtacctgaaatgaataccagacacactggtaatcagaatcaggagcaaaattgtgcaggcagctggtggctagaactgggtctagaattgtgaagacaaacctaggcacaagaacaaatgctcaaacaagaaacagagagatttagagagagacccaagcaacagtgacagattacaaggaggaaacaccaagtatcaacagtaactgataaccagagggagtaacatggggtaagaatggggtaagaatttatacagagtcagacttccaaaccagatatgtctagacttctagacttgcaggcatttttgagtattaatgagtttgttctctggcaaagctctccctgcctattcttaaagacatggcttctaacaagaggactaaaggtaaaatatgtctggaatatgctagatatatgtgcatggaagctcagaaatatagtgccatttagagatatgaattataactcaagggtctcagaatttttaaatacctttactttgatgctaacgttcaatagttggagctcctttactgtttgaatatgttctccatcctaaagttcttgagaatggtcagtgaatgtttacttatttcaccagtctgtcctggctgtcactttcctttgcagccagctctctggcttcagactgatgaattgttcctttgcatttttttcttcttacctatttttttcctcaagtccagctgtgtatagccaggatcccaagcatgagttcaatcccttcctcctgttctccaaactgaagctaaaatcagctataattgcaataaggcattagtgatagatgcttacttttttcttttttctttttttcttttcttttttttttcgagatggagtctcatactgtcgcctaggctggagtgcagtggcacaatctcggctcactgcaagctccacctcccgggttcatgccattctcctgcctcagcctcccgcgtagctgggactacaggtgcctgccaccacacccagctaatttttttgtctttttactagagatggggtttcaccgtgttagccagggtggtctcgatctcctgacctcgtgatctgcccgcctcggccccccaaagtgctgggattacaggcgtgagccaccgcgcccagctgatagatgctttcaaaaatctacaacttaagccctttcatagaggtcccttatcaagcatcttggtgcatcctctaatgcctgatgcccatgtcacagagaccttccactacagaagtccttttgacatgtcttgctgtcctgagttcaggacctcaagttctgtgactaaaataaagataggggccaatcaaaattaatgtcattcatctctaaggatcaacccctatgttaaaagactgtgcagtctaaattcacatttagaaaaaacatgacagttttctaaaggacacagaacctgagagtgatgcagctgtgctcatggtgaagacaagcttgagcattactttctggagatgtttagcctcttggaatcccattgtctcagtcttctaaatgccaaaggagagcccttactttttttagtgtaactaaaagacctattcaaagtattttttataaaacaaaagaattagtctgcactgaaggtaaaataaagcctatctatgtagactaaaccaattttttgacttttcaaatgtcaaagttttttcactttcaactattaaggtttaaaaaacgcttggaattccatatcaaaatgggctaccatgttatcccactaatttaaatcaagggaggggataaaattggaggtgtggaacaggagggtagttaaagacaggcaggtagttaaggaaaacttgagtatttaaggcaaggcatggagctaccaaagaggagactagaaagaatagacaccaaagcaacaggcatatatgacaaatatgaattgcccaattaacagaaagcagggttactgaaaagggtaaatcaaatgccacagggtgaaccactggatgagttgggagattcctaatgccctgaagtagagtttcagcaaagagaaaaagctaccagccagaagatgatactatgaggaattaatgtggaatggcttcgtgaagaaattagtatagactatttttccagaatttgctcgagtacaaaaaacagagatagaccaatctactgatttggacatatacttgaggaatcctttttgtatgtttttgttcacattgtttttaggatgaaaggttggtatctgtagcccagaaacgaaaagtttaaaaaacgtatttagcatgacaagaaaaaaaaatgcttcctagaaagattaggtcaagaagtcatccttttatggctgcatagtattccatggtgtatatgtgccacattttcttaatccagtctatcattgctggacatttgggttggttccaagtctttgctattgtgaataatgccacaataaacatacgtgtgcatgtgtctttatagcagcatgatttatagtcctttggatatatacccagtaatgggatggctgggtcaaatggtatttctagttctagatccctgaggaatcgccacactgacttatactatgcagccataaaaaatgatgagttcatgtcctttgtagggacatggatgaaattggaaaccatcattctcagtaaactatcgcaagaacaaaaaaccaaacaccgcatattctcactcataggtgggaattgaacaatgagatcacatggacacaggaaggggaatatcacactctggggactgtggtggggttgggggaggggggagggatagcatggggagatatacctaatgctagatgacgagttagtgggtgcagcgcaccagcatggcacatgtatacatatgtaactaacctgcacaatgtgcacatgtaccctaaaacttaaagtataataaaaaaaaaagaaagaaaaataaaagaaaaataaacaagaaaaaaaaaaaaaaaaaaaagaagtcatccttgggaagttatctaggaagagagaaatagccaaacattggttgaaaatgttgatgtggccaggtgcggtggctcacgcatgtaatcccagcactttgggaggccgaggcgggtggatcattaggtcagcagatcacaaggtcaggagttcaagaccagcctggccaatatggtgaaactccctctctactaaaaatacaaaaattagctaggtgcgctagtgcacacctgtagtcccagctacttgggagggtgaggcaggagaatcgcttgaactcaggaggcagaggttgcagtgagctgagaccatgccactgcactccagcctgggtgacagagcaagactctgtctcaaaaaaaaaaaaaaaagaaaagaaagaaagaaaagaaaaagtgtagatgaacttggagttaactagtgcacagccaagggtcttcaagtaagcaaaacatgagtagcattgtaaaatccgaaagactcactggtatttcattttaaactcagctgcttagcatgggtaaatgcgctgcaagagttatggctaacgtatgaataatgagctgctaaacttggggaatgatgtggagggcaaactctttatgtttaatcactacaacctgcacatcatgatggcactcactcatgtgtgctcctttggcatttagagtcagaataagagagaggaaaaagagaaatagattgggctaatgaacggcttttattaatatttcaattgtaagtgataggaaacccaaccaagccagtttaaacaaacaaatgattaacttattggctttcatggccaaaatattgatggctagtggtgactataaacacaggttgatctagggcacaaatgatgtctgtcagcaggtccacctctgttttgcttgctctggaatggctcttttgatgttttatctggtagcaagatggtgacagtatttccaagcttcacatcctcacaccatcaaatccaacaggaatgagaaaagttttctttcccataggatccgataagcatatccttatgtttcattggctctagttaggtaacatatttatccctcaaccagtcattgtgtccaggggagttgaatatacaaggtcagtcgtcaagcatcccatgagaaagataggtggtcaactctatttaagtcatacgcttaagaactgagaatggaggaaagtgctttctcaaaccacaactgtgttgtctctgcagtgaaaactaaaatgtttctgttagtgtcacaagcaggggacctggatcggggtttgtgtgggatgtggtggaaagcccttgattggcagttcagcaactcctttcttggctttgctcctactaatgattagtctctaatcattgtttttttcacgtggaagataaagtctccagtccctttttgttctggaattgtgtgattttatccatggttccaaagtccccctgtaaagacttgctcatgactcaattactctgactaccaggagggtgacaggaggaaactgcttatcatttgcttagcatttataagtatgggctcttgtattcttcaaattatttccatttggaaaagtccctgaggaaatcagtttgaggaaaatgtgctaagacgttgctggaactcagtgaatcattaaaaatcaagtaatgatttttctgaattccatttttgtggtgtgagttgtggggaggggtggctgtttggagtgttgtgtttgtaggctgttctcaccctgtaggtggagtgtgaaaatcacttagaaaaagttgcagtactttttggttggttttcctattttctgtccatctgtggtgtgttactttctacaaactttcaaaaacagcctcactcctgaaaagggggaaaaaaacctgaccagatcttttgagaaatgactaacaaaaaagctctatgtgttgaataagatctgactattagtgatgttttgattcagtgtaatataaatgaatatttgctgcattttaaaaagatgttttaaatattattcttttccaataataataataatgaaaatcatttgacagttacatccaaggcaacatattattcaatttgcatatatgatttcatataattctcaaaaatgcctataaattagatacttatattctttctactataaagttaaaaaatttaaggcataaagaaagtaattgacttgcttaggattatataattattaagcatcagagacaagttcaaacttaaatggaatatatcaaacatctatttttctcttttttcctagccaacagagcccattttttccctaattatttactcccttttttaaggccaagtgattcaggggacaccaacatcagccccaggctcaggatggatgactcctaactgatattaaccagttattgttctccagttcactaatcagtgagtttaggcttggacatgtgatatgattctggccaatgagaattgcataaatggcagaatgaaggggggtgttggcagaaggtttcctcttcataggaagggtgtcatgcttctgggtggtgtatctacatctgatacttacagtgaatacagccatcttgcttcaagcagaaagctaaacctaatactaaagttgttcatgtagaaagacaaaggaaaccttagtccttggtgatatcattgacttcctgattttaaaaaatcccttactggagtcaacttacttttaactgtttttaaggaaatcaatcaatttctacattatttgagccactttcatttaggtttgatgtcacctgtcattgacagcattcttacagccaggtaggttggacttgctccaaattcatgttcttcatctctaatccttcccaggagtcactttaccctaacaataaatcctaatgcaaatgtttgatttctaagttaaccactaataattcataatctagtttcccatgaaatgaggtaataggttaagtttccaaggtaaccctcaaaacactgatcccatcataaagtcgaacaacataggtgtttcttgagcaagtatcaagtactagaaatgagggacttacatttttctacatacaaagatgtttgtacattctttactatatttatatagcctacttcccaatatatttttcttctgtctactctccatctcttttatctcatttccatccccatcagtctagctggagtcaccattatctgtgaggctgtctcaggcctatctgtgtagacacacattagtcagttccacacagggaccttgccgtcctgcaggctccacccaggagtaggggctggggatagggtggggcattcagctggcttctgctgcaggatcctggaaacttatctggggcatgctcccacccttctcacagtttgtcttggattagaggtcaggcaggatccagtgttccttctcaagatctctcctgccttcctttctgactactcttcgttaatctggggtatctttggacaatcacaggaatggaaactttactctggaaactttactctgacttatcacatattcttctattatcttttcctgggtctctcttccttccatgggacatggatttttccctccttcaggtaggttattgtgtgtcatttacaacttgagtcagtgagtgaattcatggctgaccatatatacaaagagttacaggatcacagaaaatactttttaaattgtttttttaaacatttttacacatgaaaaatatctttttctacattaaacaggatgtgactaaaaacattgacatatacaacatatgcatcaaaataagcaaataaaaatgactttattcttcatctgggctaatacctaactagtgcaaatacttgaatattttaaaaatccctaaaaccagagaccctatgcctatgttttctatacttttattcatttattcaacaaatatttgtgaaggacacactatatacactgatacttattttgctattctgtttggctaccgttacctcccagttgtcatcatccctactattttggcctcatgggtgtagaaagaaatatattccttatctccccttacactcttgtcttccaaatatacccctgctctactaaggacacattctccacccatggtctgttgaaaattgacttttttagttctcagtcaagtaacatacagataattcccatttgtaacatcattataaaagattcattaattaaaatactttcatggggactcttctgactgttcctcccgatataattcaccaacatgcctcatcactgacggtgaaataatgtgcataaggaaataagcagtgccattcagcacatgtcatagaaaataagtaaatcgtattttcttggtatagagcttccattaattggcaagctgtgaatgaaggagaacagtgttctcaaaccttagtagtcattgaaatcacctgaagggcttgttaaaccagggtgctgggcctcactcccagactttctgattcaataggtcttacagcatgggaactttcatttctaacaagttcccaggtgatgctaattcttctggtctagtgacaacaatttgaaactactcttctagatgatgtcacaatgagaccatacacaaaaaaagagaaacagagagaccattagaaatttggtggttagaaatttaaggtcttatcaagactatgccccaagtgttgttccaagttgtaaatgagataactttgtgctaaaatgccccaattccaacctttttttgtactgataaaggaactaagtctcacgcggatgaaatatttcttccaaaactacacagccaataggtgatgaagccaggagtttgactccagaggcagtctttctaactacacaggatgcttattaatcaaaatttgttaatcagtggagcattaggctctatgcctaatggaatattttcaaaaatgtttttgagccaagaggatttcctggtgggaagccaagagtcatcagcaaggctttgggcagttttctgcctcacccattaatcccaattccatccccaaatgactccaaaaatacaatcttgatcccagctctccaagcaatttgactctttctcaggcccttcccctcaacattctttgggtcctttctgcctctcctggaggacaggacctccactgcctccacctttgcttcctagattggatatggaggaggcaccaagcactccgtaggtcttaccttggagaaagccacatctaacttcaacattatccttacttgacctcatttacgccaagatttgccttttgggaattgagctaaggtcggcataactgacttctccacccaaaagttcagtcttcatagtcactcatgtacaatggtcatcttctcacagttaaaaaaaaaagttgggtcgaggagaggctaacaataccagaggaacattgaacaaatctatcaggaaacttttttttaaaaaaaagctattgagataaattggtaagcttgccattttaaatactttttggaacaaaacagggaataaataaacatgcttcagtggtggcctgaaagaaataattcaaatgtatttagcacttagtaagtaggttactgacaagtagatatggcatttcaaatgtattacctatttccatcctgacatttaatttattgtacttcaaagtgtcctgaaattttgtcatccagatatatttctctatgagaaaacaattcaacatactagcactggaaattaaattcaagcttcctccaactaaagatttcctgacagatcaagacagatcaaactcctttaagactttttaagatcaattctttttaaccataagtttcaaggcagagaggagatagagaaaatgattactggcattagcattgaccgaatgtgaaggcagtctgggtactcagtatgaaaaaaatgcgtttaaagtggaggataacttatcaatcagtaactcagaccctgaaaccagacatacatgaccaaaaaatgtgacatggacactcctggttgaatgactttgcacaaatcactcaagacatctgtgcctcagtctatttatcagtaaaatagaagtatcaataataattagatctttctcatggtggtattatgaggattaaataagctaaagcttggtttcttgcctggttcttagtaagaaagcaataaagcagctggcattatcatctatatcgatcctcaaacagttctgaagcctgagtgaaggattggtgttacctttagagttttggtttgttttctgttttttttggggggggggttggggggtaagggtgaagaagggtacaagcagctcagaacgcagacataggttaatcaaagagataatactaatggactctcctaggaggaaaccacttactccaacaagagtattcctactatggaaagatgaaccacccttaattcctccatctgtcctggaagatattcgcaacatatgagttcagtaccacctttagccccaggccagtgaagctgcttcccagggcatgattccccacttcagggggcctgacaagggctctctttggtgttcctctccccatggtttgccccgcaagaccaagaagaacctgaagctcatggccctcttccccctccagatactgtaggaccctggaattccctgctcttcccagtatgttcctttaccttattttgggcagaagaccccagcattctctacccaaaggtccccaagcctgtctcctacatcttactgggctttcttattaggtctttcctctcaagggacccaggacgctattggtgtttgtaccctttcaaaccaaggagtggccaagaagcagctcctttcaaagctaggtaggttgatggagactgtacttgggggctgaggtttccacctgtggtgcagagtggagctgcaggttgctggcccagcgctgtcacacaaggagctgagaactttcagttcacccaacttgtctgtcttttatgaaacttattaaaaggtagaaggatagaacatatagcagtttagtcacctgatatataactttaaaatacttagttaaatggtatttggatgaaatatgctcctaccctgagcccatgaaatgttaggggaaagaactgaatgagttcgttgctgcgtgaaacatgtcctttataagaatagtaaagcaggaaaggaacatttcaaacttgagaaaccagtatctcctaactgcacctagcacttgaattttagcacttagaaggtgtaattgcgggtaccaattgcccagaaataaccacatcagtacatgaatgtaatcattttccaagagtccactgtggacagaaatattttcactgacatatgattgtaagagtcaaaatcccatgacctctccttccgtggccgcctccttctttacttcccttccctgcaaactttttagttcaaaatataagccctttgggagttatgtcatctgatttcaagagaaaattatgattataaatagctccgaaggattagttgagtcacagattggatgcagggtcagttttcacagttcaccggctgccatctgcacccaggtcgtgtttagaaacccttgactttatgctttattgactccactgggacaaaaactaaagtatcaaacaccagtgggagcatttttcagaggtaaacagtggtaacattttacacatatattccttatcgtttctttttctgtatagcacgttttaagaattgcttttttcttttttttttttttttgacagtcttgctcttgtggcccaggctggagtgcagtggtgtgatcttggctcactgtaacctctggttctgggttcaagtgattctcctgtctcagcctccccagtagctgagattgcaagcatgcaccaccacacccagctaaatttttgtatctgtagtagagaaaaggtttcaccatgttggccaggctggtcttgacacattttaagaattcctaaggaaaatgtaccagtcatcattttttcacgttgtatgtttcttaaaaacaaagtcttcatttttaaaaagcatttacaatgtaaatgattatgcacactctgccctttaacattagaataaagagcaatgaagctattagatgtttgtaaaacaaaattaactatgatagttgagatcctattttatcatcctccttgcacaaatttctttcaaaaatgaaatgaggacaaaatatatgttttacatgtggcataatcttatacaagtattcagatattttcatgtcttagataaatgtataggaaaattctttataataattatctgccggtgaaaaagtacaggatgacaatgactagtccatattacattatagtttttgttcctgcactgtctagcgtggtcagatgaaacttgaggagctgctcatgttgatcagacggaagaagacacagagtacaaggcgggtacgagggaaagggaaaatgaataagtaagaagaggtaaatggaggggagtagggagaaatatgtctttaggtttattagtttattttcaaaatttattcaaatttaggtttgatctacctgtttttcaactttcttctctccaaactggaataaccatcttaatgaacctgtgaacacttacttatgtcttcattagaagtttcttactcttctctatgtgataaatgagcataaaagagctaatatttgacagaaatactgagtttcttggctaaaggcatataaacaatgcatactttttttaagttttctttcctgtgactttaaaatgctatcaaaaatgtttagttttttttttctacaccaaatatatatgtttccccacaatttgtttcaataatatgcaacatgattattcaggaacaacttaatctaaaggcaatgaaggagatgattggcagcagtgaatttgctcccaagatgttgttgctgcataagcagcaataaatttgattatatcaatcaaattgcacaggagtatacattaaaacttctaccatttccatccttactccactcatgaaggtaatcagttacaattagtctaatgtaaatatttctagacactttatagccattcagtggatatatattgaccccctgctctgtgtcacacatgattttagaagctgatgatacagcagtgtacaacagaaggccaactctttgctctccaggtctttgcagcccaggctgctagactgtaagcataaaatgaacaaaccaaccagtggacatatggtatggcatctagtagtggtcagtgctaagaagattataacagggtaaggctgggcatggtggctcacacctgtatacaatcccagcattttgggaggctgaggcaggcagatcacttgaggtcaagagtttgagaccagcctggccaacatggcgaaacccaaccctgtctctactaaaaatacaaaaaattagctgggtgtggtggcacgcctgtaatcccagcaacttgggaggctgaggcaggagaatcgcttgaacatgggaggcagaggctgcagtgagccgagatcatgccactgcactacagcctgagcgacggagcaagactctgtcaaaaaaaaaaaaaaaaaagaaagaaaaaagaaaaaagactatagtagaataaaaagacaaaataaaaatgaaaaatgcttactattgggggcaggcacagggatgccctctctacctaaatgcagtaaggaaatgattcacacaaatatctgagtacaagattctaagtagagtgaatagcaagtacacaggccctgaggcaaaagcaagcttggcagctttgcatccagcaaggctagtgtcactggagcaaaatgaataaaggggaactggttaaaaggtgaggttggagacttagcttgagatgacttatgtggagctttatgaataaggcattgtggtctgacttaaactttaaaagaggcattctggctgtagagggaagaagagactgacaggggtcaggagcaagagggggaggccagttagcaggctgcacaggaggccaggcaagagatgatggcagcttggcctctggctcattcgttacaggtgggaatacaaaatggtatagcaagaaagtttagcagtttttgcaaaactaaacacttatgataccatccagccattgtgttccttggcatttactcaaatgagttgaaaaaagctgtacctgtttataggagctttattcataattgtcaaaccttggagcaatcaagatgtccttcaatagtagaatgcatagactatctatgcacacaatagaatattatttagcaatataaagaaattagctatcaagccatgaaaagacatggagaaaaatgcatattaccaagtggaataagccaatattaaaaagtctagccttttactatatgatactaagtatctgatggtctggaaaaggccaaactaaggagacagcaaaaagatagtggttgtcagggaccagaggtgagggaaggaaggaaggttgaatagatgaagtatagggattttttttagggcagtggaactaccctgtatgatactgtaatggtagacatatgtcattatacatttatcaaaacccatagaatgtacaacagaaagtgtgagtcctcatagaaactatggatgttaattaataattatgtattaacattggctcatcaactgaaataactgtaccacaataataccagatgtcagtaatatgggaactgtgaaggtgggggtggagatgagatgaatgggaattctctgtactatacactcgatttttctgtaagcctaaaaaataaagtctaaatgaagaaggtgcctgagattgtggctttcaggcagggatagcatagtacagagttctctaggtaatcatgcttattcaaaaaggaaaaattaaaaacttcttgaggagaataaaaaggtcaagttaagttggctggctttggaggcttcccccatttcacacactggagtagcagagatgcatgcataggcagatgaagctctcaaaggccattgttgtaactgggctgtagagcagagaaaaatctttgagaaacagacctgcagctactatttctgtcagctgaagagaaagttaagtcagttcttgcacacagagacatacaactgaactcatacccagattcacttcttttctgctgtacacattctcctggtccctctcttcaaccttctgatttggaaagaagttctctcatacaagaatgaacaattttcaaaaagaaaccaacatggaatccatataaaaaaataccacaagaacaaaggtggaaaagatagggaaaaacacatgacaaagaacccatgccagaggaatgtacaaatctgtgagctcatcctatgaactcaagaacttaatgaaatcatcaattctgtagaaaaaataatacaattaaaacaaagaaaaaggtttcaagaggtaaataatatgataatacaaggaggtgaaacatgggtacacataactcagtcagcaaatggaggaggaaaatgaggctaccctgtagagacagccaagccataagccacaaaacttaaaagagacataactgaaaacacagtagagtgtttgacaaataaaatactttaaagtttttttaaaaaaagaaaaaggtaaacaaaacaggataagatcaagacattaatttttcaaaaaaagtttagtggaaaaatgatagatatggaaactagataaaagagatctctgataggcataatccatttccctgaagaagagaaccaaacaaatggaacagaaaaaaatgtatagtctgagaaaacattaataatataccattaaggccgggcgttgtggctcactcctgtaatcccagcactttgggaggccaaggcgggcggatcacctgaggtcgggagttcgagaccagcctgaccaacatggagaaaccccgtctctactaaaaatacaaaattagccaggcgtggtggcacgtgcctgtaatcccagctactcaggaggctgaggcaggagaatcgcttgaacccgggaggcagaggttgtggtgagccgagatcgcaccattgcactccagcctgggcatcaagagcgaaactccatctcaaaaataataataataagtcaataaaataatataccattaagactttgagccatatgtttataggacaaaatgatacccaactcaataccaattacggtctttgaaaagtagtgaacttccaaaataaaagaccatttttgcaattgtgctcagttaactaaactaactaaactcaaaacaccattcttacaactttgtctattcctctcacagcatgcacattggtcttttagatacataaatcatatcacatcctgcttaaaataattcaatgacctgccattgcaaatatgacagaatccttccaaggcctgatattagcttacttatacctatgtttgcctcccaacttgggtcactctctctctcagtcagtatactccagccacatttggcctccttcctgttcctcaaacatgccaatactgatcatgcctcgggcctttgtacttgcccttctttctatctggaatagatagaacagacttcccccagactttcctataactaatacttcctcattgttcgggtcttaactatctgatcatcttatctaacatagtgtttcctctcataattaaccttatatcataattcttattttatttttagtctttcttttaaaatataagttctacctgataagggatcattctcattttttcaatttttaatcacttcatttagtttgacaataattctgtaatgtttaaacagtatggtgtttagatttataattgctaaaaaggcattttatttcattgcaaataggatttttacatgagaaataggactggtatgttctattaaatgaatattaatagagaactgagtctttatattctattttatttataacctacactggtagttatcacgcagcattcataaatgatggaaagatgatttcttatccaaaccaacagctacacaacacacacacacacatacacacacgagagagagagagagagagagagagagggagagagagagagagggaggagaggagagaggagagagagagcgagatacgtattttaaggaatgggctcatgtgattattggtgctggcaagtctgaaatttgcaaagcaaactggcaggctggaaaccctggcaggagtcattgttgcagtcttgatttcaaaggcgttctggaagctgaattcctttctctttgggggaccttaatcttctttcttaaggttttcaactgattagatgaggcttacccataatttagagggtaatctgctttattcaaagtctactgatttaaatgttaatcacatctaaaaaatactttcacagcgacatttaaattggtgtttgaccaaacgactggccaccataacctacctatggtgacacataaaattaaacctcacggaggtagttgttgccttttcaagattcccttttcaagttacacaatagcatattccatgctcttcccttaacacactgtcgtcctttatttgtgtgtccctaattaatccgtatcattatttctccctaaaattatatgcactttcttctcagtagatgacctcatgcatcacgactaaggatttccagcctcctaagtaccactctactatgtggaatatcccttccatatgctggttttgtcatgtttggtgagctctcttggatcatttatgagtataggacatatagccttaaagccatcaacatgaaatttactgtggaggaattggcaccatcagccaggtttctgtcattctaaggagattagctgacaaaactaggctgcagtggaatgcttggagcatggtgacatcacaagattacaccacaatgattcctattccacttgttctacctacactgtatctgatcactgcataagagatagtagaaatggcattatctttaaagtagtgatattttcaagccatgaagtttagtgacttgctgaaatgggctagggaatctaatttcaaatgggcaaaaagataaacaaactattttgctttaattttctagttcagtgttttaggggtaaatcaaaaccatccaaatgtcagatcagaaagaaagttaaaaatcatatagagtaagtattaatcagtattaacattcaactctaaatattttttatcgttatatgtatacacgtatctttgtgactccagaacttatgtttattttttataaggtatttcataaatacattcatgcttatttaataccatggaaaataaatattggcaaatgacttttctgcaggtttataggaaacagcagcatatgtgagaggtcatttaaaggaacatgaagagttcctctcctgcatattaccttttgagcctctctttagtcagattgagttctttgtggagacctcctgttttttgtcctttgttttgtccctgctttttgagatggcccctgccttgtttctgaggcattagcatgtacaaccatctctggccaccttccaacattagctcataatcgttaggcctaggtctgggcaaagagattttcaaaagcagatgaaacccaaaggttgaagctaacatgtgccagagtttttagattggtgcacagataaggaaagaaccaagtcaaatggcaggcagagctggcctgtgttcttcctagaggcaaagttcaactgttctgtaagctgtttctgtatttggtggggagcctctgggatgttgccagttcagacctctaggaagttcttgactgccgaagctgactggccttaaaataacgatgtttccttagtttcctctttaatggcagctgttattactcagcagtccagtcaattttatctacctggagcttatacagagcgtggtcattgtttcagttcctattcactacctcactcactgggttgatttcctcagccagcagctctaaacccatgagagctccaccccgtggtcacctgaaatgcgctttaaacataatctatttgatatcatgtgttttcattttttttttcacttttaaaatctgtgacattgatagaatggatatcgttgggagcacttaagtggttattttcctaaaatttagaggtacttatccaatgaagtagcatctgtgaatgacttttataaattgcaaagcctaattcaaatagcatgtactatacttaagatacacacaagattattaagtatatgacaactattatagattcaatcccccttttttcttcccactccagttacttcctttaatagcagacatctgtttatgaattcacttccctatctttccttagttttattcattattagaatagcacactaaagatattaacagtcggtacctctagactggtgtatcattgtgctgaaatgtttgggaagctgcaaatgctcaagtctattcgttgttgtcttcatatgatcaatttgagaaattaagagctttccaaatgttaatgaattttttttctttctttagagagtacatattaaggaataatcagagagtgattggctatattttaaatcccattgcaatccttgtttttctgttatatgtttttcttcacttttttataaaaaagtttaatctgtataaatttttgtagaagacttctggatactgaagatgagctcagtgacattcagactgactcagtcccatctgaagtccgggactggttggcttctacctttacacggaaaatggggatgacaaaaaagaaacctgaggaaaaaccaaaatttcggagcattgtgcatgctgttcaagctggaatttttgtggaaaggtaagtgaaattgttggtatctcaagacagtaacatttgaaaggcagcagatacattcattttttcaagggtatgagcagtctatatttcacttattgacgaaaactgtgatcataatgataactagaatgaacaaatttgggactttatgatgaacttacctataacaaaaacacctggtcccggatgcattctttttatttattttaagttgacatgaagactgaaagcaaagatttttgaatgacctttctcctcaaatgaacctttgtgaacaactgtttaaaaacaattctgacacatgtatatgttacacaactaattttacctgaataaaatgtaacatttcatgaaatacattctacactgggtagcaatctacatgtcaagatcacttaggccttcctctgccctaaagacagaagaccatttgcttcccttctttccataatggaggaaatctctctcatgctcacttttgataggttatttttttttttcaacatttctgtcactgaagcaagggatatttgatggcccctagaaacgcctagttatatcatcagagttttcaatgtgaaacacatgctaatatgacccaattttacattctttcagcccttaagaatacagcttattttttccatctaggaaacaagatatttcctagaactaaaactacaaaagactcgccaaaatagacattttatgtttgacagaattgaaaagtagttatcagaaatcccttagattaaaaaataattacatgaaattatatgtggaatgattatttgaatattttagaaactaataaagttgagaaacagagaaaaattttgccaatatgcctaaaattaaattttagagaaactgcattatttctcatcttctgatatctctaggcattaccgttaatcaatattacaaacttgaatttttttctgctaaagggacagtggaaaacacatttgaatttctaaaagtgtaaatgagaatgcatggcaacaaatataaagcttaaagatggttaaatacactgtgcaatttaaagaagatgacttttctctagcatcaaattaaaaatatctaaatagtacatcagaaaatctgtgagagaatcacagatgaaacatgagagtatgtttgatttgctaaagaaatgtatattttgtcttctttgtttaaaaaaatattacagaacttggcaaactgggaaaaaatgtaaactgtggaggaagatcaactgattttccatttccattcaagagaaggttataatatataaaatatctgaatatgctaaatttcaattttttcatatgttacataaaacacatttagtagcctataaaagtataaaattgttcttcaggtaactaaattagtaagcagtctttaagaaatcaatgtgctaagaacatatagaaataaagtcttttttaaatcactgttgaatccccactagtaggtgcataaaaatagtgggacaagtttattggaaattttcaaaagtaatcatcttcaatcctgacagctgaaagtctacttgaagtcttgttgcttcttcctttaaacgcttcctcccaagattcaattccctggcaagccctggcaattacttacccaaatgcattctgaatccactcacttcctcatctccactcctgcaaccacaatctaagcctccactatctgccttcagaaatacgacagtaactttctaactgggctcctctcctcctaacttgaccaccccaaccaagccattccacagtgatgtttttaggatataaattagttcctgtcattcttttctttttctttttcttttttttttttttttgacgtagtctggctctgtcacccaggttggggtgcagtggcgcgatctcggctccctgcaagctccgcctcccgggttcaagtgattctcctgcctcagcctcccgagtagctgggactacaggcacccgcaaccctgcctggctaatttttttgcatttttagtagagacggggtttcagcgtgttagccagaatggtcttgatctcctgacctcgtgatccacccacctaggcctcccgaagtgctgggattacaggcgtgagccaccgtgcccagcctagttcctgtcattcttaagcttcaaaccaccagaaggtttcccaattcacttgagcctggttaggtccctttctgctttctagcctcatctactgcaaccttcatccttgactgaacacctataccagcctgatttcaatttcaagaacatttctaagctctttcctgccttggagccattcatcctgttattttctctgtcagaagtggttctccccacccttcaacatggcgggctggcccttttaccgttccagaggtcttcccggatcactctatgctgttcctcactattgctgcccccagccagtggtttacctcctagcacttatccctgtttgtaatcatatattgtatcttatttttcatttctcctcaccactggaataagccctgtgaaatagcaacaatatttcccttgccttccactaaataagtctgttgccttgcagagtgcctggtataaatagtgttgttttttgtttgtgtgtttgttttgtttttctttgagacggagtctggctctgtcacccaggctggagtgcagtggcttgatctccgtttactgcaacctccgcctcccgagttcaagagattctcctgctgggattacaggcgcatgccaccacgcacggctaattgttttttgtatttttagtagagacagggtttcccatgttggccaggctagtctcgaactcctgatctcaggtgattcacccgcctcggcctcccaaagttctgggattacaggcgtgagtcactgcgcccgtccttaaaatagtatttttaaagagtttttgaattatatcttgtaactattatggaaacttccacaaataatccactacatttccagttagactttcaccacctttaggagcccaggaaattcactatcatttttcagaaacttgtaatatatcacctgtttactaaagtgtgagacaactgggttaagatatctccgatgctcattctaattcaaggatgagtcaccttaattttccatcttagtgttctatttctaattttccatcctagaattctattcctgattatagaattagaaaagtatgataatgggaaagttttgctatctctttggaagggtaatcctctttgtcttcctttacattccatgtaatgagaaagtatattggtattcatttctcaacctatcccaagtttaagaaactcagtagcatcagaggtcccattgaggccagagagctctaaagacataagattttgaaccaatgatattggctgcaaagtaatgagaacagttaaaataataataaaaatgatggcttacttgtactgagaatcatttacacaaaaagcttataattattctcattttacaaatgaatgacattaaatagtttccaaaggtcacacagcagtgagtggctaacatgtgattcaaagcatgtgttctctttgcctttctgtgccatgaagtcaagtcgagctaacgttaattaacattttaaaatttcttaatcctgaatgatttttatattgacgcttttgcctgttcatcatccttccatttcccctgcacctccatttttttagtattaatagtaatgactagaaacagatggaaaagactgtttccaaaaaaaaaaaacacctgagtatcactgttgatagtaattattctagatcttgtatagtatgattagtagtttccttgctttgcaagattagaataattatacctatatcaatggagtaattaatataagtatttttagttttaactgttctaaaatctttcaatagagatataggataatttcttattctacctaatcacccacatccaaaaataatttatgactatttaaaataaacgtaaagtggaagcatgaaagtgttgtgcttaaggtctctagaataaaatggagagctacttcatcaagaaagcctaggctagagatgtaattaaacacagtattttcattctgaacttccaactagtcaagacttaaaaggaaaacatgataaattgcttagctttgattatctttaacaaatgatggcttttacatagaaactgagtaatatgtcccatgcatttttaacataaggaacattgaatcaaaaaatttagtatcttctatagcggttttataaaagacgtagaatattgtccatgtgaccatttcttacatcgaccatatttatcgttatatttaattaagctatggcattgtccaggccttttgtagggagaatttacagccatgtagcctagaaattcagctcgttgtggactaacttgatataaaaattaagggacatgattaatctcaattgtattctttcttcccaggccttggaggaggaaacatgtttctttcagagtcccgaatagaagcactattactatatcacatgctaggctatcatattgattcttttctcacatgaattcatggagggggttcttatatttggtttatgctatttgggttgcccagcagaagatagaaaaaaatcaaatcactgattattaaaaacagttttgttggctgggcgtggtggctcatgcctgtaattccagtactttgagaggccaatgtgggcggatcacgaggttaggagtttgagaccagcctgaccaacatggtgaaaccctgtctctactgaaaatacaaaaattagttgggcatggtggcgcatgcctgtaatcccagctactcaggaggctgaggcaggagaatcacttgaacccgggaggcggagcttgcattgagcacagatcacaccactgcactccagcttgggcaacagagcgagactctgtctcaaaaagaaaaagaaacacaaaacaaaaacaaaaacaaaaaaccacttttgttattgatactattatggaaatgaaaataacattgttttctttctgaataactttcttaatattgaatgacaatttgaacaaacttaaacaatttttgctagtatgatttccccaatatcattaaataaaagaagggggacctatgtaaattctgatgatactacatatccccctctataattttaatataaaaatataaaggaaatattttaatgacatttagcttccagactaaaaattttggcatataaatggacataaaacaagaatgttctgctgtcagggatatggtggcatgttagaaagttgttgcatatgcaaagtgtagtgcatcttttaatatgatcaagttcagggaaggatatctttacatggaaactaaagtcacattaattttgcagggtgattgtgaatagagaatatattacattgtcacattgtagatgtttagtaaaaaggtgactatagttatcattattgacacaaagggagtctgtaactaatgataagaggtgaacatgtcaaaagtaatcttttccctgatatttaagaaatagttgaaaactttgaataaatgaattttatatttacacttatttttgtcttttttagaatgtaccgaaaaacatatcatatggttggtttggcatatccagcagctgtcatcgtaacattaaaggtgacataatttcattattttcgtgtataaaatggtcattttaaaaaattctcttaaaaaggctatgagaaaatgagaataggtctttactgcagcctacatcttagaacgttaaaaaattcaacatatcctaacaatttaaaaaatgaactgtgttccaaatcatgactcactgtagattcaaatgactgatttacacaaactatatcaacatatatatatgcatgtttgtatgcacacacacgtgtgttttttttcttaattttatttatgtggatcttgaattcattttgaaatggcactagtacttgtcaaaatgtacatattttgttatgaatatattatggaagagttaaatgcatgttataaaaagatattttagtcaatgatgtttaaatgacaaaacatacagaaggaaattatttaggattgtaggtctgaaaaaatacaaaatgtaagataaaattaagaaagaaaaaacacttctctctcttgtctttggcttctcctgtggctacactattctaaggcccaattgcagcgctacatatgttagaaataatcagagttgaaactctgaagtgagtaaagttattggctcacatacttgcctcattgtgtgtgtgtgtgtgtgtgtgtgtgtgtgtgtgtgtgtggtgttcatgtgccttgtttctaaatgttatttctacagaggcattttgtaggctcatccttctaaacttgtttcgattgcctaatttaatttaacattgtctcctaaaacatctgcatattggtttttctacattaaccaagaatttaaaggatattggcagcagcagatcctgggttgatttatttctgacttattgtactcctttttaattttaaatttgtgtttttaaaaattttaagcatcttctttgcaattgttttttctctgctgcatattagattttaatctcattaatgttaaaagatagctcatttttctttggtgctttttttatatttatgtttctctgcctcctgtcagatcagaggggacactagattttgataggagcgcaaaccctattgtgaaatgtgcgtgtgagggttgtgcactgctgatgaggtggaacagtttcattccaaaaccatccaaccccaactcagtctgtagaaaaattttcttccacacaactagtccctggtgccaaaatattgaggaccattgcattaaaggatattaatcattcctcggttcttgagagattttgccttctctattatttccttaacaatgagcaagaaaattactcatttttattttatttattttaagaatttttgcttaaaaaccaactaacaaaatattttagtatgagagaatgtagtattttttctaaagtgttgtatagtaaaaaagatataaactaacaggttgagagagggaatatcaccaagtaaagaatgttttagttaaataattcttattttctgagaagcctccttgtcctgtttgttctcaatctgatgacataaaagccaagcatctgcagtagtttagaaatgtaaatcatcagggtttataaaaaattctcaagaaataaagaattaaccttttactcagtgggaacccccaagttggaactgtaaatataaatagcaaccttctaagagtctgaactaactcttgtttgttagctttggagtttgataaaagatttattgacctcctttgagatttactgatgtaaaatgccttctaacagaacttataataacttttaatatataaagagataaagcaagcatttggggatcaaataagggccaaatgcaaggaatttaataacgacatacaagcaaaccaaaaactgtttcattggtgcttgtttccaagtgattaaaaataccatttgaagctcttactattattttttgaaggaagtatttttaaaagagactgaatactttttatcagatttttagtttggttctagcatattatagcacatagagttggcctccagaaaaatgtgttgaatgaaatttgaaacgtgcctactcaaatagaaaattaacgcatagctttatggttgcccacttactgttcaatactaaacctactgtatgtgtataaacagtaggccttcctgctagcagtttctgataaccattagaatggactacagtgcttctatagattttcaaagcaaaatcatgaggtggctggagtggtttatatccctgctcactctcctctctctctgttagggggtactttccagtttccctactggcctgcttgcttccctagggaactgcatgaaatgcgagtattactatcctcctcctcaatcaaaaggcccacttccttttcctcaccacttgtccctcaagcaaagtattagtaaatcagccaaagatagagcaaataataatagttgaaaagtagtgtaaaaaataccttttaataattaaagatagtgtatactctatctcgctatgatatttacatatttttctatctttctttctttctttttggagatggagtctcactctgtcacccaggctggagtgcagtagtgcgatcttggctcactgcaacctctgcctcctgggttcaagcgattctcctgcctcagcctcctgattagctgggattacaggcgtgcaccaccacacctggctaatttttgtatttttttgtagagatggggtttcactatgttggtcaggctggcctcgaactcctgacctcgtgattggcccatttcagcctcccaaagtgctgggattacaggcatgagccaccacaccaggccgatatttacatcttaaaacaggacataaatatcaaaactttagccaaactgcaaactcttatggtgaaatttcaagcaatgtagcaagtgagtaagaaagaaaaaccgggactattttttctgtatttcccaattgacatcatctatgtaactagcaattctaccctaaattgaggtccactctgagaaaatgatttatggcaggaagttggagagagattaaagataatggcagtattatggtattatcaaatgtattaaatcactttagtaactttgggattaaagaaaaggttttgatgctttataaagcattatggcctcaattttgtggacccatggatactaagtggtcctgtcctatgaaactctggtcaaagtgtagtttgacatgctaaattgaaagatgacctgctaaatgtacaatgccttatcttttgaataaattctcgtagaaacagtatgatattggcacctaaagtatttattcttttttctacaggatgttgataaatggtctttcgatgtatttgccctaaatgaagcaagtggagagcatagtctgaagtttatgatttatgaactgtttaccagatatgatcttatcaaccgtttcaaggtcagaaacatggaacaaaagtgaaatgctcttagaattggttatttgagtaagaatgaaaatgcagaacatttgagtaattaagcaattcattttaggatgttttagttagcaggtcacagaattaaggtgatgaggtctttatatgatagaaccattctccacaagtcactgacacatctatatatccacctagagatcatgaggccactatagcctcattccagcaagatgccaatatcccctgacttattcacaaaacactcacatagggtttggcagctatgtcttaaagaaatatgactactccagcattcctaaaatacagaatgaacctttattgccagcttttcttaaattagaatgaaggggtttctaattaacttcatttagaaccatccaagcaatagatttgatacagactactgagcagattgtagcttattactttcatcatttcctgtagaatcatcacatttttagagctataaagtactgagagataatctattttaacctctttgtattaagatagaaaaactagactccactaattgtaactggaaatatttacccttctacgaattagccttcctactctccggaagatactaaaatttcaagcctatagtacaagtaaggctattatttaatctgtcctagtcaaatacttgggggttacaatctttctttttgggaatgaaagttaacatgttcatgaagtggtttttcagaacaatcaacatttgacataaagaaactactgtccacatctgactcactaatatgttccatgacaaacagtgctcaggttgatttagtaccacttttttggtcaaaatataattataattattactttccacagattcctgtttcttgcctaatcacctttgcagaagctttagaagttggttacagcaagtacaaaaatccatatcacaatttgattcatgcagctgatgtcactcaaactgtgcattacataatgcttcatacaggtatcatggtaagacagtctttgtaactgaggtttgttagtttggaagcattccaaacttccattcctataagtttctattgtctctttaatgcccatagaggtattctaagtaataagtattataaagaataattgtttggatttttgaagcttaatgtgttataatacacatttttcaaaaaatactttaagtcagtgcaaaaaagataaccagaggcaaaaaaaaaaaaagtttcccaaaatttggactaccaaacatttttgtttgtaaattcctttattctgcaggagtcaaccaaaaaaagtgacctagagaaaaagtctttagaaagaaagttatagcactctttttctcattccttatgtgctcctaacctgaccttagtcgcttttgctctcttactcatattactaatcacagtcaaattctaatagggatttggggaaattattaatgtcaatttttgcaaaatttccttcctcttctttgcatttgatgaatcagtgaatgggtgactaaacgattcagtgatgcaaagcctgaaataacagtgagtgtatgacaggaactctgagagagttgggaatttttgtaatgtcttagaactcaggatgattcccagaaggtaaaaagtgaggaactgaccttcctgtgaaggtgcaaaactgagctgggttcaaaaaaggagcaggccatgtgagatttctaaatcctagcacctgctttaatcgtgaagtgcagtgagaaaatgccatttcagcctaggaggcaaccagaatttcatcatttaaaaaaaaattcctgcttgaatgcattttttttacacttgctacaagtgtaaagggagccaaataaaagtctactatatcagcttcacctggtgtgaaggtgacattgaagagatgtgggtgtcatattaattggtaaatagagaaaatcaaatccacaatgtggttttaccctcagaattataaggaagactgttatgggaccaaataagccgttccaacttctctgtaagactagggaatttggcccagcctcgcatgactcctagaaagttaaagttgttagcaaagatcacatagtcactttctgagacagctatgacttaccaaatataaatgtaactttctgattttattcatcctttagcaaaaatgtgtcactggcctctttactcatccattaatttaaccattacaaaaatagtctggtggtagacctttagtgttttccagaaccaagaaaatacctttgaactaaagagaataatgagaacttttaccatagatggagaaagggaagacaacatgagtttatgaatgtattgactattttgtctaaactaggttacactgtcagcttgacaatttttggaaagttattttaacaagttttctctacattaaaaagtagtgataggtgactattaaatttcatgtatatgaatgtgttggttctttgaaacaaaaaagctttatagaaattttcattaggaaaaaatctttagttctttctcacccctcagatttgatataaagaagactgggccatctactttagtgttttagttgatgccctgctatttcagggtggccctatcagtgtgacatttatgaagcactctagtagcagcccagtactgtcaggagactaatgcatgttgtcatctgcaagatgttttaaggaccattcctgaaagggattgcaattaagccattgtccttctgtttgttaatgtcataagggacgccctcaagtctggatgtagacaatgccgaggagagttgatgctcatacacctgcttgtccccctatctctctccttttgtcacttgatacatttgtagtcctgtgccatggtgacagtgatgcacagtaactcagtccatttgctaaggagcaaatgttttataaagtgctgtcaagtcaccttcaaatgtctctttgaacatggaattatacaagggccttggccagaaaacatttgcattagagggctcctggcactgcgttctctctaatactaagagtagaaggaggagagatgactgtaaatctagttcctttggaatttttagtgcactgactacacagaaacagtcttccacactttggaatgactgcatttttctctgatcagtctacagaacatttagtactatatctttctacaaattatgtggaaattctgttcttataaatggcttccaatatgatactgtttggaagaggaaagagagcatggactcaggaagcagtcagacacgagtttaaaaccatgccccaccactttctaattcactagctctacattgcttcccttgtcactaaaatgcagttaataataccagccaccttatagaatggcaatgaggagtaaataaaacatttgcaaggcacctaacctagtgcctaaaacataatagctattaacataccttaattaattaattgtaatatgccaattttctatactggtaacttacagcaaacttcttcagcctattcaaaggaatagagaaaaatagtgtcaaacctcataaattctagctaaaagaattgttaattatgtgtttttagatacacaaggaatcaagaaataaatgtgattttctgacttgaaattctccccaccctttatataatacacatacatactttgtataatacacatatttactttttctgtcccacaggcacacactcacacatcctgagtaattcagacatgaaaattacattttaagtcctaagtcaaaactctattagcttctacccattcatatactaaaattagctagaaatcctacttttgaaaccttagaagcatgtgttcagcatattgccttctttatgtaatgaatgctattgtgatccgttgaaaaaatagaaactttgaaatcagacagatttgggtttgcattcctgctctgccgctagatacgtatgtgacctttgacatgttgatccatttctctaggattcagctttgttttctgcaacataggcataaaaatatttacctataaccatcttataaagtggttttaagaattaaatgagatcagctaactaaagtgtccagttaatgttaattcccttcctttgtttctgttataatacatgttattaatagcagtcaatacctccttataagttgatgactgcccgctctagagtaagccaacctgagcatttctgcagacaaaatacaacctaaaattctgatgaaatacagtgttgcattgctcatgatttatcctcttaaccctttatttctgcctattaggaatcagaagaaccttggatttgtattgaccagtgctgtagttgggaagagtgacaggatttaacctcgttctctctggcttgccctcaggagtcatttataaaatttatgaatttaagcacctgttttctgagttagaattccttctgataccagcacaaaatgaatcagcagctaaggaactaacaatcagtccagaattctacttttgctaatgcaaagtagatgtgtttttaaattaagtgtgaaagttcagtgtttcctctcttcctatattagtttgtagtggaacttaatgatatagtccatagtgcagaaataagtaagggggatttgtggagaaagtactatttatgggaggcagaaatgaaccaaagtaaaaacaggaaatgtatttataataaattttcacagctagcaagataataattgtaaatatttatgagtcaatcactaattaattccatctctgattttctaatttaatttctttttactattgacagtttatattctgtgttatcatagtagataatgaatgctgccttttttaaaaccacagctatatttataaatacataatttgaacccactcaaaaatttaaataagtggtttttttccattttctttaataaaacaatgggtttctagggtacaaaactagtttaacttcaattgctattcatttcatggtgtttagttccatagtttcattgggaacattggaggctcaatcccaattcagacctctataaggtaactttcttccttttaatgactcacaattaaatgtgtctatgaacacagaacagctagttatattaacttcttttggctctgaaaattatttctgcttcactcatccagttgtgaggcatttgtacatgaattacaatcactaatgatatgttagctattatttcccagatttaatgcctttatcaattcatttaacatagtaagttcctagcaaaatgccatttattctttattttaccatatgacaagacatgataggtgcagtgcatacattaacccaaaacttctttttaaaccccataggggaaagattactaatgccattttcaccacaactgtagctaagagggtaaataacttattttcctgaggattaacagagatttaaaaccaggactgattccatggtctcttaccactgttgcctctttttaatgcaaaactacaatttaacaaacaaatactaagttcctaatatgtgccgaatatcatgataggttatgtgaagggagctaagattaataagattatacctttggtacctatgagattcaacaattgtcactgccttcatttttgactcatggacctacaatggctttcttttaccttttacacaaaatttaaattcatcaattctcatcaaattagtccattaactctttccatactctccatattcttcagttacacttcacttgattctccaacacgattgtactattgacaattctattttaatacagaccctatagtatgattctacatttgctctttctatttgaaattcttctgtctccatccttgcacttaactatcagcctttttccagccttttcccaagatctactgccaccaattagcctttctctctaggctcttaaattgcatctttattctgcaaacttttatcaagtgtgcacatagtttacatgatctctttctgttgtttttcgcaaagtcttttattgttttaagtgtacagaataagaccactcagagtgagtgtcatagcattttggattccgcattcgtaccatcaagtgccatctatttatagtgttctctagtagaacttgctgtggtgatggaaatgttttgtgtctgtgctgttctgtatggtaaccacttgtcacatgtgaccaatgggcatatgtaatgtggctagtgtaactgggaaagtgaatttaattttacttaattttctttatttttaacttaaacagtcacatgtggttaccatattgggtagtacagtataagggttttacaaaatatgagtgatgaaaaaactattgaattatttctaaatgaactaaaaatagcagggaacttttgttaaagcatctagttagtaactgaaagatgaatgtatgtaaagcggatagtcatggatttttacatgaaagcatttattctttcttttaacattattgaagttaattgcacagccatttttatgtgttatgaatagaaaaatttgtgaatttcagaaacttctaaatctctaaacatgaaaatgaagtgcactttctctagtaagaaagtgaatatttttaatttttagatgaaattttttttcatagtagattgttctacaacacttgggctaaaagacattttaataatgtatgagctgtatgataaaaatcaccaaactgtaattgatttcagaagaacccaaacatgtatggctgtaaattcaaaatccagttagggttcaccttttaaatcatagaaaactactcctttttcaattagcaaggacaattatattctgaattttgaacttatatgccatgaaacaatcattgacttcatgaagcatccatcttgcacaattagtggaggtaaaataggaaacaaattaaaagaaatgaaaaataattttatatgattacataaacagggtgcactgaaagtccttttcaaagaaaggaaagatgttatctacttcttgaatataatggattctttctgtaatttactagcactggctcactgaactggaaattttagcaatggtctttgctgctgccattcatgattatgagcatacagggacaacaaacaactttcacattcagacaaggtaagtctgaaaaagtattaactttcattagttaaaatttgaaatttatttttctgcatatcacttaagaggatttttaaaaaataataaagattctaataagaacaggtttaattaatttttagcaaaatttcttaagctgctaacaattgaatcaattaactactattttttaagaatcttgtgtatagtattttgtggcatatctagcaatttaaagaacatgaaaatgtttaagacaatctgtctctgcccagaacttacactgtgaactaccacacaagtcagacatctattcactgaggcaaatcttgcaacataatgcttaaggtactggtttggtgtcattatgtatttgaaagtaatacgagtgtacttctgaaaacaaaatccaaaaattaaatctcattttcaggccaacatgaagtattaaatttaaaataactagaaaatgaaattatttgatgatggttacaatggaagttatttaaatcaaataccagagtagaagtatgttagtctgttagggctgccataacaaaataccacagaatgggtggcttaaacaacatgaatttattttttcacaattatggatgctaggagtacaggatcacagtgtcagctggtttggtttcctctgaggttgctcttcttgacttacagacaacaccctttttgctgtgtcttcacatggtcttttctctgagcacatgcaccccagtgtctcttcctcttcttatatggacaccagtcataacggacttgggccccactcttgttacttcattaactttaattacacccttaatagccctgtctccaaatacagacacactgagagttagggcttcaacacatgaattttagggcagacacaattcagtccataacagagagttaccctaacctctttttagttaggcacagaagtcagtatctgagaagcaggatttggtctaggccccatcaggatccaacttactttacatgtgtgggatcctgaaatttctcttttactagtcaggatgcttaataaggagatatatgttaagagctgatgtctctcttgaaccactgcataaatctccattcttgttgaggaaagattagatctgatttttttttctaattaatagactttatttcttagagcagttttagattcacagaaaaatcgaacaggaagtacagagttgcatgagttccatatgcttcctcctgctaccttaaagtttcgttgttattaacatcttacactggtgtgagatatttgttacaattgattaaccagtatcgatacattgttattaactaagttccattgtttatatgaaggttcactctttgcattatgggttctatgggttttgacaaatgtataatgtcatgtatctaccattgcagtatcacacacaatagtttcacggccctaaaagtctcctgtgcttcagctatcattcctctcttcctgcccctttacccctggcaaccactggtctctttaatgtctctttagttttgccttttccaaaatgtcatagagctgaaataatacagtatataattctttcagactgggttatttcatttagaagaatgtgtttaatgttcctccatgtcttttcatggttgacagcttatttcttatcactgaatactattccattacatggacataccatagtttgtttatctattcacctattaaagcaaatcttggttgtttccaaatttgggcacttatgaataatactgatataagcatacatgtgcaggctcttgtgtggtcagttcatttggttttttaatatatatatatttttaacaactgattttccagatgtgggagttattgtttgatgtggggaatatagaaacagtttattaaaatattagacactttagaacttaaaggaccctaagatgagtgagatccacagtatagatcatctggtctgatatccgtcatctaaaaatagaaaatgaagacctcgagaggtagagtgacctgtctatatgcacttggtcaggtgatggcagtggcagaattgaggagtgagaaaagggacactcactgtcaatccagttcttatataagtctgctcccacagccagagatggacacatgataattccaagctgttaaagcctgaaatggggtgggcttacacattgtagccccttgatggagacagaggaagagttgcaattcaaacagtgaagtgttggggagggcattctgtctgtccctggaatggaggaaaccccagggtcccagagattgatacagtttggagggaaaaggaaaacgtcagagtctggttatgtagcaggaatgttgtttttctacccatatttgcagagtatagggagatttttgcttttatttgtatttaatgtcaaaggaaaacaagactatgcagatcattttgcttaacaaaggctctctacatccactggatccacgatgtggaggattttaattaaagatcgctcatcactgagctgggctctgtacaggaaaacagttctaggggtttgagaagaaagcaagtgatttgttatcagtgaatgccagttgccctttcgactttgaaaagtaaaggccagtgggctggcctcttccagcagcagtgttagatcatcactctagctttctccctttactattcatctgcaagtggatgaagagtcctgatttacttatgcatttggctgtggagagggaggaggaggtggtggaggaaaggagggggatgacaaggaagaggaggacaagaaggggtagatgggggcagagaaggaaaaagaagaatcatgtttttttcaatttatattttaaaactctgtataaaaatgggaaaaaattgtctaacagggtcaactatttaatgaattaattctacatgaacttgaaaattccatgaaccaaaatgttgtaatgaccaaaatgcaacaatataacatgatttttaactctcaatattgccttcatccaagatgaaataaggtcatatgtcatttatatcactaattctattttattttatattattcattgttacttggattgagagtgttttttccaatctggaaactaatttactacataatacaaaatggctaaaatgcgatttggaacatagggcaaggctagatttgagttcaatgcagatattataatgcatgaaatccttgaaagtgtaaataaatggaaataatttcctctttgtgaaaagaaaatgccaggctacatgttaccatggatactggatgttgctcagagtctgttcttttcttagcagtcaaagaccatctcaaacattagaccatgctgcattctcagcatccttgttagctttatgagacaaaatcatgcatactttgctacaattaaatctggttcaaaaacacattttagcttgtttctgaaagagtagatggtgatgcttggagccatatcatgtaataaccctgacaaatctgctatggctagatttggtgccatatagtgcaaatgttactggaaaatcacagctttccccatgatctcagcaaacttctagaaatgcacacagtgttttgcttgggaaacatctcttcaattatctcttcaatgagaattatacatgtgctttgctagttcatatttctgtatattgaggtatgattattcattaaatcctttttaggccttaactaagattattaaatggaaatctattttagaaatatgtgctattaaagacatatattatttcatctttatgatagtgctagaaaaaaaaagaaagtaatagtgcctggtaggtcatttatcatatgttggatgaataataaagcttggtttatctggcagactatcagacacagatcttaaacaggctgcttgtataaaatgccagatttctttagtttttgttttctctgttgttattaaatagtttttattgtgtacatttatggtatataacatgataagatacagatagtaaaatgattattatacagaagcaaattaatatatccatcatctcacatagctatccatgtgtggtggtggtggtgttgttttagtgggaacttttcattttttattttgtccttgtctactctatcataaatattcagtggcagggccagtgctaggttataactaggactttacccactgaaaagcctgaaacagtaagtctggagtgaggcagttttacacttgacagcattaagtatctaccaggagataggagagtgagagaagcctcggtgttgggtaagtggtagcaaacttgctacaagttttaacttgactttcttttttgctatatttgttgtcaatattcaacttgccaacttatatgaacgagttcaccattttaagagattgaacatagtgattttgcttccattccacacttgcataatgatctggcaacctaggaggatagaggaaggacaagcccaggttccattatacagatctgagaatgcttgaaatatttcaggcttaaagttagaataccaaattcatcaatgcaacttgaagtataccaatttatttcataataaaattatattaaaatacagacaggtgagaaataaaagccttcccttgatgtattcatcattttaaaaataaaatcttccttttaaatgggtgatgaagcatacattttaagttttctttaaaaacgacttttctatcttaattttaaagcaaaaggatctataacaataaaatttaatcacattataagagagtaaaaaactagaatcataaatagatcaaatgattttcatcatccccttcacctgctacccaaagtaattttagtttaaaggaacagggatggtatcaacactcttgaatgggtacaaaggggtttgttcattcactgactgaataagacgttaggtaattttattcactttgatatatctagagtattttgcaggtgtctggattacaaatcagaaggaaaagccataaacacatttaaactataataatgataattaaaacaacgctaagcaccacaactaagtggggtttatcccaggtatgcaagtctggctcaacattcataattcaactaatataatctaccacatcaacagggtatacaggaaaaaaatcacatgatcttatcaataaatgcagaaaaagcattttacaaaacattccaacccacgtttatgatataaactccaactaggaatagagaggaccttccttaacttgataaagaatatctatactagagtagaattgtggttatgagggactggggtggagataaaagttaggaagatgttggtcaaaggatacataatttcagttagatgggataaataagttcaagagatctattgtacaatgtgtcaactagagttaataacaatgcattgtattcttttttttcttgtttttttaattttttattatactttaagttttagggaacatgtgcacattgtgcaggttagttacatatgtatacatgtgccatgctggtgcactgcacccactaactcgtcatctagcattaggtatatctcccaatgctatccctcccccctcccccgaccccacaacagtccccagagtgtgatgttccccttcctgtgtccatgtgttctcattgttcaattcccacctatgagtgagaatatgcggtgtttggttttttgttcttgggatagtttactgagaatgatgttttccaatttcatccatgtccctacaaaggacatgaactcatcattttttatggctgcatagtattccatggtgtatatgtgccacattttcttaatccagtctatcattgttggacatttgggttggttccaagtctttgctattgtgaatagtgccgcaataaacatacgtttgcatgtgtctttatagcagcatgatttatagtcctttgggtatatacccagtaatgggatggctgggtcgaatggtatttccagttctagatccctgaggaatctccacactgaattccacaatggttgaactagtttacagtcccaccaacagtgtaaaagtgttcctatttctccacatcctctccagcacctgttgtttcctgactttttaatgatcgccattctaactggtatgagatggtatctcattgtggttttgatttgcatttctctgatggccagtgatgatgagcattttttcatgtgttttttggctgcataaatgtcttcttttgagaagtgtctgttcatgtcctttgcccactttttgatggggttgtttgtttttttcttgtaaatttgtttgagttcattgtagagtctggatattagccctttgtcagatgagtaggttgcgaaaattttctcccattttgtaggttgcctgttcactctgatggtagtttcttttgctgtgcagaagctctttagtttaattagatcccatttgtcaattttgtcttttgttgccattgcttttggtgttttagacatgaagtccttgcccatgcctatgtcctgaatggtaatgcctaggttttcttctagggtttttatggttttaggtctaacatttaagtctttaatccatcttgaattgatttttgtataaggtataaggaagggatccagtttcagctttctacatatggctagccagttttcccagcaccatttattaaatagggaatcctttccccattgcttgtttttctcaggtttgtcaaagatcagatagttgtagatatgcggcattatttctgagggctgtgttctgttccattgatctatatctctgttttggtaccagtaccatgctgttttggttactgtagccttgtagtatagtttgaagtcaggtagtgtgatgcctccagctttgttcttttggcttaggattgacttggcgatgcgggctcttttttggttccatatgaactttaaagtagttttttccaattctgtgaagaaagtcattggtagcttgatggggatggcattgaatctgtaaattaccttgggcagtatggccattttcatgatattgattcttcctacccatgagcatggaatgttcttccatttgtttgtatcctcttttatttccttgagcagtggtttgtagttctccttgaagaggtccttcacatcccttgtaagttggattcctaggtattttattctctttgaagcaattgtgaatgggagttcactcatgatttggctctctgtttgtctgttgttggtgtataagaatgcttgtgatttttgtacattgattttgtatcctgagactttgctgaagttgcttatcagcttaaggagattttgggctgagacaatggggttttctagatatacaatcatgtcgtctgcaaacagggacaatttgacttcctcttttcctaattgaataccctttatttccttctcctgcctaattgccctggccagaacttccaacactatgttgaataggagtggtgagagagggcatccctgtcttgtgccagttttcaaagggaatgcttccagtttttgcccattcagtatgatattggctgtgggtttgtcatagatagctcttactattttgaaatatgtcccatcaatacctaatttatggagagtttttagcatgaagggttgttgaattttgtcaaaggctttttctgcatctattgagataatcatgtggtttttgtctttggctctgtttatatgccggattacatttattgatttgcgtatattgaaccagccttgcatcccagggatgaagcccacttgatcatggtggataagctttttgatgtgctgctggattcggtttgccagtattttattgaggatttttgcatcaatgttcatcaaggatattggtctaaaattctctttttttgttgtgtctctgcctggctttggtatcagaatgatgctagcctcataaaatgagttagggaggattccctctttttctattgattggaatagtttcagaaggaatggtaccagttcctccttgtacctctggtagaattcggctgtgaatccatctggtcctggactctttttggttggtaagctattgattattgccacaatttcagatcctgttattggtctattcagagattcaacttcttcctggtttagtcttgggagagtgtatgtgtcgaggaatttatccatttcttctagattttctagtttatttgcgtagaggtgtttgtagtattctctgatggtagtttgtatttctttggaatcggtggtgatatcccctttatcattttttattgcgtctattagattcttctctctttttttctttattagtcttgctagcggtctgtcaattttgttgatcctttcaaaaaaccagctcctggattcattaattttttgaagggttttttatgtctctatttccttcagttctgctctgatcttagttatttcttgccttctgctagcttttgaatgcgtttgctcttgcttttctagttcttttaattgtgaggttagggtgtcaattttggatctttcctgctttctcttgtgggcatttagtgctataaatttccctctacacactgctttgaatgcgtcccagagattctggtatgttgtgtctttgttctcgttggtttcaaagaacatctttatttctgccttcatttcgttatgtacccagtagtcattcaggagcaggttgttcagtttccatgtagttgagcggttttgagtgagattcttaatcctgagttctagtttgattgcactgtggtctgagagatagtttgttatcatttctgttcttttacatttgctgaggagagctttacttcccagtatgtggtcaattttggaataggtgtggtgtggtgctgaaaaaaatgtatattctgttgatttggggtggagagttctgtagatgtctattaggtctgcttggtgcagagctgagttcaattcctgggtatccttgttgactttctgtctcgttgatctgtctaatgttgacagtggggtgttaaagtctcccattattaatgtgtgggagtctaagtctctttgtaggtcactcaggacttgctttatgaaactggatgctcctgtattgggtgcatatatatttaggatagttagctcttcttgttgaattgatccctttaccattatgtaatggccttctttgtctcttttgatctttgttggtttaaagtctgttttatcagagagtaggattgcaacccctgcctttttttgttttccattggcttggtagatcttcctccatccttttattttgagcctatgtgtgtctctgcatgtgagatgggtttcctgaatacctcacactgatgggtcttgactctttatccaatttgccagtctgtgtcttttcattggagcatttagtccatttacatttaaagttaatattgttatgtgtgaatttgatcctgtcattatgatgttggctggttattttgctcgttagttgatgcagtttcttcctagtctcgatggtctttacaatttggcatgattttgcagtggctggtactggttgttcctttccatgtttagtgcttccttcaggagctcttttagggcaggcctggtggtgacaaaatctctcagcatttgcttgtctgtaaagtattttatttctccttcgcttatgaagcttagtttggctggatatgaaattctgggttgaaaattcttttaagaatgttgaatattggcccccactctcttctggcttgtagggtttctgccgagagatccgctgttagtctgatgggcttccctttgagggtaacccgacctttctctctggctgcccttaacatttttttcttcatttcaactttggtgactctgacaattatgtgtcttggagttgctcttctcgaggagtatctttgtggcgttctctgtatttcctgaatgtgaacgttggcctgccttgctagattggggaagttctcctggataatatcctgcagagtgttttccaacttggttccattctccccgtcactttcaggtacaccaatcagacgtagatttggtcttttcacatagtcccatatttcttggaggctttgctcgtttctttttattcttttttctctaaacttcccttctcgcttcatttcattcatttcatcttccatcgctgataccctttcttccagttgatcacatcggctcctgaggcttctgcattcttcacgtagttctcgagccttggttttcagctccatcagctcctttaagcacttctctgtattggttattctagttatacattcttctaaattttttttcaaagttttcaacttctttgcctttggtttgaatgtcctcccgtagctcagagtaatttgatcgtctgaagccttcttctctcagcttgtcaaagtcattctccatccagctttgttccgttgctggtgaggaactgcgttcctttggaggaggagaggcgctctgctttttagagtttccagtttttctgttctgttttttccccatctttgtggttttatctacttttggtctttgatgatggtgatgtacagatgggtttttggtgtggatgtcctttctgtttgttagtcttccttctaacagacaggaccctcagctgcaggtctgttggaataccctgccgtgtgaggtgtcagtctgcccctgctggggggtgcctcccagttaggctgctcgggggtcaggggtcagggacccacttgaggaggcagtctgcccgttctcagatctccagctgcatgctgggagaaccactgctctcttcaaagctgtcagacagggacatttaagtctgcagaggttactgctgtctttttgtttgtctgtgccctgcccccagaggtggggcctacagaggcaggcaggcctccttgagctgtggtgggctccacccagttcgagcttcccggctgctttgtttacctaatcaaggctgggcaatggcaggcgcccctcccctggcctccctgccgccttgcagtttgatctcagactgctgtgctagcaatcagcgagactctgtgggcataggaccctccgagccaggtgcgggatataatctcgtggtgcgccattttttaagcccgtcagaaaagcgcagtattcgggtgggagtgacccaattttccaggtgccgtccatcacccctttctttgactcggaaagggaactccctgaccccttgcgcttcccaagtgaggcaatgcctcgccctgcttcggcttgcgcacggtgcgcgcacccactgacctgtgcccactgtctggcactccctactgagatgaacccggtacctcagatggaaatgcagaaatcaccgtcttctgcgtcgctcacgctgggagctgtagaccggagctgttcctattctgccatcttggctcctccccaatgtattgtattctaaaagattgccaagagtagattttaagtgttctcacctcaaaaaatggtaaattgtgaagtaacacatatgttaattagcctgagttagccattccactatgtgtgtgtgtgtatatatatataaatgtatacatatatatatatagaaagatatatatgtttcaagacattatctcgtacgtaatatatataattttaattgtcaattaaaaagtaaataattcaaagaaaattatctatttataaaaaacctacaactaacatcatacttaatggtgaaaaagttgaagctttcccactaagattgtgaacaagggaagatgtcccctctcacaactaatttttgtatcatactggaagtatgcaatactaatgcaatacaactagaaaaaggaatttctctcttcccatgaatcttgggaagagagaaataaaattatctttgtttgcagatgatatgattgtccatgtagaaaatctggaagaattgaccaaaaaactcctggaactaagtgattatagcagggttgcaaaatacaaggttaatacacaaaactcgattgcttttctatatgccagcaataaacaaatgtaatttgaaattggaaacacaaatatcatttgcattagcaccactcaaaattaaatatttaggtataaatggaacaaaacatatacaagacctttataagaaaaactgtaaaactttgatgaaataagtaatacagggacagatatttcatgttcatagatagactcaaaattgtcaggatgtcagttcttcgcaacttcatctatagatataatccaatcccaatgaaaataccagcaagttattttatgattctgacaaagtgattctaaagtttgtatggagaggcaaaagactcataatagctaacacagttttaaaggagaagcacaaagttggaggactgacactacctaactttaagacttgctacaaaaccacagtaatcaagacagtgtagtattgataaaaggacagacaaatagatcaatgaaaaagagtagagagcccagtaatgaacctacaaaaaatatagtcaactgatctttgacaaaggagtaaaagcaatacagtgaagcaaaaataatcttttcaataaatggtgctaacacgactgaacatccacatgcaaaagcaaaaagcaaagaagaatctagacacaaactgctatggtttgaatgtgtttcccagaattcatgtgttgcaaacataactcccaatgtgacagggttggaaggtattgaggtcaggagtgttctatcctgataaataaattaatgccattataaaatggggcttgccagagagggtttgctctcttgcactctctgcctttctactatgtgatgctttccaccatttgatgatacagcaagaaggccctcctgagatgatggtatgttgatctttgactttccagttaagaactgtgataaataaatttcttttttttttttgataaattacccagcctcaggtattctgtcacatcagcataaaacacactaagacacaggccttataccctttacaaaattaactcaaaatggatcacagacctaaatttaaaacaaaaatctataaaattcctagaagattacatagaagaaaaatctagatgaccttagatttggtgatgactttttaaatataatatcaaaggcacaatatatgaaataataaattgataagttggatttcattaaaattaaaaatttatgctctaccaaagacactatcaagagactaaaaagacaagccacagactggaagaaaatatttgcaaagaacatctgataaagcactgttatccaaaatatacaaagaatgcttaaaactcaacaataagaaaactaacaacctaatttaaaaatgaaccaaaaactttaccagtcactccagctaggaagatatacaaatggcaaataggcatatgaaaagatattccatatcatgtcatcagagaaatccaaattgaaacaatgagataccaaatagatcaataggcaatacacatctattaaaatggccaaaatccataacactaacaacaccaaaagctggtgagaatggagcagcaggaactctcatttattgctagtaggcatgaaaactggtatagccattttggaagacagtttaccaatttattacaaaattgaaactactcttaccatatgatccatgaattgcactccttggtatttactcaaaaaaattacaaacacattcacacaaaaacttatagcacagatacttatagcagctttattcataattgccaaaacttggaagccagcaagatgtccttcagtaggtgactgaataaataaactgtggtatatgcagacaagaaaacttgagtgctgcaaggaaattagctatcaatcggtgaaaagacatgaaggaaacatgaatgcatattactgagtgaaaggaaccaattgtattatcttcttctcacactgctataaaaagctggcagagaatggataacttataaagaaaagaggttcaattgactcatagttccagatgccatacagaaggcatggctggtgaggctgggaggcctcaggaaacttacagtcgtggcagaagggcgaaggggaagcaagcatattttcacatggtggcaagagagggagtgaagggggaagtgctgcacacttttcagcaaccagatcttatgagaactcactcattatcatgagaacagcaagcgggatactcacccccatgatctagtcacctcctaccaggtccctctaccagtactggagattacaattcaatatgagatttgggcgggggacacagatccaaaccatatcaaataatatgcttggctctgtgtcccccacccaaatctcatgttgaattgtaatcaacatttggctcataatatggtttggctctgtgtctctcatccaaatctcatgttgaattgtaatcccataattcccatgtgttgtgggagagacccagtgggagataattgaatcatgggggtggtttcccccatactgttctcgtgatagtgaataagtctcacgagatttgatggttggataaggggaaatctgtttcacttggttctcattctctctcttgcggccaccatgtgagacttgcctttcaccttccaccatgattgtgaggcctctccccagccatgtggaactgtaagtccaataaacctctttcttttgtaaattgcccagtcctgggtatgtctttatcagcagcttgaaaatggactaataatacattattccacttctggcccctcctgaatcacatgtccttctcatatttcaaaaaaccaatcatgccttcccaacagtccccaaaagtcttaactcactccagcattaactcaaaagtccaactccaaagcctcatgtgagacaaggcaagtcccttccacctatgagcttgtaaaatgaaaaacaagttagttacttccgagatataatggggttacaggcattgggtaaatgctcctattccgaaagggagaaattggcccaaacaaagggactgtaggccccatgcaagtctgaaccccagcagggcagttatttaatcttaaagaccccaaataatctttttgactccatgtctcatattcagggtatgctgatgcagggggtgtgctcctacggccttgggcactccacctctgttgctctgcagggtacagcccccatggctgctttcactggctggcgtccagtgcctgtggcttttccatgtgcacagtgcaagctgtcggtagatttaccattctggagtctgaaagacagtggctgatatggtttggctccgtgtccccaccaaatctcatctcagattgtaatccccatgttttgagggagggacctgttgggaggtaactggatcatagggacagcttctcccatgctgttctcataatagtgagggaattctcatgagatctgatggtttaaaagtggcagcatcccccctgcactctctctctcctgctgccatttaagatgtgccttgcttccccctttgccttccatcatgattgtaagtttcctgaggcccctgcccccaccagccatgcagaactgtaagtcaattaaacctctttcctttataaattacccagcctcaggtactatctttatgacattgtgaaaatggactaatacagtagccctcttctcacagccccactaggcagtgccccagtgaggactatggggactctaaccccacatttcccctccacactgccctactagaggttctccatgaggcctctgcccctgcagcagacttcttcctggatattcaggcatttccatacatcctccaaaatctaggcaaaggctcccaagcctcaattactactgtctgcatacctacaggcctaataccatgtagaagccaccaaggcttggggctttcaccctctgaagcaatggcctgagctgtaccttgtcctctttcagccacgactggagctagagcagctgggatgcagggcacaatgtccaggatgcgtgcacagagcagtggaggccataggcctggcccatgaatccatttttccctgctaggccttcaggcttgtgataggaggggctgccatgaaggtctctgaaatgccctggagacatcttccccattgtctgggctattaacattaggtttctctttacgtatgcaaatttttgcagccttgaattcctccccagaaaatgggtttttcttttctacctcatggtcaggctgcaactattttaaacttttatgctctgcttctcttttaaatataagttccagtttcaggtaatttctttctttatgcaaatgagcataggcttttacaaacagccaaaccacatcttgaacactttgctgcttagacattgctttcaccggataccctaaatcatctctctcaagttcaaaattccacagatttctagagcaggggcacaatgccatcagtctttttgctaaagcatagccagagtgacttttactcaaataagtactcaaatactcagagtcccaaataagttcctcgtctctacctaagacctccttatctctacctaagacgtcctcaacctagtcttcactgtctgtatcactatcagtattttggtcacagccattcaacaagtctgtatgaagttccagactttcccatatcttcctctttttctgagccctccaaactgtttcaacctctgcccattacccagttccaaagttgcttccacatttttaggtatctttatagcaataccccacgctcagtaccaattttctgtattagtccattctcatactgctataaagaactacctgagactcagtaacatatcaagaaaagaggtttgattaactcacagttccacaggccatccaggaggcatggctgggagtcctcaggaaacttacaatcatgatggtagggtgaagaggaagtaagcacatcttcacatggtggcaggagagagtgcgaagaagaaagtgctacaggcttttaaaccaccagatctcatgagaactaactcactatcacaagaacagcatgggggaagtctgcccccaagatccaatcacctcccaccaggtccctcccctaacactggagattacaattcaacataagatttgggtagggacacagagccaaaccatatcagcaacatactgtatgattccatctacataacattttgaagaaggcaaaactatggagacagtgaaaaaaatcagtggttgccagggttaggggagagaaagggatgaagaggtggagcacagagggatttggggcagagaaactactctgtatggtactataatagtagatacatgtcattattcacttgtctaaacgcatagaatgtacaacaccaagagtgaagcctaatgtaaactgtggacattggatgataatgatgtgtctatgtaggttcatcaattgtaacaaaaataccactcttgttggggatgttgacaatgggggaggttacgcatgtgtggtagaagaaagtacatgggaaattttgtaccaacttccattttgctgtgagcctaaaacttctctaatagagtttatataaaattttaaaatatcatacagtaaaaaataaaagaaactaagtacttccataattctcactgttcaattataggatgttttctggtcacatgacttgatacttgagtaagtcttattagacattcatgatgtctaaagaaatcctctgttgggcattttgtttttaattcttaggtcagatgttgccattttgtataatgatcgctctgtccttgagaatcaccacgtgagtgcagcttatcgacttatgcaagaagaagaaatgaatatcttgataaatttatccaaagatgactggaggtgagtttcagagaaaacctagaggaaatttaatttcaggaaaggaataaattatgcgatttaaagtcaagaaaaaagatgaaagtcgatgcattccccaaattacaaacttaattactgtcgactggatgactctgagaaggattagtacttagggactttgttcagagccagactgtgttaaagggacctgaagtatttccaggtcaactcaacatccatatgtctgaataagaccacacacaacacaacaaataattttatatacataattacacactctctggaatggagctctgctcaatttttatcaatatggggtgttacataaattcaaaattttggcattatattcattctttcatatattttttttaaaagatgtggagttaaggtttttttaaaaacaaaaagttaaacgtgggaaaaaaattccaatatactaaaatgacccaagtgcagaggaaatcttacatgtttctccaaagcatctgtttgcttgaaaaaaattacatggtatattgatacttgttgctatgtagggaaaaataacaagatgtacccccatccctcttataacctttcttctctttttcttgatcctttggtcattatcatctccttcaattgacaatagggttgctggacttcacaaataaaagtaaaggacaatcaattaaatatgaacttcattaatcatagaatcttcttagtatatgtccctaatattctatgggactctcttatagtaagaacagaaaaaggcctgtatttatctttaacaacaatcttattaaaagtcatttaattgactagaaaaggtttccaattgaatgtaaatatcaaaggtttttgctttcatttttgtttttttaaatcaaggtaaaaagaaatatccaaaaggaaagtgacaataaaaacattaaaaaacgtaaaagataaaaatcagagtttaaaataagcctaaatctcctgtgaacactttttcaaattttcaaagtttcctggttcttcaaggccatatctagagatatgggctcatttttgcaactctagaaaatgctgtcaggtagagggaaggtggaactttcttttggagacacagttcaggcctttcattttacagttgacccttgaacaatacaggggttggggcacccccattcaactgaaaacccatgtataccttttgacacttcaaaaacttaactactaatagcccactctggataggaagccttaccaataatataaaagttgataaatacataatttgtatgttatttgtattacatacaatattactacaataaagtaactagagagaagaaaatgttattaagaaaatcataaagaatagaaaatatatttactgtttattaagtggaagtgggtcatcaaaaaggccttcatcctctgtctttatgtggagtgggctgaggaggagaatggaagaggagggattggttttgcttctcaggtgtgacagaggggaaaaaatatgtgtacgagtggtcccacacagttcaaacttatgttgttcaagggttaactgtattctgcaggaaatagtagcccaagaggatttacagtctagaaatgccaggatctaactgtgaaataattttaaagagaccactgttgggctatgtagcgattagatgggcaaaggtaggaacaagcagacaagttctgagatatttcctaaagcctaagagagattatttacatctagggtattagtttattttcttaatcagtgattaccattcccatagataatttttataatattaatttgttgttattcaaagaaataaacattttttcctcaaagttcactttgttgctatttcagtgtgattttatttcctattatattttgttatttaccattttaaatattttattctaatagtttattgctgtaattgtctaagtttctgtttggtaacttcagagtcattttaattgaatgtttttaaagaattgttttaacaaatagtgtacatattatatacattttagaatttaatagattcaacactttccaaaaatctataaaatacctatttgatgctatacgtttgataacattttactaagaattaaaatatggatatcttcttaaagactgatgttttctgtttacatatctgtttatttcttaaagtacttttagtaaaaataaatgcattaatttaaaagttttcacaagaaaattttataaattaagtaatgttttcttattttgcctaattattgacatattattagttggttattgataacatctagcatttactgatcatttatatgcaaagcacaatatacttattagattctattgatttccttaaactctaatctcattttccttagcaaacataaatgttcttattcagttgcttttcaaatatgggtcttgtcatattttcagcgaaaaaaatgtaattgagaataattttattaatagcttcctttcccttactacttgaataaaagtaagtaagcagagtattgattctcatggcttctatctaaaaattcaatagaaatgttgagtgctcatgattttcagcaagaaccatcaatatgtagttttgttttgtttttttttcagacggagtcttgctctgtagcccaggctggagtgcagtggtgcaatctcggctcactgcaagctctgtctcctgagttcatgacattctcctgcctcagcctcccgagtagctgggactacaggtgcccgccaccagggctggctaatttttttttttgtatttttagtagagacggggtttcaccgtgttagccaggatggtctcgatctcctgacctcgtgatccacccgcctcggcctcccaaagtgctgggattacaggcgtgagccaccatgcccagccaatatatagtttttttaaaaaggcaattaaatagattatatcatctttaagtaaagtatctttgtgcaagatcgtaattcaagtttccttcacacttttggttcagcttatcctactggccacaccacacaatgaaaatgaaatatgttttccagtacaagtgacttttttaacttatctgtatagagcaaacaaggaattgtggaacatgcaaggctttgctggggtgccttattttctactaagtgtgaggctttgtgacatggttattgtatttacagtgccttggttaaaatagtcagtaataccaatggctctctttatgttagggagggtcagatcccaaaagcttaaacagaaaatcactactcactttagcatcttggtttctctggggttcttatgatggaagcttggcacagaggagtggtccatgtgtctgctttggaagtgggacctcttgcgttgaatcttatctgagccatgtaccagctgtgtgactgggtgactcagtctcctttggggggaaatattaatgctccctcaggattgttaggaggattaaatgtctttgtatacatacaaagcaactagttgctaaagtattttattatcggtattatatgaagacatttaatccttacagttcagtgccttgctgaataaatactgaatgaatagcactggttttattaatagtagtcgttttgattaaaaatgcaaaatgaagaagaatcagatagggtcttgaaatctcatgctcttcttatctctgtctcttctctgagacatcaaaccttttagtttggttgacatgtggatttagaatagtctcaggccccactggactactttttttcctcaaagcattgaaatactatataatactgtatttggaatagtttttctttaaaatggctaaagttcctttcagattaaaaataataatatttaggaattatgactgcagaagagttgtgggagtgagaagggaaagcactagctcttcagggaggtgtgaacatcgttgccattctcgctgctggcaacttcttagatccatgacagttaaaaggtaaaataatatcaaacttgtgtgtggactttcacatttaaaaagtagcatcttttgtgttcatatccattaagaactataaaacatggtgagtgattatttattgaagtgttccacttcagaacaataaatggctgaatgaacctttctccttttggtgactctgcagggatcttcggaacctagtgattgaaatggttttatctacagacatgtcaggtcacttccagcaaattaaaaatataagaaacagtttgcagcagcctgaagggtaggttttgtgttttttttgttgtttttttttttttgtcatgttaaagttccaggggcttggcctcagaaaagactgtaattgtttcctttgttttgaataatataagcatgtccttggtttgacaggattgacagagccaaaaccatgtccctgattctccacgcagcagacatcagccacccagccaaatcctggaagctgcattatcggtggaccatggccctaatggaggagtttttcctgcaggtgcctctttcacactctgtgcaaatgtttttggaaatagtgactgtgcatattagcgtacaccttttctgtatggaatccagggcttgtgacttactattatcaactggccacctacacattcttgggggtttcagcaaaatttattagtctatcagaaaggtgtattaagtctatgtagtgtgatacatgttttaaagagattcaaattttggatctgagatgctactgtcaggaaagaaaaataaaagcagctaagaattgttatctgctgttaagacgtaagtgccacagcagagacagcaaatagctttcataatagaaagagtagataaggatatataacagttctgcataaatcttgttggccagaattttaatggaggccaagaaatattgctttagctgggtggacacatgcctaactgaaataggcaacaacaacaacaacaaaaatctaatgttacgtcagaaacaagcccggataaggattgtgactggcgttctctgccacaagtacacatcttttctttatacatgtccctgttttgcaacccccacaatccaagctggagtgctacaatacaaatgtgatgctaaccactcagagttagcatcaaattgcacaaattaagggctcagtcttccacaagattggctctacttcagatgccagctgcaaatggggctgtgggacaccagcacttctgaccagccagttacaagttcagtggttcccacaaccctctctaggtttgataacttgctagaatgactcacaaaacttcaaaagtgctatccttacaattacaattttattataaagaatacaatccaggcagagccaaatgaaaaggcccataaggaaaggtctgggagggtcttggatgcagagcttccttgctatttccagtggagttagcgagtaccaccatcctgccttgtcaatgttttcaccatccaggaagctctactgagctttcctgtccagagtatttatcaaggtttcattacataggcatggttgattaaaccattggacatgcgattgaactcagtctccagcctcacttccttcccagatatcccctggctggcttaaagttccaactttctaatcatgtggttggtttctggtgaccaggccctatgctgaaactatctaggggataggcccagagttgcctcattagcctagagtctcctatcactcatgaaattccacaggtttttgaagctctgctaggaactgggaatgaatatcagataattttgttttattatatcacagtcccacttagagaagttcttttatttctgtattttcagattatttcatttctcagtattgttctttattttgaaagtttgttcattaattttatacctgttctgaagatataaacaccaaatatattactatgtttggatgactcacgtttctgtctcccattgttgatggacataatgtgtggtattttgaaagtttgttcattaattttatacctgttctgaagatataaacaccaaatatattactatgtttggatgactcacgtttctgtctcccattgttgatggacataatgtgtggtttcatttttatattgcaatttatattcctagagaaagttactgagtagcatcttactaaattcaaatattttggtcctaaaaatagtattgaaaaatattttaataatttgctttgtgctaaaaaaatacactaaatgtaaaaacctaccaaattctaaaggtcaactgcttattatggtcaattaaaaattataatgatatactcaatcaatcaaccagagatctttctgtatagccctgtgacattagagatgcaaaaacagaaaaataaagagatacaaagatttttcaggttaagaagaaatttttaaatatcttaagttgaatgattttgaaaacataatatttgaaaattgttggatgcaactgaagcagtgcttaggggaaattttatagcttcacatacttacattagaaaaaaaatgtgtaataaagtaagttatatctgtttcaccttaagaagctagaaattaagaaaattgaatcaaaataagttgatggaaggatataataaatataaaagccaaaaacagtgaaacagaacaaagacaaacaataacaaaagttaatgaagataacagttggctctccgaaaaagtaatgaaattacttgcaggatcaaaaagaggaaaaaactataaatgaaagagagaatatcattatagagcctgtattcatcaaaagggtgaggaatattatgcacaatttatgccaataaaattgaaaacttagatgaaattgtcaaaatttttgacagatataaattaccaaaacagacacaagaaaaaatcatgtagtctgaatattcatatatctgtttcaaaagttgaatttgtactttaactcttcttatgaagaaaactctaggcttagatgactttaattcttatttccgatttcaattctcaatattcaattcaattgagagatggagaattttctcaaacatttcaggaagaaataatgccagttttacacaaattcttttatgacatagaggaagaggaaaatttgacagcataattctcgacattacctgacaaagacttttcaagtaaagaaaattacacatccacatctgccataaaactgaaagagaaatttttttttaatttttaaaatttttagcaaatcaaatccagcaatttagtaagatagtgcatatcatatcataacttgagtcagtttaatattaaaaaattaaggtaattcaccatattaaaggaaataaaggaaaaaatatattaattatcaaccctatagatatgcaaaatgcatttgacaatattcgacagacattaattataaaaactgttagtaaactagaagtagaagacctttctcaacctgatcaaaggtctatagcgaatgtgatacttcacaatgaaatactgaacatttttattctaagatcattataggtactcttaccacttctattcaacattgcatttgaagttctagccagtgtaggaaggtaataaaaaacaaagtatagtttgaataaaaataaataaaactgttatttgcagaaacatgagcatctgcatagaaaacctcaagagatctacaaaaggctacttactagaattaataaatgagtttattagttgtagaatcaattgtgtttctgtatgcaagctgcaaacaatttgaaaataaaaattgaaaacagtatgctttataacagcataaaataataaaattttgggggaaacctttaattaaatgtatatgaaacctccacactgcaaaccacaaaacatttttgagagaaattttaagacctatataaatggagagatatgttaatgactgaaagactcaatatttctaagatgtcaattcttacaaatttttaataaatttagcataatctttatcagaaattgtaacaggcttatttgtagaagttgaaaggctgattctaaaatctgtatagaaatataagagtctaaggcagctaaaacaattttgaaaaagattaaagaagttggaggacttacacttcctccttatgtgagttagtataaagctacagtgatcaaggcactgtgttattggcatagggcatagggctaggcaaatagatcattaaaatagaggagtgatttcagaaacaggctcatatatataatgtcatgtgatctttacaaaggcaccaaaacaactacatggggaaaggaaagtctttccacaaaaggaaatggaacagcaattagtgaatgtatgggaagaaaaggaaacttgtcccctacctacaccttaacacaaaaactaattcaaaattaaggagtttaagacaaaacctaaaactataaagatcttagaggaaaacgcaagagaagatctctctaatctcgggggtaggtaaatatttcttagagaagacacataaagcattacccataaaagaaaaaaaaaatgaagtggaaaaaagcaaaactcaaaacttctgatcttccaaaggcactactaagaaaatgcaaaccatagactgagagaaaatatttgtactacaaatatctgtccaaggacttgtgtccaattgcatatagaactccaacaaatcaatagtaaaaagaaaatcaggccaatttgaatggatattttataaaaggaaatgtacaagtaggtaatacttacatacaagtatgttcattttctttacttatcaaagaattataaattaaaccataatgaaatatcatatagccccatgagaatgactaaaattaaaataattgaaaatataaggtgttaccaaaaatgaggaacaactggaggtatcatacatacatcacaggtgggaggataaattattacaatcactctggaaaactactggatatcatctactgaagttaatatgaagggatagttaatatcccttaggacccagcacttttacccctagataaatgagtatttatgcccaccaaatgtcttatataggagtagtcattatactactacttaaaaaaactcaatgctagaaacagtccaaatattcatcaaaaatagaaatggataaaaaataaatcatggtacagtcatacaatggaatatccagcaacaatgaaaaatagactaatgatacaaatgacaataaatctcaaaataatactataaaccaatttatatgaagttcaaaaattggcaaaattaatatatggtgatagaaatcagaacagtaggtgcctatatgggttaggattccttggacgaggttaaggcaactttctgggggtaatggaaatgctctatatcttaatcaagtattatacaagtgttcctgtttatacccttcagatttgcccataaatttccctttaattttttttaaaaagagtatatcataatgaaggtagctcatctctgacttaaagaagaccctaaaaaaattactgtgggaaaaaacaaaactaaaatcccagagactcctgaagattaccattagatctccaaataatatcacgatttgtattatccttttgttttactgatttcaaaacagacaaagaatacctgacaggatcatgagattagtaaattcaatgaaattgagttcagatctgttgaaagttcaccaatttctggatttttaaaagtaaacgattttcaaatccccttcagaaacatatgcagcaaaacagaaaaatgtggagctaaaggtcaaaataattaagtttatactgccaacaaatatgtctttcaagcaaaacaagtttttctttgtgaaacttaaactgaaatatgatattaattccaacaggtaaaatgttttcttgcattgaactaactaaataaatcccatattactctcacttattcttagtcatactgcataatgtacacctttggaggtaaataagcaatgaacctgaaactccttgctgtatgcatttctctgatttgacataagatattgaactgtgtctatgtatctatgcatatgtcctagaaattagcaggactgcagtggttcttgtatgttttatttttgttcatcctcacatagccatctgtaaaactgtcactttgtcagacccacagtactgataccattctgctctgcatttagccaaggtgactgggtttttcatctcggacagtgaaaacagcacttttacaaagcaatttgcaaatatatgtcttcattcctttggaaggtactaagaagctaaatactgtgtcttaaattccactggctgtgctagagattttgaggtaaatcaaaagaggtctgtccagagctcatcatggtgctcagctacagtttaaatgtaaacatcttgtgtttcttgttaaagactgtattttatgtacattggtcaaacataagaagcctaataatgcaaattagagagataattggacttgacttcagaaaactcaagggtaggccctagcttctcattcttccaggagtgggagacatgagtcttccccttcctgtctctatacaccttcttaccttttcccatcctgcctacttcccaggatgattgtgaggagcaaagtgatagaacaaaagtaagagggcttcaaatgtgaggaattggtggtatttgttatcctgctagtctattttaagctttatactttccgaggcaaagtatcagtatactacaccattgcttatgaagtattttgttgtttgatagttacttaacgctgaatttctaaagatctgggcacaatttaaaagcacatttccaacacaatcatcaagtttaaaaagtaaccaattaagagaagtattttcctttttgatctgcagaatgtaatgctagacttgcaattccttctattggttttgaacaaaattagagcctggatagaaattcaaaaaatcagaaaagtagcaaaggaaagagctgatttttagaatttttcaagagcaacctttcaagaaaggttcgtgtgtgtgtgtgtgtgtgtgtgtgtgtgtgtgtgtgaatatttcagaaaaatgcagagaaattttgtgatgtgttaacttctaaatcattttcttattagtttgtctaccgaactcattttatttaacaaatggactcagacactaagaattttttaaatgctgtatatttctggaagacaagctatttgtattattcttaaaaatcccatcaacgttatcccattctttagtgctactactttagtttcaccctctaaagccgtgagaaactagccagagatcagaattgtatccagaatttgcagtcttgagaaacgctgatttctgactcttgaataagctgctaatggtaaaaggcagtagagcgagttctcatttccaaggcattttcgcaacaagcctgtgatatttattaatacaattaatgtctcctcgagttttcatgcagatcaacacacctactgacagtaatgggtagatttggaggatgctgctttattttaactatgactgataggagagagagatcaatatcagccaaaaaagtaatcattggtaaaagaagacaggtttttgctttttattctcctcttgaacacacatgtcaggttggcaagataagaagtcaatgcagttaatttttttacaaaaatagttacttccatcaaaatgtgtttgtattttaaactaaataacaataactacgtggatttttcccttcttcaactagctgttttgtgacacatgaaaaaaatctatatttgaacaaaatctgcatttattaatcattattaccttgttagccaagaagaaaaaaataattagaaatgcaagttatttggaaggaaaggtcaaaatgtttactttaccttgaattgtatacagtcaggcctctctatttttaaatgttgctagaagtagtataaagtgtgttatttcaaaataaatttcattgtccatagtaatacaaatgtacttagtccattctcagccaaggatctggcttttcaaaaaaatcataaacataacccctaaaattgcagaaatgaaaagaactgtagctatgagccaagataactttaaatgtaaaaaagtaaagcttttagtttcaagagccataaaagtactataaacaccgattacaccaggggttctaatattccataaaatatttataacattcacagaaatatagttatatcagaccaatattttactgaaagtgaatgtattagttgctgtaattattaaatgcttaaatgtttttcgtggcgttcttcgaatttagaagggcccatttgtagaagtaaagaagggtcattagagggcctaaattccttaaattttccaaataaggctagattagtgcatgctcctctcctctcccaatcaaattctctatagaaccagtggtctctcagatttcaccctcagccttagaatgtctccaaaggctgtccttaggaggagtgtctcctaagcccctgtccctgtggtcaggggattcctgcatatttgttatcgacgttgcttctttctccaaaattgaagtttcaatgaagagttttctcaagatttctatactttaccctgtcttatcttcttcattaaaacaaaacaaaacaaaactggccaggcgcggtggctcacgcctgtaataccaacactttgggaggctggagcagacggatcacaaggtcaggagttcgagaccaacctggccaatatggtgaaaccctgtctctactaaaaatacaaaaattagctgggcatggtggcaggtgcctgtagtcccatctactcgggaggctgaggcaggagaatcgcttgaacccaggaggcggaggttgcagtgagccgataccatgctactgcactccagcctgggcgacagagtgagactcctctcaagaaaaaaagaaaaacaaaaacaaagcaaaactatagaaatttttttggtttcagagaaatgcaaaaaacaaacaacaacaacaaaaaggtgctgttaggtcaatggatttcataccttattaatggctgtcagagcactttacaatggtaggaaggcatttaaaaacaattactagttctcttacagactttcagagaagaaacctgaaggatctccagggaattgtaaagacaggtataagctgtggggcctgagaacctcaggctgccttgagtttccatttctatgggactagtttttctacttactcctcatttttaaaagtgtattttggccccctgaaggcagcatcctcaaatgacagcgaaacctctaagaaaaatataaattcttctttcacaatgcttattgcgatgacctctgcttttaccttgatggaaaataaatattccttatcctgggacagaatgaggaaattataaaggtggccaaatctatactcagagattctaacattctctttatacaaagttctagttccttcatagtttacctacagggccccctactaatcttgcactcatggcctttattcaccctaaagagtaaataatactttgaaatatttataaataaattaaataattaatgtactttagcattcaatgtgctttgacagtgaaaatttaatattctaaattaattgtgaggtacaggaagcaaatagaatataaaatctcttgctccatctgtaggaaggtcatccctgcatatatctgtcaaatgcctaagccctataggaaatatgttgccattcaacattctataaaatttagctcaagaaagtggctgggcacagtggctcacgccagtaatcctagcactctgggaggctgaggcagagggactacctgaggtcaggagttcgagaccaccttggccaacatggtgaaaccccatctctactaaaaatataaaaaattagctcagcatggtggcaggcgcctgaaatcccagctacttgggaggctaaggcaggagaattgcttgaacctgggaggcagaggttacagtgaaccaagattgcgccattgcactccagcctgggcaacaagagcgaaactgtctcaaaaaaaataaaaaaataaaaaaaaaaagaaagtaaatcatcataatgcctttctcaggccaaagttatcattttggggccaaagagcttgtaccacagagtataaaaatacatctattacatttgtgtccttaaataccagatagcagcatcttgacaaaaaaaaaaaaaaagttaaatatagcttagcagcatttaatagatacaatcttataatatttagggtggtgcaaaaataattgtggtttttgcaattttaattgcaaaagatacagctgactgtatcttctgattctaagactactgacaattttaattgcaaaaaccacaattacttttgcaccaacctaacaaatacacaaaagaataaaacgcagttgtatcagcatatgttaaataagcatctctaatatcaggttcccaaaagcctatcggtagctttatttctattttatttcatcaatagtaatattagtatttatattttaacataaatgattgatgacattattcttgcaccttatcctcaacatgttagaaaccaaatcaataatagtattcaaatctttcccccacccagatcatctggtttccattagtggcatcaacagactcctcctttccattcgcactggaagccaaggagtcatcctcaactcaccccaagtcatctctcatactgcagacaaactaatctttcaaaagtggaaatcctttcttgtcaattccttgctaggaaaaaagagggagaaaaagatgatccctctctattacatgctaaattaagcactacttcaatttcctgtgttttaaaactattcaatgtatgcattagacatcataaatacctttaatttgtacatattgcattcatgttgttgctattctaaattatggatttttttttcttttttttggggggatggagtcttgctctgtcacccaggctggagtgcagtggtgcaatctcggctcactgcaacctctacctcttgggttcaagtgattcccctgcctcagcctcctgagtagctgggactgcaggcacatgccaccacacctaggtaatttttgtatttatagtagagacggtgtttcaccatgttggccaggatggtctcaatctcctgacttcgtgatccatctgcctcagcttcccaaagtgctgggattacatgtgtgagccaccgtgcctgacctaaattatgtttcttattagctaaacttaatgactactaagtgtcaggcactgtctttatgcttcatataaataatcttagataacttcaggatagatactattacatctattatattttatccctaaaacaagtaaatcaagatcacaaaattaggtaacagataaggagaattcatttcagcaaaggctgtgctgtgtctgaagtaacagcaataacccctagacagcagcgattcagctgactgtatcttctgactctaagactagtggcattaataattcccttccatctgtcctttaagctgagtataaatcacaatttcaaatggaaatagtgttattattatccagaggaattaggggagttactggcagaggtcacagaaattcttattccttgttttctctgagttatgacatagtgaaatgttcctgtttgtaactattttcctacttctttgatggccatatctagattttcctcaacaattctgattctagactttctgtctataactctcataatcaaaggcatggtttaggggaactgctctagaagatattctcaaacagttgtaaagctacatgttgacatgatgttgtaaagattagcatagaaagatgttaatggaaacagagtgaaaggaaaccgtggagtccttacgtattttatcctaagttatggacttaatgatgcaaggctggtgttgctcatgaaggtatacagccaataaattaggagaaaatagaacctaaaatgttctttcaaatggccaggaaattgaaatgaacaagaacaaggaagtatcctctcctctttctttcataagcacatcccctttaatgcaaaggaaagaaccaaagtttaataaaccttgtgatattagaggtttgaccagaacagcaacctttgttttagaagatgaaaatttaattacttctcatgaagtaaaaccccaatataaatggaattctttaacatatgtgctcaattaatctattttagatgagatcaaataataaaaaaattgatatttcaattttctctgagaagaaaacattaaaataagtttatgcacactgaatgtaagaatgttgaagaaattcctcattatatgttgtggaagatttaataaaacttggttaatggatagaaaggtgtttcacatcatatacttttaattttgaaaaacagttccgtcacaaaattttgatagtaaaggtctgttgatatacttggcataaataaattaacttggattgttaattaaatgtcagataacacataagatggctagttattttatggtgactttggaaaattccaaaagcaaatgtttgtttcttaaaagtcaagggattgtaatgccaaagcaaagtctccaggtactgaaaacattcctcatttttctccctgcaaaatgtccccaaatggagaccatccaagaaaaattatataaacttggaccatagcttttggttttataaataagaaaaaagtattgctaattaagaaatgaaagatgtggcttttctaggctttatatcttaggttgctcattattttagcttctccaacccaagtctatattaatgtgcttttctttctccagggagataaagaagctgaattagggcttccattttccccactttgtgatcggaagtcaaccatggtggcccagtcacaaataggtaattctgatgatttgtggtggtggaaagtgagtgtgtgcttgtcagttttcaaatgggtaaacgatgttgttcaaaggggtaacttgcatgaaaacctcactccatattcatgatatatttgatttttaaatggatctatgtggtgctgaataagacttattgaagcattttcacaaaatgaattcaataaagcaacattagtaaatgtaattgttatcgtggttgtaatccttttacaaaatataaaattttcttgtgtgggagaccattttatgttgttttgttgctgattattgttttctgtaatttaattctttagatatataggtcaactcaatgaaaatgttagtgcacttgttctatcactaagtttccatggtatgcttaatatagtagtgcacatttcatttggaaaaatattctgtcatgatgtgaatagattaaccaacaacaggaaatttgcaaaatgataatgctcccaaccacattcattcttatcatctgtatttgtgttggggacttcaagtccagtccattattaaaacatgtgttgcatggctcaaatacttgtaataattattccctaagccagcatttttgttactgaacaatatgatcaataaacacaaggatcacttcttagctgtgtagttatgctccagcaccacccatcacaaagcgttggggaaagctgcctgctctgaccttttccccttcccatccaagtttcaacagctgtttttctagagaccataacacaggtgcctatccttgcttagtaagtgtaaacgtggcaggctaaggacctgatgtggcaagctaagaatggaagtttctgaggcttgttgctgtaatgcaaattgctgccatgttagtagaggtgatgccccagttgacagtctacacatctcaggcatttaagaacatagaactggctgggtgcagtggcttatgcctgtaatcccagcactttgggaggccgaggcaggtagatctcgggtcaggagatcaagaccatcttggctaacacggtgaaacccgtctctactaaaaaatacaaaaaattagccgggcgtggtggcatgcacctgtaatcccagctactcgggaggccgaggcatgagaatcacttgaacccaggaggcagaggttgcagtgagccgagattgcaccactgcactccagcctgggcaacagagtgagactccatctcaaaaaaaaaaaaaaaaaaaaaaaaagaacaaaaaaagaacatagaacttaaaatagtaccctaggtggtcaattaacactgatttaacttgaaggcatccattaaaactactgaagttttattaaattaaaaatgtgccttattatatactataagtaatccagttacttgaaatgtgaattacttttatccaagcatctgatggacaatctttaaatgtgcatatttacaggacattatcacttaaaaagcctacctccagctattctcctatattcaggtggtagtccattgctctcagaagtgtttccaacaacaattcttgacttgaggcacccacagcagtcctgggatctgggatattgccatgtacacagaccttagaataggttgttgtctcctcctctgcctaaacatgggatggaaaatgctcccagaggacaatgcccttttctctgtgtgtcattttctatcttgatgagtactttaaatgtaaaagtcttcattcagtactgacatctcaaagtggtgggattaatgctgtctcccagagatgttacttttctcttcactgatttgacagaacacacacacatgctgtgaactaacactttacatccagagaataataaacaacaatttgaaatattaacacactggcagaaagctctgactgatatagtaagaaacaaaaagtaattgtcttcctgttacctgagaaaaaccttcaattatttaatttctttggagcttagatatgatttcttgttagtaaagaataaaatccaaaatgcacatgatgtgctttcaaaaaagataatgatccctggtgttgagagaggaaactatagtcactctcattggatctaaatgtattgttagcaatcgtatattatataaggctgaatagtaaatagaaaagccaatatacttgagttagcaagcttaaattgtgtcacttccatggcttcaagtattattttatagagcagttaaaccatctctaaagactgttattagattaaaacaatacaaagggtaagcagaaccaatattttagttgattcttgctatcccaggattgtcagaagctcttcattatttctgatttcagaattcaggaaattgtaacacttgaatttatctctctctcttctcattttggcttttgtaggtttcatcgatttcatagtagagccaacattttctcttctgacagactcaacagagaaaattgttattcctcttatagaggaagcctcaaaagccgaaacttcttcctatgtggcaagcaggtatgatattttcttttttgcattatttttcatctttgtggtgtttagtaacactttccttaatgattatatttctcacatctaggcagagaattctcacaagaattattagggagtattgccacctagtggctttatattatattgcatctgcctttgacaactgaagtttaatacacaaaatatgaaatactaagtaaggtgtgtactaaggagaatccagtgtggggagggagagaaaggagatgagcagctgccacgtgctcagaactgggactgagcatctactatcctgcttttctagtcggttttgtaaagtttttcaggttttccttgttcaccccatatcctgatggtgttttttggtttctttggttgttactgttagctcaaccaccattgtggggttacacattgctgatgcactaagacgatcaaatacaaaaggctccatgagtgatgggtcctattccccagactactcccttgcagcagtggacctgaagagtttcaagaacaacctggtggacatcattcagcagaacaaagagaggtggaaagagttagctgcacaaggtagtgttgtttatgaggccttactgccatctctctctgtcttcacttctcctctaagagtttggattacttcttctagatttcttcttctatagaatatgtaagcccttgatggtattgggaatttggctactctttgatcattcatgagaaagttggctcatttattagataaaaagaggttctggtttgtttgtgccacatgggctgcagatctgtgtgtcagtgggtgctggcaaactggatactgaaagatgagataatgaaatggtgacaaaactttgtggtaccatataaactcctgtgctttcgtagaggtgctttccagcctggattttacttggtaagtggcttttgtgttgcattaagtgtgttatcacttcatgtcagagacttgggtgtgttttttttctgtttcactaagttgcttttttgactcagaatttagacaggaattggggaaatcattagtaatcaaccaccacagcaatcgcatgggaaggtagctacagttatttctgacatattagctgcttcaaattaattagtccatttagtaggtttgtgagttagtattcaaacagttattatctttcgtgcaggaattagctttcatatccagatctggcccctgcctcttctcacactcattcccacagctctgtctcccttatacactacactccctgcacaatggcctcttggaagtttcttaaaatactccagggtctttgtagttattttttcagccagaaattttttccttgtgttttttgcagctttaatatactcaggaataaacttacttttcttaaaatggataatataagatcaaaatagagtgttaaatcatatttatagtcagaaagacacaatattgaaacgttttcaattatcccaaatgtcaaccataaatataacatgtttccagtgaaaattccaatacatttttcatggaatttaagaaattgatcctaaaatctatatggtattgcaaatacctaagaatactcaagacactcctgaaggataataaagtgggagcacttgccatatatcaaaatttactcttatactgaagtaataaatttagtgtggctgtgatatagagataataagatgggccttgggaatagaccagagagccaaaaatagcacattaattcctgcagaacttgacagatggcagacacacacattcgtatatgcaatcttttgtatgttctcacatatttacccttatgatattcttcatttcttcttgtgtgtcagagctactatttggtatcatttctcttcacactggagtactttctcaagtattttcttataacacagttatactgacaaacaattagattttctttatctgggaatgtctgtatcttacttttatttatgaataattttacttgatttagaattgttgaatgatttttttttattttagcacttttaatgtgtaattctattgcctctggcttccatagtttctgatagtgttggccaaaaataaattgtattgttgcttccttgtatgtactgagtattatctttttctttctgttttctagactttattttgactttcagcaatttgatgatgatatatctaggtctttttttttttcagtattctacttagtgttcactagcttcttaaatccacaaattaataatttgcttcaaatttagaaagctttctgtcattttgttcaatatttttcttctgcctctttctctctgttctctccttctgaggattgtgttatgcataacttaggattctggaaattgtcctggatgctctggatctctgtcaatttctttaattgttctttctttctttctttctttctttctttctttctttctttctttcttctcttcctttccttccttcttttgttccttccttccttcttcattcatttttgattggctgctttctaatgatttatcttcaagtttactgtttctttctctgccacctcaatcctgctgttgatttcactgaattaactttttatctcagctacttttttcaattttattatttccatttggttcttttttataatgtctatttctctgttgatattttatattttcattcattgttagcatattttcctttaattcttcaagattattttctttaattttaaaaacatatttaaaaaacttgtcttgaattttttgaaatcaattttaaaactgactataaatggcctttctatggctctctaatttctagggtttttctgttaaatcctgctggtttaccctttaccccaacttggaccccaaccctaggctgacaaagcttggggctctcctcatctagtctaagtggattcaccattttatattcaagtaaccagaattatttgctgccttcccattccaagttgattctaccacatccaacaggaaagttggcttttgcttccattcccaggtcagagttggagaggaagatggaggagtgggagtaacttcaggcaagaaggtcacaggttcctgctgtttttacctgaatgtccaacaattttttaagaataaatgtttctcaaattattatgtccctttggttgatttccagagtcattgaatagttgtttttattaatgctgtccagttttacacttgctttttcatgaagagaaaaaactcgacttctttacatcactatagcaggaagtattcctcttcaccataggttttaagagaattaaatgagtttattaatataatttgcttagaagtgtctagagtactaagcgctatatgagttagctgttattactatattatttatgtttctgccatgtgttctagaaataagggttatagggctactatatagaaactaggggtgtccctaatgctgaattctaaatccagcaaaactattcagaaataaagaaaaataaagacattaccagattaagaaaatctaattactatggaaattggggataatttctatatagtaaactggtaaggaaagccttcactgaggaagaaataatttaaataaatacacaatggaggttagaaagagaatgatggagaggtctgggagggtgggtgttaacaaatttttaaaacggattggctaccacattatctaggaggccaagcttgcctgacatgccagaaacaacaagaagggcagtgaagcaggaagaaattggacaagtgggaataatgtaggcaatgtgatgagtggggaatgtggtgcctgacctttggttttggcccgagaaagacaggaaaccaaatgtagagttttgagaaaaaatgttgattgatctgaactgaggtttcaaaaggattactctgctacagaatggaaaatgtgcttttgtttgggtagtaaaaatagaaacaaggagatcagaaggaaggctgttgttcataacccaggagacacatgggagcttagaccaagtagtaatggttgagagggtctataatttctggatatgtaaagattgtggcagtatgtgtgagtagaaggagggtaagcaaaaagagattggattctggatatacagatattttgaaagctgaactgataggatttgttaccagattagatgtaggaaacaaagtgaagagaagaatcaaaaatgatgccaggctttttggttttcttacacattatttgtatataggtaaaattatataatcatttcatggaacaatttggcattctgtaggaaatttaaagatgcatgtgccatacttctcgacaattttgcttctgtatttttaccccagagagacttttgtgcatatgcatcaaagacatgtctaaaatattcacagcagcattgttcatgactgcaaaataaagtgtaaaaaacagtaaaattgatttatatactgtagtatgtacatattatggaacagtataaaactgttaaaatttaactaatcaccacaggaatgaaggacacagtgttgcacaaaataagcaaactgctgggctttagtaggcggttttcccctgacagtgtgaaggagactgagaggtttggactaagcaaaattcaccacaacacagcaaagcggctgtgtccagactgcttctctagattcctcctcactgggcagggcatctctgcaggaaatccagcagctccagtcaggggcttacagacaggactctcaactccctgggacagagcacctgaagggagaggcagctgcagtcgcagggtcagcggatttaatctttcctgtctgctggctctgaagagagcagctgaccctaacaagggggactctcccagcagagtgcaccagttctgctaagggacagactgcctcctcaagcaggttcctgactttgcgcctcttgactgggagagacctcccaacagggatcaatagacacctcatacaggagagctgaagcttccagaggaaggagcagacagcaatctttgatgttctgcaaactccattggtgaaacctaggtgacagggtctggagtggacccccatcaaactgcagcagacctgcagaagatgggtctaactgttagaagaaaaagtaacaaacagaaagcaacaacaacaaaagcatcaacaaaaaagacctcctacaaaacctcatccaaaggtcatcagcttcaaagatcaaaggtagataaatccatgaagatgaggaagaaacagtgcaaaaacgctgaaaattccaaaagccagaatgcctcttctcctccaaatgattgtaacacttctccagcaaggacacaggactggacagagaatgagatagattaattgacagaagtaggcttcagaaggtgggtaataacaaactctgctgagctaaaggagcatgttctaacccaatgcaaagaagctaagaacattgataaaaggttacaggagctgctaactagaataaccagtttagagaggaacataaatgacctgatggagatgaaaaacacagcacaagaacttcatgaagcatacacaagtatcaatagctgaataaatcaagcagaagaaaggatatcagaatttgaagaccatcttgctgaaataaggcatgcagacaagattagagaaaaaataatgaaaaggaatgaacaaaacctccgagaaatgtgggactatgtgaagatactgaagctacgattgattggagtacctgaaagagactgggagaatggaatcaagttggaaaacacacttcaggatattatccaggagaacttccccaacctagcaagacaggccaacattcaaattcaggaaatacatagaacaccactaagatactccatgagaagatcaacgccaggacacgtaattttcagattctccaaggttgaaacaaaggaaaaaatgtttaagggcagccagagaaaaaggtcaggtcacctacaaagggaagctcatcagactaacagcagatctctcagcagaaaccctacaagctagaagagagtgagggcaatatacaatattcaatattcaacattcttaaagataagaatttttcaacctaaaatttcatattattagaaataagtagaattttacttcctagattgggcactagacacacaaaagttcattttatcattatgattatgattatgtctaacatgtgctttatatatgtatctataattcatttatatacatgaaatattgcataaaaatgaaacaatgataagctattaaaatgcatctactaacatagtgatcaattttaaagtcactgagtatcagatattgccattttaattttccagtacctaccacttctagtcttatacgctgaagatgaaagtttctttattacaattgcattgagattaaaataagcaggtcatatgatgtttagagctttggaatattaattaagcatcagggctttgaagagaattccagatgtttgctcatcatcatattaacccttaagctctatttcacagatatcgcaaaaacatctccctagtcctagagcagggagagactgttgacctattatgcttcatttttattatctacttcaccctcttaaaaataaggttcattaaaataaagatgtttgtttccattgctgatgtatcccaagctctttgaacagagactggcacaaagtagaaattcaaatgattatctgcagtaggcagggaagaaagagagagacagagcgcaagagggaggacgagagaggagggggtagagaaaggaggagaagggaagaaggaaggagagaggtagaaaacctaccatctaggccccaaaatatgaaatatatgatcttgccatgcccttggaattctctctatgccttctctaatcatttatttccttctctcccacccatgagctaattattgttttgaattttgtgataatcattctttttttaagctgttatccctctttgtataattttaaacaatgtataatttagttttgtctgttttaaaacaatataaatggaactgtgccatatacattcctttgtgaattgctttccactcaacaagatgctttttaaaatttatccatgacaacacaaatgttgttctgtttcagcaggagttttctggatcttgcagaaaacatgagacagaaaaaaaaatccaaatactgtgcagatactttttaaatattagtgttttgtttaagtctgtacatatcatatccttaggccacaaatcaggtgcataaataatatacccttcattatttctctgtgaccaaacatagtttctagctatgtcctcatgctacctgtttgaagaaaatataagcttatcatttaagtgttttgactgaatcagagtaagcctggtcaatccagggtttctgacctctctttcctccttctttagatggcattgcagtccctggggactaatgttgtggtattaatggatttcagatgagcatcaggttcttgcttgacctctggcctctctctcatctttccagacagacagcccccattggtttttggctggtatcaccttctgactctgaccccttgctttcccacggcaggcccccacatctttgcttgccacagcttgcttgctctcttttcttctccttctcattgtacttctcagggctgaaggacaggctggtcttcacatcagagtcactggggttgactgaatactgcaggcgctctctcaggctctcctgtcctgacattctacacagccacccctcctctattccttgcatgctgagaacacccaccttgttcagaatgctggataagggaacatgacaaagatcttctctaacccctggatccctgactttttctcagaattctttcttgtttttccctcggaaataactcaaaatgcacagggatggccaaattcagagagcaggtcccgtctcagactataactgtctaagtctcttgaatcttccaactcttttctcccttacaccttacttttggtttcatagggggtgaaaaatatgtcactggaagggtaaggagttaagcttttccctcctccaatttgaatggcaccttcatacccctttttgcttctcttagggaaaacctagatccatgtccagggagtgagaaacctggatctcctctggaagtatgggtgggaaggtagaacttgattaagtattttccaaaaaccttttagccatgcatggatgtggcttttgaatttgaagacaaaggatagatgcctttgtttttggggtagcttagtaacaacccctgtgtctccttgtctaaataggcatgagcctgttataacaaacaagtagaaacaaaaccagatcagctaatgattcactgtatcagctcatcgagacacacaaaataagcttttgtagttgtttcagaagagaaatgaaaaacaatatttgattactaaattaagtgtatttaaaatactattattcaaagaacatttatcaagtatgtttcctcactttacagaaaaagaaagattagaagcttatttttttctttgaatttaagtgatttaatgtgatggaactgaatcatgtgacacaaattaaatccataattttatatccattgaggtgtttcagtatggttagtaatgtcaaagacatatttcaggaggaaactgagcaacaaaaaagacatttttttattatggggaaatccaaatgaaagaacaaagctggaggcatcatgctacatgacttcaaactatactacaaggctacagtaaccaaaatagcatggtaccggtaccaaaacagatatatagaccaatggaacagaacagaggccccagaaataatgccacacatctacaaccatctgatctttgacaaccctcaccaaaacaagcaatagggaaaggattccctatttaataaatggtgttggagaatactacaaacacctctatgcaaataagctagaaaatctagaagaaatggataaattccttgacacatacactctcccaagactaaaccaggaagaagttgaatctctgaatagaccaataacaggatctgaaattgtggcaataatcaatagcttaccaaccaaaaagagtccaggaccagatggattcacagccgaattctaccagaggtacaaggagaaactggtgccattccttccgaaactattccaatcaatagaaaaagagggaatcctccataactcattttatgaggccagcatcattctgataccaaagccaggcagagacacaacaaaaaaagagaattttagaccaatatccttgatgaacattgatgcaaaaatcctcaataaaatactggcaaaacgaatccagcagcacatcaaaaagcgtatccaccatgatcaagtgggcttcatccctgggatgcaaggctggttcaatatacgcaaatcaataaatgtaatccagcatataaacagagccaaagacaaaaaccacatgattatctcaatagatgcagaaaaagcctttgacaaaattcaacaactcttcatgctaaaaactctcaataaattaggtattgatgggacgtatttcaaaataataagagctatctatgacaaacccacagccaatatcacactgaatgggcaaaaactggaagcattccctttgaaaactggcacaagacagggatgccctctctcaccactcctattcaacatagtgttggaagttctggccagggcaattaggcaggagaaggaaataaagggtattcaattaggaaaagaggaagtcaaattgtccctgtttgcagacgacatgattgtatatctagaaaaccccatggtcacagcccaaaatctccttaagctgataagcaacttcagcaaagtctcaggatacaaaatcaatgtacaaaaatcacaagcattcttatacaccaacaacagacaaacagagagccaaatcatgagtgaactcccattcacaattgcttcaaagagaataaaatacctaggaatccaacttacaagggatgtgaaggacctcttcaaagggaactacaaaccactgctcaaggaaataaaagaggatacaaacaaatggaagaacattccatgctcatgggtaggaaaaatcaatatcgtgaaaatggccatactgcccaaggtaatttacagattcaatgccatccccatcaagctaccaatgactttcttcacagaattggaaaaaactactttaaagttcctatggaaccaaaaaagagcccgcatcgccaagtcaatcctaagccaaaagaacaaagctggaggcatcacactacctgacttcaaactatactacaaggctacagtaaccaaaatagcatggtactggtaccaaaacagagatatagatcaatggaacagaacacagccctcagaaataacgccgcatatctacaactatctgatctttgacaaacctgagaaaaacaagcaatggggaaaggattccctatttaataaatggtgctgggaaaactggctagccatatgtagaaagctgaaactggatgccttccttacaccttatacaaaaatcaattcaagatggattaaagacttaaacgttagacctaaaaccataaaaaccctagaagaaaacctaggcattaccattcaggacataggcatgggcaaggacttcatgtctaaaacaccaaaagcaatggcaacaaaagacaaaattgacaaatgggatctaattaaactaaagagcttctgcacagcaaaagaaactaccatcagagtgaacaggcaacctacaaaatgggagaaaattttcgcaacctactcatctgacaaagggctaatatccagaatctacaatgaactcaaacaaatttacaagaaaaaaacaaacaaccccatcaaaaagtgggcaaaggacatgaacagacacttctcaaaagaagacatttatgcagccaaaaaacacatgaaaaaatgctcaccatcactggccatcagagaaatgcaaatcaaaaccacaatgagataccatctcacaccagttagaatggcaatcattaaaaagtcaggaaataacagatactggagaggatgtggagaaataggaatgcttttacactgttggtgggagggtaaattagttcaaccattgtggaagacagtggtatgtacccaaaggattataaatcattctactataaagatacatacacacgtatgtttattgcagcactgttcacaatagcaaagacttggaaccaacccaaatgctcatcaatgatagactggataaagaaaatgtggcatgtatacaccatggaatactatgcagccattaaaaaggatgagttcatgtccttggcagggacatggatgaagctggaaaccatcattctcagcaaactaacacaggaacagaaaaccaaatacaacatgttcttacttataagtgggacttgaataatgagaacacatggacacagggaagggaacatcatacaccagggcctgtcagagggtggggagctaggggaggaatagcattaggagaaatatctaatgtagatgacgggttgatgggtgcagcaaacccccacgacacgtgtgtacctctgtaacaaacctacacattctgcacatgtatcccagaacttaaagtataataaaaataaaataaaataaaataaataaaaaacaaatgagataacctgttctgttttatgcaacgtgtaggacaatcttaaggtgttaattgaattatttacactatttcttcccagaaaatacttaaaggattatacaagccagcttaaaaacttgaggactgtaacagagtatgaatagtgaatttgcccttctttttgttcagtgtgtaatgcagagaactttacaaataaatgcaagaaacagttgttttaccctcccctgattgactctcagagtttctcttgctccttctgaaaagtatcacagtttgaatcaagccaagtcttcctttcggtttcagagcatgtgaaaaagttgttattggaacaataaataagtaatctatctgagtaccacctttatattcctcctttgcttctctgtgaaaaacctaggtctgcgtccatggacgtcatcaggaaataaggctgaatggcttcaggctccattcccaagctctgattctgtggacacttagagaggctttttcagtgaatattttcaaatcgcctttaggactgctagataacaagctgctcagggagaatgaatagcagtgttagccttggcaccccaccccaactagttacagagcagtgactctcaaagacctacattcccctgtggtatttatctgtagttttatctcacgggtctctgtaagctttctgagcacatgtttttatttgccagcaatgcctattagtactcaccagtgggcctcactcttccatatctgttgcttagagaaagtaaaaattgattttttgaaagtaacgaaaacatgtcaatgttactttgtattgaattactttaaaaagttgtatttataaggtatgtgttcttaaaatatttgctattcctttccactatctttttaattcaatcaaaacccttcatgtaaagcacagttcactttacattataacttctaagttcccaggactgaatcctaagcaattctgagagaatatacatgtacattttagatttcaaaagggacaaataatcagaggaaaacaaagtctttcagaaataaaaactagagcttgctatcattctctctctaattatggttcaaaatgtaattagaagtttaaatgagatcatgttagtaattttatatattttaaattattagtaaattaaattattatattatatatttcctttattgttcctatttccaatttaacctcttcagctttgtcttcagatcatgttctatatcatgttagcagtacaatagagcaggagtatgcatttgatagagtggaactttcagaaggtaagaatcatgaagttctaagaagtgatattcagagtcacttaaccctagaagagcttaaataattgtttgaatggtgtgtgcttgtgtgttatccattcattcactcattcctttattacaaaggtacaactcaaaagttttcaacctgggcagcctatcagcatcatctggactacttgatttttttaaagttcaacatgccctttctccagttcacagaggaaggtctaggtagaacacttttgtgcatttaaatcagtgcaacaggacatgtaggggaagagcaggaaataccagctcatggtcaggacaagccaagtacagatctaaatctgagccagcttcaccttggcaggctgaagtcaggaaatggcaatgggaaccttcgtagttatattcacctagggatgggatagttccattgtgtctatcccacatgatatctagatcttggttcatactgttgtaccctggaatgtttgctctctactcctgggaagatcagtggacaaggtcatgactggtcctggaacttaaggttactcttcacacaactcgaagtctagctacgcctatgttttcctatctctctacctttggttttgttcttccctcctcatagaatgctcttcctgggccttctcctccattctgcttattaaaatcctgtcttccaagattcaattaaaatgccatcttctccaagaagcctatcatttagttttataaacatagctgtctctttcatactgtagtgtagttagactgcttatcatattctaccttgcgttctcaaaataagaagtgagaaatgcatttgcaggaggcctacccaaattagagttctagtaagagtggaggtggagaggacatttaactacacatgccttatcgaggttctggcattctgctttgggtgtgtgcatcatttctctatgcaatgagaaccactgtgtattatgagatatgattggagtatgttacaaatgtaaaaactatggattttgataaaaggttgagaaccactaattaagtcattacaaaaatatttacagagaccccctgtgtaccagtgcaaacaaatgcctatcatctttttttcttgagagcagaactcatgggctgttcagcatcagatttctggtgtctcctactcagggctaggtaagagctctgtcagtgttgattagaagaaagtttgctccactttgtggaagtctgatattaatggtgagtccacataaatgaaatagtattacccactattttgtagtatgtttttgtttgttagctaaatgaccttaaaaatctgataaatcacaaaagggcaaactaaatgtaagggttgttccccaaaagtttctcctcatgttttatgtctgcatttgctatgctttctgatacctcaaacctagtcacttgctctaattgtactttgcaatatgagtaatgcatgcaagagttcatgggagttttgtggcttctgaaaactctgggacaggaagtgtggaaatttgggaagtagaggtaataatggggaagggagtattgggttggatgttgcactgtcgaacagagatgatggggcagagtaagctaagtctttggatacaaggtatggaacagctctcagagacagttctctcattctggtgccgctctcatctagtagcagtttgatgtgtgaccagaatttgactgggttcatgtgtaatgctcacaccaaggacagactcaagactttgttatatacccccaataattagccccgctccaagtgctgaaaatacttccaaattattggaagctctgttgtcttaaccttacaccttgaagaacagaaatcccttcttttgttaccactcatctcctctctctccaaaacctataggcttccgttcctcttgattccaggtctctatctatctctcttctcattctgcttctaaaatactcccaatttttcagaacaatttagttctgatcaaaagattaatcaattcaacaaagcaaaagcctgatggtttccctaaaatgacgtctatagttcttcaaacaaaaatcacgtaccatacataatatgcaatactgcatattgtctgggttgatcatggtttgtctgttattttcaatttcattagaattcctataaaaacttaatttcctcattaccctcaggacatttttcaaaatgttaatcactgtacctatgacctacatttgtaattagaaaatatcacgagttactgagttagatggttgcttatatttttaacattttacggtttatttaaattatgtttttgctagaaaagctcatacattttctcagtaggaaacaaaaaaatgggaataggttttatatcactggttaaaaaatttaaaaacaaaactagaagtgtttttcactagaagtaagagaaacatttaaaattggtgggaaagtattaacattattaaaagatcaaatttgccttatgattaacatagtattttaatatattatcatagttcactaattaaactttatatattgtttatatttgaaacatcttaagatgcaatattttgtattatgtatggtaaataatctttgtaattatgttggtattaatgccaaatcaaatgtagattcatattctactaactacatctttatgttccaggaaatacactgagttttattacaatcactatcctgtttagtcagacaaataaccctacaatttagatattatcatatctaaatccaaggtgagaacttaggtctaaggcagcgaagtaagtctccagcatcacaggtgtatacatgtattacaaatgaatctaactttctcatttcttttcacggtttcatatagcacacagaaaattatatggtatagctatgcggtaggagtacagacagaaagaggaaagaatttcctgtgaaaccttaccccaaagactagcataattgcttcatcaaatctacttctgtttaatcttagcacaatttatccaatgagcttacaaatgtgctcataagattagttatatctcacagatatttttatttttaaatgttgaaagttatgaatttgggagtgaaattttttatcatttattcacccattgaccatctatacaaaaaaaattacagctaactctacaaggaaagaattttagtctgacaaaagtgaagctcactcagagaaactaaattatttgtctaacgtcacaaaactaatttttgaaaaggcggggcttttcatctattttgcccaaattcaaaaccagtaacctgtatcatgttctagaagttaattatgatgggttggtttagttaaattctctaaacttccctccagagcaaaaagtgtgctcaaaatctactgatggaaggattctgacagcagcataacttaaggatattttaagtaatattgtgtgtgtgagtgtgtgtgtgtgtgtgtgtgtatgaaagagaaagagagagagggagagtgtgtgtgtgtgtgtgcgtgtgtgtgtgtgtgtgtgtgtgtgtgtgtctcctgtccactgtatttgcatggacaacaaaagtaagaaggaaggtagagggagcatgcctgcattcccatagagattattagctggcttggtgatgataaaatgttttcccaagaggggcaggactaggacaagaaaggatctgggttggtaggaagatgaattatcagatgatgtactctttactaaatttgaaagtaggggtggtctgtgaagctcatctgtcttggagtaactcttagatgtttactcatagttagatacagtcaggatattagaagttatttccagaagactccaccaatcctcttcatccaaggtatgcattttgtccctcccatttgtttaacaggaaccctagcagatggtccttattgagtattatagattttttttctttctgtgtgtcatatctcattgttgtgatcaataattttagccaatactgcctttactattattttagttgtatcactcagagcttatgacatttattgtgttgatatacaaaatccatgccacatttgtgtgcaaataaataaatatagctaattcttatggtataactttcagcatttatgtttcagtatgtttttttcaatgtacaatattctttccttaaaactgtatttccataactctactaaactggagatggaatcaatgtaaagtctggtaaatagtaaagagaagaaacctaatttcaatgagtttagaattgttctaaaacccatatgtagccaaaattgtccttctatagttcatcttaatgcttatgagtttaccaaatgcttatgagttaaagaaattatttatgatatttatattaaattataaaaaatagcattatattgcgcatgattataacttgtcagatatacacacacatacacttacacacacatgcacacaagacttaataatttccttgatgccatttcaggagattaaggaatgatagagcacaattccacctgaaaatcgtgttataacctatgtgacagcattagcccttccggtctgtaattcaatcagaaattttgttgttgttgttagcatatttcaacattttttaataagagaaagatattttctgtggataaaggaaaaggaaacatgattttattcttttttattttgaaaataaatcacagatagaatatcatttctttacataataaaattctacatccaaatatttgcattgcatactatttgttagcagacaatattaataggtttcaagataatctctcattagattctgagagtgtctgctctagttgataacaactagagttggactccataggaatccaggcaacaattcaagtagagtaaaaaataagttgagttataaagaaaaatgaatcatcttaagatcaccactgatgaatacaagaatcacaaaagtttcaatagcaaaagcaaagtatattaaaaattaaggaaaatatgccaattatgtttctcttcataattttacgacagtaattttttacaatcatggctgattataaatgagaattactttttttcataacttctttacagcattttctctaaattattaaaataagtacgcttttttttttttcagaagcaagaaccagttcacagaagtgtgagtttattcatcagtaaacacctttaagtaaaacctcgtgcatggtggcagctctaatttgaccaaaagacttggagattttgattatgcttgctggaaatctaccctgtcctgtgtgagacaggaaatctatttttgcagattgctcaataagcatcatgagccacataaataacagctgtaaactccttaattcaccgggctcaactgctaccgaacagattcatctagtggctacatcagcaccttgtgctttcagatatctgtttcaatggcattttgtggcatttgtctttaccgagtgccaataaattttctttgagcagctaattgctaattttgtcatttctacaataaagcttggtccacctgttttcaccttagattgtcccttttctaaacgtcaaaaatgtagtgcaaattaaaaaaaaaaattatcttttacattaattctaccatttgtcctaagggatagatatctttgaaaacatgtttatattatagtgagagtgaatggcagggatgaaatgtatcatccaaaaacccaccaggttgtccaaatagtagaaaggtgagttttactggcaatatcagtttgcaaattgggaagagacagtctccagtgtgtaccaaagatgctctctcttcgaagagggaaagggtagttgggtttttatgcctcacagagtctattacacaatagaggcatacatatttagcaggtttggggaaaaagctatacatatttatgagcagagtcaagcacatgcctaatgggtaaacatatatgtaatgtacatcccatgttcattttgcggtggggatttagcattaaaatgaggaggaatttggctctttcttttaaagaaacataggatacaaagtttgtggacagtctctgtaagctggccaaaactggcttgagatctttagttacttctcagtaaagaatgtttgtaagattggccctcagtcttcttaaagttgtagtggtgtgggctataaatcagttaggaagggtctgcaatttttctgatatctcctattgttagggagtttaccaagaatgtggtttttcttatagccgtaggaatttaggaagtttccatgacagtcaagctctcaacactcaacctggaagtaacttttgtttcattaaccttagggttcatcttagttaataagtgggtatttattttggtctctcagaacatgaacggtttactgtactgtttttgttggatttgaaattgacttgttttctacataattcagtttaaggttagctaagttatttctttttggaaaaagtctggtttttaagagctgctttcctacatcatcttttactgttatcagtttacttaatagttaactctgctagactagtagaagcactccaataattaattagctaagaatggctgatgtccagtattgaataatgtattttcacaaataagtatatttatttcatctatctcaccttgccttcacacaggaggtggaaaacttggctataaaatatcatcagattagtcaaggttctccagagggacagaaacaataagaaatacatgtgaagtgaaatttattagggagaattgcctcatgcagtcataaaggcaaagtcccatgatgggccatctgcaagctggagagccagaaaagctggtggcttggctcagtccaaatgcaaaagccgagaaaccaggaaagttaacagtggagccccagcctgaggccaaaggccttagaccacccccttcccgggaggctgttggtacaagtctcagggtccaaaggttgagaacctggagctgaatgtccaagggaaggaggataaacagccccttctgtgatggaagtttcctactcagaaagggaaagagagaaagccagagcaagctgagtgtctccctttttctacctgctttgtcccagctgctcccccagctgattggatggtgcccgcccatattcagggtaggtctttttctctctcagcccactgactcatgggttaatcttctctggaaacagtcacctaggcacaccccaaaacaatgcttcaccagccatctaggcatccctcaatccagtcaagttggtacctaaaattacccatcacaagtctaccccttgccagcttggcacccattatgcacctctttaaaccacacctaatctccagatgaagactataaaaaggtcataattctgtccaacatggtgaaactatcctgtttacaagccaacgtgtactaatcccatcctcagaagaaaggataaagttcatgagtgtggtttactcttctgatctcctgcaactcaaatctgatataaaattaacagtattcaaatgctgatattaagtcaataaatcttatgttacatgataaaggaaaaagagaaaacaaagatacttgcttaagacatgttaatatacatacaaatgtattcttaacaaaataggaaatacttataaaaattacaatcctcatttctgtatctggccacatggctgtatatggtatttatacatgtcttctactacccattctgtattctgtattgccttcagtaagcacctcagctggtcatggttctttgcctggcaaggtgacccaaaccttcattcctgaagagtctgggcaattcatagtcagcctatattgagtggttgtagtttcccattgaccttcatcacaggacagggtaatactaatagttgctctaaggaaccttctgtattccagaaatactattctttatctccattgtggaacagtaggccaatcaatcgcccttagtagcctagatgaatcaccctagccaacaccctaactccctttttagcctgttgactcaagaatcatgaggaacccaaagcagccgggtcacagttttaattcccagttcagttgaatcatttttgtgtctcctagtagaagcatgcctccctctgaaacaaagttcactgcagaactaggccagaagaacataatgttgcagaaacagtgagaaaaaattttgctagtgggtcactagaggtgatgataagtagttccacttccatttctacctattgattcctggacctatgactcctggctatgggagaaacagtaccatatattggatgctgattcagaacatatacaaccttctggagaaatctatctcagccctgtaaaatattgtcacctagctggtactgtagaagccagcttcttcaggagaatgggaaacatgctaagaccagtgaattctatgagcatgagctgattgctgcactttttccctgtgaagtgaattcctgggtcagaaacaatgctgtgtggaataggatggcagtgaataagtcattacataagtttacagatggtagttttggcaatagcattgtatgcagggaagacaaatccatatccatactaagtgtctatgccagtaaggacaaaatgctgccccttctgtgatggaagtagtctaatggaatcaatctgccctggggaatggtgccatattagggctcactattggtctgtgagtgctcagtctatggcgaggcagtagccagatcactcttggtgagtggaagcccatgttgctgagcccatgaatcacctctatccctaccaccatggtcactttgttcatgagttcactgggcaatgacaatggtagctgaggaggaggctgactggtatccacagaatgggtcatcttattcacttgattattaacaccctcctctgctgaggtcaccttttggtgagtattcatatggaacacaaatatttttatattttttgcccactcagagaggtctatacacataactcttccccaaatttctgtgttaccaatattccaattatgttccttccaagtccttgaccatccagccaaaccattggaccatgtattcttgtcctctgtcaactgattgtagggaactccccatgaaggcatagtacaaactgggagagaggaggcagtgtagaaggagtgaggactatgggcatttgggcttcttcatgtaacttacttgtgccttcaggacctgcttcagcctgatcgtgtgtataccactaccatgtgacgatagaatactgctgtgtctccccaactttatggcttaatgggccaaataacacccagttaatggtaggtagttcaggtcacatggtaatttgctggcccaaggccaagcattcagcttttactaaggcctagtagcaggtcaagagctacctcgcaaaaggagagtagttatctgcagatgatgccaggcctcattccagaatcctaaagacctctattgtgattcacctgtagggccctgccaaagactccaaacagcatacctatctgccactgatacagcaaggaccattggagctcttgggtcacatggcccaagtggcagagcagcttgcatagcagcctggacttgttgcagtcttttcctgttctgtgccccactcataactagcagttttttgtgtcacccagtaaatgggctagggtaacacacccaaatatgtcgcctttataatccaaataggtccactaggaattgtgcttctttctcagttataggaggggccagatgcaacaactctttactttagaagggttatctccacaggccctgcaccactggacccttagaaatttcactgaaatggaaggcccctgaagtttagttggatttatttcctgccccctgacaatgcacatgtcttgccaataaatccacagtggttgttacttcttgctcactaggtccaattaacataatatcatcaatgaagtgaacagggtgatagcttgtggaagggaaaagcaatcaggatccctgcaaaatagattatgacatagggctgaagggttggtatacccctgaggtaggagggcaaaggtatattgctggccttgccagtgaatcaaattgcttctggtgggccttatggacaggtatggagaaaaagcatttaccagaacaatagctgcataacaggcaccagatgtgttaatgtgttcaagaatgaaactacattgggtgtagcagttgcaattagagtcacgacttgggtaagcttacaataagccattgccattctccaggatccatctgtcttctgtacaagccaaataggagagttgaatggggacatggtgaaaatcaccacctctgcatctgtcaagtccttgatggttgcactagtctctgcaaacccttcaagaatgctaccttgttttctatttactattgtcttaggtacaggcagttctaatagcttccatttggcctttcctatcataataatcttcacccactagttagggaaccaatgtggggattctgtctgctgctaagtctgtctatttcaataatgcattttgaactggggaaataactaccttatgggttcggggaccactggacctgagctaaagctccatgaatcacctgactcccctaacctctactataactggagggccacagtgatgttttcagtctcttgggatcaatgtcagttcagagccagtggccagtcatccctgaaaagcctgattattttcctttccctgatacaaggccagaggtccctttggggaagtataagagaaagattaacagtataaattttatgtagtgcaccagagtctttcctcaacaggacctggtctccccttcacttaaagggctctgggtctgtaaactggctcaagtctagaaattgattgaggggcagtgattccctgttgtcaagatttgagttagacttttcttcacttgacccagaaattttgtgcttctacagttcaagtaagagcatagtaagcttcccatctattttacttctaggaacatcatgattaattagccagtgctggaggtctacacaagtcagattattctgattgttgctttgcctctgctgttaattccagtaactacgcccaccttgcctttgacatttgagtgccatcgcttggctcctgccacccagggatccaattattcccattgcatttgttttctaattgagtgattgtagttcccactataagttctggaatgcagagaagagcaatcacagagatctttaaggatgctggtgctcccctcacaaatttatttcttaaaatattagtgaaaggtgtatcttctggaccctcccagtgtgggggagtaggttttatgtgacaagtccactgtatcattccaatttccttaagccttttaattccctcctctaaatgaaaccaaggtagatcaggcatccccagctcactcctggggtggtctattttttgatccatgtttcagccagtcagccaaataaacttatagtgcctgttttcactccttgagcttcaatattaaatgcagaatatatgcttagtgggctcatatcaataaatttgaccttattctttgtttcttccaccataatcccacatccttaatatccattcccacgcatgtttcttggatttctgctggtatcagttagaacactcaagtagttcttttggagtatagcgcacctccttgtgggtcacactctgaacctcccctctgggatttcagtctagttacaggtttagaagcaaagaggggtggtaggggtgggtctcaaggagaatcagcattgtcttgcccggcaactgctgcaggggagaccattactcttttttctgacaatgcagttaatcccagagaggggtggaaaagagataccattgtgggtgggggtgccactgcctctggaggtggagaggacagtcaccttggcaaaaaatactcttcagaatttacgagctcaatgccccccatcaggatcatcccacacatctccatccccatttagataattccattttttttttccccaaccaacgtcctcactttaacactagataccagtaaaggctgagagttcacctttctttgtaactcagccgatggatgctgaaggcttgtgtttgattttcagcagtttaagtcccatggctaaagaagaggagattctccttctccttcaggacacacttagaaatttttagggtatgtatatgcatctggagctgggagttggaatccctgagctcatctttttctttcctcactttgtccagtgatattaagagcacccaactaacttcattatcatttcttggtttcccaccagagttggaaggtatgcatatagtcactgaactccttacctcctgaaagtggtgaattagaagcatcaagtgcctttattttgtgtatctctataaacagttcacgccaaagactatttaggtttaatcagattataaagtcagttccagaaatcccaaaaccaattaaggaaattccttttaagaatactgttcctctagaaccattcctggcatcagtgtctgtattagggttctccagggggacagaaccaatagaatatacatgaaagggaatttattggggaaaattggctcacactgtcacaaaggcaaagtctcaccacgataggccatctgcaagatgaagaagcagtttgtagcgtggctttgagagaagccggtagtgtgaccatctcagtctgaaagcctcaaaaccaaggaggccaagaatgcagccccagtctgaggctaacggccttagagtgccccaggaggtggctactgcatctcagagtttaagggtcaaagaacctggagtctggtgtccaagggcaaaggataaaaaggtgtctactcaggaagagagagacagagaggccaaaagaaaaagctgagcaagacgaatgtctcccttttcctgcctgcattgctttacctacatccctaactgactggatggtgcctgcccacattgagggtggcccagttcactaactcatgggtcaatctcttctggacataccctcacagccatacccaaaatcagtacctcaccagccctcaatccagtcaaattgacacctaaaattaatcatcacactaagaaaagccaaaaacataaaaggcagtacattacacccagggagggagcataatatacagttaggatccaggactctagaactagactatctttttcaattctggttccttacttactagttatgtaatcttggacaattgatttaatcttttttgtgtttcagtttgctcatttataaagtgaggatcacaaaaatagtttctgtctcaagagctgttaggaggattaaatgagtcaatgtatataaagtgtttagaacttggcattttctacaataattcttttttttaatttgagacagggtttctctgtgtcacccagcctgaagtgcaatggcataatcatagctcactgcagcctcaaactcctgggctcaagaaatcctcctgcctcagtctcctgaatagctaggactacagacacacactaccatgcctggctaaattttcacttttgtagagatgtggtctcactatgttccacaggctggtcttgaactcctggactcaagtgatcctctctcctcagcctcccaaagtgcaagagccaatgcactcggcctacattaattcttattctcctcagctcacatatgttccttgagactgaatggatatttcatagaaagcttccttaaagaagtgtgctatggaaaagtattacttgcttaagatgattttgatatatataagattatgcttaactcatgacaaaacatgcaatggcgctgtccatcaatcagtcgagtgaactgctgtgtgatgaattatcttgataggtgatttctatcacctttccattcttaattaacctatcaagatagtctataaagtttatccccaaatatctcccaaatccatccagttttctgatgagtaaatcaagcaatggaattagcttgttctgaatggttactacaactgctcactctatatagttataaatggaccatctttatctaaatactttctgttaaggattctgccacttcatatacctgtcacagaaccctttagagggaaagaaggattctaaaaaagaaggttctgtaaacctaaattttctcaaaaagaggacactttagcttatccagtaaacttggtttatgacaattcaattctttcctgaagggatttttaccattttaatttttatctcttaaaatatgcctagatttagactgtatacagcccaaactcttcagcttccctaattttacttcttctaggactgctatttatactttggctaatataactttctcttgttaatgataggaatctaggaaattcccagtaattatgcaaaaaatgtataactaaagtatttgatctctgtcatatgtatttaatttctgtattttgttctttctccaaagaaaaaaattatgcaaagtgaaaaggaaaggaaaagtgatctaaaagatctcttaaggtaggattcagtatgtcttcatgggaagatggtgaaaacctacaagaatctgatgttcaaagtgtattacagtgtcatcttcaaaacataaccaaggcccattctttagcaagacaactgggtagtgagtggtcttggaagccatgcgctaattttgattcgtgtcaggaaatttttgtagagttagcaatagaagttcagtcaagttaatatcaactcaaagatattaactcatcactctggacatgggattcattcagaaggctcctgtgttcccacattacccttccatcttagatgagacttctataaaatatgaaggcatgtctgctgattcagagaaacccaaatacatcagtaataaacaaaaacttcatcaaataaaggcagtacaacaagagtaagagaatagttttgatgtaatttgatgtagagataacaaaacacccacaacttatattaaataagtttgcctccatcaggacagttaacctgttacatgagtctttagagattagagattctactgcttctcataatcctgactgaaagttgtagatcaataaagtactttgtgactaattgcttaaagtgcttttattttaaagcatgaatttacaagtttacttcaataggagcaacttgcatatacatccaagggaggcaatttcttccaccactacgttcacaaactctaagtagatgaagctagctctctccacatatcccatcaaataaccccccatcatagccagccaaagttaggtattgacatgtacatagcagagaaagaaataacgtggaaagacttttgtaagaagccaagagactttctcaccccaggttaaagcatagctgaatatgtggaattgatttctatcttggctgattcttaggcccaatcaacatagctactaccaactctctaaagcctcttaaagatttggtggcttcaagctaaaagatgagatggaaaaacatttatttctgggggcatttggtagctccaattcaactcagtttacaaatttgttgaacagtgtttacaaaataccatcagggatatctatagactcctagaattttggattatgcataccaccagcatttgatgacttgttcttctgtaacagatacttacatggtgaatattatttaggttggtaaagattgtaagtgggtttagtctccacgaaaaaaacgaagagaaaaaaaatcaaaggaaacttactttcctaactcttctcgcatcctccctagatggaaactcatacaaagaagtgccctctgcattgaagagtttgttgattataaacactaaaattgggtcttagagtctatagaaacttgtgatatttgcagtctctaggttagaaacagttcatagctcttgctatgtttgaatatgcaaagtgtgcacaatttgggaagttttaagatctacaatggatgcttagccatggtgtttcaggatggagagtcacaattcatcaaaataggctggtcacagtggctcacacctgtaatcccagcacttcggaaggacaaggcaggtggttcacctgaggtcaggagtttgagaccagcctggccaacatggtgaaatcctgtctctactaaaaatacaaaaattatccagacgtggtggcgtgtgcctgtaatcccagctactgggaaggctgagccaggagaatcgattgaacccaggagctggaggttgcagtgagccgagattgcaccattgcactccagcctgggtgacagagcaagactctgtctcaaaaaaaaaaaaataaaataaaataaaataaaataataataataataaaaaaataaaaaattcaacgaaacaaaaatgataacagggtttgtgctcctctacatcttttgattttttaagcatagatacttacttcagttatatatttatactggattttaaataaaataacttctcattattcttggagtcccaatgtctattatttctcctttatagtattagcagccctttactttgaaatccccacgggtataggacttgtgcaggccttgctgctggattctttttagattatcttctactgctggttttatcacagagaatagtagtaaaaagataatcttatttcttacaaatgctgctcacacttcttactaccacactactcagccacccctgaagaactgaatttcaaatactagtagcttgttagagaaggaagatgaaaaatgtcatgtttactccacatttcccaactggaaacttcactgttgtgcttttccagatgactaggaatgctcccgccctttccaatcaatagatactttcccctttgagtcagagccttagcaccatgttaccaaactcttcaacttagtaataaaattcatggctctggggttgaaagcccagctctgtcacttagatggtgtatgaccttgggtaaaaaaaaaaaagtgttgaaaggataagatgataaaatatgtgaagcactaagcacagtgcttggtacacagtaagcattttctgaatgtttactattgtttttactgttgctactaatattgttcttaataattataaacttaagttattcctccttactaagttatgctcttatgctatttcctgcacagataacttatgattagataatttgagctatagtaacacttcatgctaaaatacatatagacagattattgatatggctggtgaggcctcacaattatggcaaagtcatggcttacatggtggcaggcaagagagcttgtgcaggggagttcccatttataaaaccattggatctcatgagacttattcactaccatgagaacagcatgggagaaactgcaaccatgattcaattatcttcacctggccccgcccttgagctgtggggattattattattattgagacggagtttctctctttttgcccaggctggagtgcaatggtgcaatctcggctcactgcaacctctgcctccctggttcaagcaattctcctgcctcagcctccccagtagctgggattacaggcatgcgtcacaacacccagctaattttctgtatttttagtagagacggggtttctccttgttggtcaggctgatctcaaactcccggcctcaggtgatccaccaggctctgcctcccaaagttctgggattacaggcatgagccactgcacctggctgacatgtggggcttattatagttcaaggtgagatataggtggggacacagccaaaccatatcaatttcctagagccattcattataaagatgaattatacatgtttatcctacatgtatatatctagtccatatttagtcagatagaagaatttaaaatataaatgtggttgtgtattacatcattttaaggttattgcataaagagccagaatttcccagctggacatggtggctcatgcccgtaatcccaacactactggaggccgagatgagcagattgcttgagtccaggaattcaagaccagcctgggcaacatgacgaaaccccatctctacagaaaatataaaaaagtacctgggcatggtggtgtgcttgtgtagttccagctacttgggagtctgaagttgggaggatcaactgagcccaggaggtggaggctgcagtgagccatgatggcaccattgcactccagcctgggtaaccagagtgggaccctctcttaaaaaaaaaaaaaaaaaaagcagaattaaaattggacatttttttatattcatgtttgggcccattaaaaaaaaaagagaacaatgaaaaattataggtgagagatttcagataagtggtaaaattacataatatgaatgccttgtttttttctgacattcttaaagttaagcaacttgaaaaataatttgttagtagtagtattatgttataaaattccacattgaaagtagatccttcaattaattttttaacttgtaaattgagaaatggtaacaaaccagaaaatttaagaattgttttttaaatgatttctgtagtagtctgttctcacactgctaataaagacgtacttgagactaggtaatttataaaagaaagaggtttaacggactcacggctccacatgtctgaggaggcatcacaatcatggcagaaggcaaaggagaagcaaaggtgtggcttacatggcggcaggcaagagaggcaagaagcaggagacctcccatttattaaaccatcagatctcgtgagacttattcactaccgtgagaacagtatggggaaactgcccccatgattcaattatcttcacctggccctgcccttcacacgtggggattattaagttcaaggtgagatatgggtggggacacagctaaaccatatcaacttcttagagccattcataataaggatgaatgatacatgtttatttgacacgtatatatctagtgtacatgtataggagagtgaaaattaatggtttatgtttagaacaatgcacctcaggattttttgtttttgtttttacatgattatcatcatcaaaacaaattcaatcatattcaacattctccattcaggcacagaaatggatttatgtattgacatttttactaaaggcaattgaagtttgttttgttgttgttgttgtttgtttgttttcttaatccagctttacaaagaaaactcaatcaaccagaatagtttattcagattatttaaaggaaagccaaaatgtttgcatcattttacagattattttttccaagttttagcttttgaaactcacttaggtagatagttaaaatcaatattctacagttaatttgtcctatttataaagataaagaatatgtgaatttttggcatttctctcacactcaagtgcagccatcacccgaatagtgtacattatacccattaagtaatttctcatcccttacctgcctccaaacctcctacccttcagtatctccaacatcagactcaattttcaccccatttttcatcctaattgagaaatcagagcagccccatgttgcctttcacatcaacttgcctctacgagccaaatctgatcatttccatggctgattcctgctactctttacaagagataaagtgtgatttgaatggtcttaacttcaccactccagagcttctctctccattgccacccccaacttctctaccttcaatcaatgcctgtgcattcttatcatctccctgctctcagagcctgctttcttttaagaagatctgcgattcagtcacaaagttcccttctaggaataataacattttaataggtgtcagagccttcctctaaaagaatgacactctgatggagaaataattgcttcaaccagtgggtaggagctcacagtagttttctcagctgggcttcatttctttcctggcatatcatttttcttttcaaccctctgcctttgctcaggctccaccgtacctcctcatcccttcactaacagcatactcctacctgtgtgccaacaaaacatatacaaccttcagacccaattttagaaaactctttcaaggagccagctgaactacctcccacattgttaaactatttcagtgtaacttaaacactaagatttctggctatctgacaaggtattagcttccccaagttgagtataatttcactgatttgcagatgaatatacatataaatttttcattttccgtagatcacctgtaaaactctctacatatctagatgcctagcacatatgcattgggtgtaagtctaaagcttgctaaagtaaattgttgtattttcctcaaaatcagatgtttctgtttttctttaatgaaccaatacataatttacctatttcttgatttgtgtcttatgtaacactttaaggtattacttgctctaattttacagggttggagctagcacattttggaattaagtggaattttgttttcacagccttctttttcttctgcctagtgtgcagtcctgtcttctcttactgttgccttcacgcatactgcaaagtaaacgaacacatacaactgcttcttctccaaatgcattaaaattaagaggaaaaaaataggctgggcacagtggctcacacctgtaatcccagcactttgggaggctgaggcgggtggatcacctgaggtcaggagttcaagaccagcctggccaacatggcgaaaccccgtctctactaaaaatacaaaaattagctgggcctggtggcaggtacctgtaatcccagctacttgggagggtgaggcaggagaatcacttgaacctgggaggcagaggttgcagtgagccaagatgatgccattgcactccagcctgggcaacaagagcgagactccatctcaaaaaaaaaaaaaaaaaaaaaaaaagaggaaaaaaatagggaaagtatttcccctggtattaaaatagatttctttatcccagcatgtaaggcaaactacattatatggatgccaaaacaccaattaaaatcagaatatctgatttatcctacattacatttttccaatgactgtaactttaatctttgatcaccaatttattctagttatctgcaacataaactatataaatggtctaaaagtaaagctgaagcaacctagagatatgcctaaggaaatactattatacatagcaaaggtaatattcttcttatgaaaaaataagaatgcagtgttactcagagctaatatttctgttgaaaagactgcacaaaccaattttgtggtatttttcaaacaccatttattattgctgttaaatttaaaaaattaactggggcattgctctgaggaatagcttgtgattctgtctcccaaattcacctaggctattttgcgttggaatagtcagctacccctctaatcatgtctttctcatctctaaaatgagaatcataatgatgattttcccacttacatgcagggattgttgggctagataagtcaaaaataacgagtgcaaaataagctattaaatcattttgttttttatatctacatgagaaatgatcttttaattatggatttgaggtattagaaaaatacaaaaagaacaacaaatttatttctgtggtaggaaaattactattgagaacaaaactaatttttaaaggagtatatttaaagtctatttaaagaaaaatattaggtaagcgagaggacaggtggcatatgaatacagcagaattggtgagggtaggttactcatgattgtagcttgggaaacagtcaaactagaggccaagattctggttgtcctttgtcagaggatccagccccttgctggctttaagactttgggcagatagttttcaagctatgtctcagcttccacaattgttcaaccttactttataagattgctgtgaggggggcagggcgtggtggctcacacctgtaatcccagcactttgggaggccaaggcaggtggatcacctgaaggtcaggagttcaagaccagcttggccaaaatggtgaaacctgtgtctatgaaaaatgcaaaaaaacaaaaaacaaaaaaattagctgggtgtggtggcagatgcctatagtcccagctacttgagaggctgaagcaggagaatcgcttgaacccaggaagcggaggttgcaatgggctgagattgcaccattgcactccagcctggacaacaagagcaaaactttgtctcaaaaaataataataataagtttgctgtgaggattcagggaagtgaggtgagtgaagcacttagaatagtgtctgccacctagttggtgttcacaaagtattgattattattggtatattttcaattgtataataatttatcctaacaggttatttctcagatagttagtgagaccctgactggaggacaaaagtctctaatatccacttgatagtgtgtttggtgtaattccctgcaagtcttattcacagcaccatgagtctaacacattatgattctaatatggtaaaagtgagcttaaattgcaatctaaaagcctagattagctaaatttagaggatttctgttggttttggtaagtctgtctctcctataacaactatcccctccctgctccttgaagaattgagactctatttacaaaccaaacccataaaatttctatcattttacaaattattttgttagatttgaacttttgaaactggttgagatgaacacctaaaactctttgaactgaacagaattattgatgttcctttattttcactgtttttcctggctgacaaacaagtttatatgcaatttctttgaacagaccacttgcattcattcctaatgagcagctttctatatatatgacattgcaaatcctttcagtaagatgaaattcaaaagtgacgttactggtcttcttgaagtaccagtgaattaaaagccaaccgtcttgacttcaggttatctatttatgatctgcattgtagaaagtcaaccgattattctggacctatttcttgcctgaaaaatgaagttagactagatcaagttttaatccagagttatatagagagggtcagaatacttagagagggatttctttttactagtctttaactgaaatttatcattctcctcatttgtaggaaagaatacgcatcaacatttatggtatttttgtcatcaatagaactatatatctatttattatatacctattatacacttatatttagtgtagcgaccttgaagtatcattttatatcactatttcaaaactacataggtagaccttcaattagaccttttaatttaatgcattaatggagcatatataacactatagcacatcactaggtttacttaaatatgttgataactgtattttaagtagaattcttagtaatcatatatgttttattttatttataaattgtactttgaaaagctggccataggcttcaccagactacaagagggatctatgattcaaaaccatttggaaccttggtatatgggtgtttctcaaagcctttatatggtacactcttgggccataaaggtcatctaagatgatctttaatggattgaaaatgcaaattgtttcctctttatgggagaatgatatgtcagaatgacttctttttttatgaagtactaagggtcactaacaagcagtactgcccaagttaattgtaaaggcgtctacaactaaagatttatcaactaaaataatgtaatttggatttgctgaggactctgctatctggctgtcatgaaattccttggcaattgcgtgtctactcctgaaaagagctggaattttagttttcaaggaagaccctttttcagtgctacgaaactcttatcttgagtttatcatagtttttaattgttgctaatcacatgtacagaattattattgggtataatatgtgtatcatttggggatttgttattttttataattgctgccttgttgccatttgattactttctttttcttttactcttttattactgctgatttctttattcagtagaaataagataaataatttggtggtggatgaccttagtaatggcctttacccattataaaaagttctctaaaaaattttgagaaccagtgaattagttaattacttctatttctttcttgtaattcagtctgttctttttactatgttctgttctattctagactgttctgttctgttctaatctagtcttaagtaacagaatattaaatcagaatttaaaccaagactctaacatgataaatgtcagaaaaaaactgatttttgagacaagaatttcaaagaaggttcaaaactcagtaataagatgcataaaaccctttcccaattcaaacaaatgaaaagctcaggtcactgagcttgaaaaaaaaaagatttatgaagatgatttctttaaagacttctctgctattgggaaatgtgcagaaatgcttccttcttcacctcaaattaagggaggagaacttcaccaagacccttggagagattgaagttaagaggatattgagaatggaatctagttcctacctgagagatctaaagagttaaatggtggcaggtgagccaaaggagagacggctgtgtagatttcagcttttcttccagtcattcatggaaacaaatgcctcaagagtgtgtcatgtgaaccaaatgtacccacccacatttggaaagctgatgggacctcagcagacagaagctggaaatgtaccagcaaatttccaggggctgtggacattgtaaagaagccagagattcatgggtcttaccaacctggtaaaaagccatggtccttggcaagaattctgttaagagcccatgactgtgctcacagaaaataaaggcagctgtaaacgcctgccaggtctagtgagtgcaaagccatcctacaacactgctgctcctcttagctttcttctctcccatgcttaggagtccaaagtagccagtggagggagagcaagcaagaaatgagagaaacatcaaccatacacaccccacccccctccacacacacaggcaacatttctgggttctgtaacaaacaaggtgggaaaggagtcttatctttgtttgacgatgtttattacatgagaccagaccttctattgtctgatttgagattttggcaacttaatgtgatcacaggatgtttttagttctctaagaatgatcaggaaagtaatgagactacctgaaattttgatcttggctgagaagataagtcccaaccctccatatcgtaaagacaaaattgttttgtaatagcaccttataaattctgtatgtccactaattacataacctcaacaaaaatatgctgcaactgaattgatacaatgctacaatatatgttaaaggaattataacaaagttaattgggcaaagtttaattgttagaatatctttactcaaacttcagacagaaagaaactttcattgtatatgactatttcctgaactctcaagatatttcaagtaattgactcaaaaattaatttctgtttattttgtttactttgttgcttatgtaataagactctttcatctaaacattctgctttatacttctattttcatagattctctacaacctctccagaaatgttgaaagatttttccatgctaatattttatttttcttgaaagtttatatggaaactgagtgattccaagactagtttgtcttgacaggtggtatcttaaacactactatcctttcatactcatttttaaatattcatagcaactaagcaatgtatggttaaaaaacattgatcattagaaggtttagttaaaggaatttgttccaattaaaaaatattcagaaaaaacatgattttttacatgggatttaatagatgtttaaacatgtttcatctattttatttctgtattttcatattaaatcacagcttgagaaagttatgtaaccaacagaagatagcttgttatactatgtagatccacaggctgaaaggaagatgtttggtgtctttgaaaaaatgtgccacaaaatccattgtaaaattcagtcttcaacattttataaagttcttcagtctcctaaccttattagttttttccaaagccttattttgttttgttttgcttttgtttccttatatttttaggtgaatctgatcttcataagaactcagaagacttagtaaatgctgaagaaaaacatgatgagacacattcataggcccgaaacaccttaaagacttctgtcattttaaacatgagaggtaattttattttatagaccagaaacttaacttctaaagtaaatggtttgcagaataccattatggatgaaattttcttatttaaatgccctcctagagtttttttaatctctatcatcaatcctttgagacaaaatcttaacaggtaaactttaaatatttaccttttcaaatagttcttaatttgttaatcaacaaaaattatatttactggaactgaaattttcaatctttaaaaataattttaaaaatggccgggcacagtggctcatgcctgtagttccagcactttgcgaggccaaggcgggcaaatcacaaggtcaggagtttgagaccagcccggccaacatagtgaaatcctgtctctactaaaaatataaaaaattagctgggtgtggtggcaggcacctgtaatcccagctacttgggaggctgaggcaggagagttgcttgaacctgggaagcaaaggttgcagtgagcgagatcaggccactatactacagccagggtgacagtgcaagactccatctcaaaataataataataataacaataataaatacgttcatggggatgtttaatcctcatttctttttccacatcatgtaagaaatataaatgttttagactgatttcttgttttatttcatgtaaaaatatgtttatacccagtaattaaaacaaagcaagtacatattataaagcaaatatcatgttccttaaaatctgtgaacatgtgcatctatggttctctttttaaaaattcagcttctagggcttgttttcagtctaccaaattattaactctgggagtgatgccttgaaaatttgaatttttgataagccagtctgttgatatttctgtccactaaaattgagaaccactgtcttgaaccgatggcggagatatgggcagttagaaaggagggatgtgtatttacaatggagatgtcttaatatctactaaaaataagaagaagtaaagaacaaaatccaagtgttataacgcatcctgttatgggggtggtgggttggggcaagagaaaatgctgagggtaccattccaaaccttagagatgttattattagttccacagctgttactttagatatgaaagtgttaaaatgtgattcgcttttaaaataatttcttcctcaatattcttgagttacaaagacagttagttgttagactgtcttttattcataagaatagttttgtgaatagcaacaataaagtgtcaggcactgtggtgaacatcttgtatatgaagtacctttttgcatttttctttttttatttttggagaccgagtctcgctctgttgcccaggctggagtgcagtggcacaatctcagctcactgcaacctctgcctcccaggttcaagcaatcctcctgcctcagccccgcaagtagctgggactacaggcacccacccccaagcctggctaatttttttgtattttagtagagacagggtttcagcgtgttgcccaggctggtctcgaactcctgagctcaggcaatccgtctgcctcggcctcccaaagtgttaggattacaggcgtgagccactgcacccggcccctttttgcatttgtgtgcggcccgctcaaagtaaatataatatttaagcccgagcagacgatttggcaatttttttttttctgtcaaggccagttaaattatttagcttccttctcagtttgagaaagccctgcctttggtgcacagtcttctgggaaatgtgatcttcagtagcaccttataaattttatatgttcactaattatgtaacctcaatagaattctgctgcaactgagttgatacagtcctacagtatatgttaaaggaattatgtcaaagttaattggtgcaaagtttaattgttggaatatctttactcaaacttcagacagaaattcacatagcttcccaaaacaagtaggtcttttaaatgagggaaatgagtgaggtctaaaaacaacaggaggggtgacgattggcaactgtgactcaggcatggtgtctgggagacaacaggcagtgatcagtcctggaaacagagaggacacagcacacccaatctgaaggctacagtcagccactctttggctctggcagatttttactctggcagagtaagggcccagtgttgccagctgtttctagtggttaagaaaggttcttaaagtaaactcttccaatttttcctattggcccaaagttttttgaaatgttttgtggacaagagaaaaatatatctgagggtcagatttggcatgcagggtttctgttgcaaatttagcacaccttctttgtgactgatagctaattctttgctggctgccatcacagaaagtgtagatgttatcgcagcctggccatgtctctgaaagccattacctgctttgttctcaatgtgtaggtcccactgtgaggcaatttcccagaaaatattgagctctaattaaatctgtgccgtgttgagacttcataaatcaatgtgcaacactacacttaggacaagaaagaaacccttcaaatctacttttcacattgttgtataatttcgccatcatttctaggagattttagaccacgaaagtgttttgttttgcttacatttttcttttgtgtttttgtttattaaaggaaataaaatggaatggttggatatataatcccaggctgctttattatttaaaaagctaatggcatatcatttatcacattatctttcttgaaagatatgtcaggaatttctggcatttccaaagcaagccactatcagacctgttacccactgggaggaaagtgttccctatcacgaccggtgtctactctttaacgttgagtgtgctatccaacaagagatcaaaattgatcatttgttgctgtatttagtcagtagacttgcctggactttcacactgatttaaaatatcttttggaatatctttaggcagggcttatgttctttagttgactacagtccctgtgagtctagttgttttacactcacactggcccacttaactcatttacactacctgacaggcccgtatgcctatctgatctagagaaccagagtttttactggaattgaacacacacacatacaaacacacgcacacacacccagagcagaaataggaagagaaattccaactgatgtaaaaccactatctattagaaagatagtaaagaaagccaggacgggtgcggtggctcatgcctgtaatcccagcactttggtaggccgaggtgggtggatcatgagatcaggagatcgagaccatcctggctaacacggtgaaaccccgtgtctactaaaaatacaaacagttagccgggcgtagtggcgggcgcctgtagtcccagctactcgggaggctgaggcaggagaattgcgtgaacccgggaggcggagcttgcagtgagccgagatggcgccactgcactccagcctgggcgacagagtgagactcgtctcaccaaaaaacaaataaaataaaataaattaattaattaaaattttttaaaaaaagaaagcccttatttttgacaaggtatgtaaagtgcaatgtgaattgccacacagtaattgatacctgtgtatgactaagtgatgaccttcagtttctatgttttcttttctttttatttatttatttttaaattcacaaataaaaatggtgtgcaacatgtttttttttgaaattgtggaatggctaaatcaagctgattaacatattcattacttcacatgctcatctctttttgtggggagaacatttaaaatctctcttagcagcagttttcaagaatatgatccattggtttttaactacagtaaccatgttttacagtagacccttgaactgattcctcctatctaactggaattttgtactctttgactagcatgcgcccaaccacttcccactctttcttctctgatccatattttcatttggattttatttcaggacaatgaaatcagcatgaaaacatcctaaattctcaactttccacaaagctatggctcttctttcaacatagaattggattgggccattttaattgactcctatacaaggaattaagaagaacataaattttgagctagtaactctggccaaataaatacactcaagtttttatcagagtttttggccagtgcttctgccatttttttccctccacaatttggccttcttcaatcaagccagataaatttttgagacaaaagtcagacagtttttaatttttcttgctttgaaccctgtcataatgactgtgcaatacatgtgcagaagatgaggtattttaaaatttacttccttgcactgtcttacacagagtgctataactataaatttttcaaggtcttaaataaaaggaagcaaaaacaaaattattgaaaaattttttttgttgtgctggggaatatactatttagattgtccttcttattttaaatgcatgggaacagaatgacaggtgggatgctgaggagctggttgaagcatcagagcaatgctacagtccaacaatggagcattagatccccagctaggtgacctgatgaacacctttgtaaactctcatactgggaaatggcagtgaaacctttttctgaacccgtggaccagcctgcgtccgtccccatggtttcaaagcacgaatgcattacctccatggttgtggttacaagcaagtcacatgctatctacagttcatgataacaagaccgtcaaccattgctggagacagacactagaatggaaaatgaaatttgccagcgggatgtttatcccatcagaatgtaacaaaatatattaccagccaagagataagagacaagaatgtgtgtgtgtgtgtgtgtgtgtgtgtgtgtgtgttcaaaaatgtctatgaaaatgaaaacccacacttttctgtacagataacattatttgatgtgacttttatattttactacacagaaacaaactgcagccctcagaggccctgcttccttgtcatgttttgcctgagcatgtgcaaagtctttcctttgcttaaagctgaaaaactacctttatgcattgttagctgacaagaaagatcaagcacaattagatgttgtaacttttcactgtacaagcattgcaatgattgtgagcttcagtgaatttatctttgtgaaaggtaaaaattggctggaaagaatcaggagtagccataaattaaatcatgcaaaggaggatccatgcatcctaacaagttttctgctgcatctgcttccttcctgggctccacaatgttaagcaatattttagaaaagggtacaattggaagcttttaagcctgagtggtgagattttataactcacaacttagatctcttttaatgtgtaagccatattctatatgcatatttattatgcatcattgtaatttaagatatatttggatgtaggctgtataaatgcttttaattgttctgtgaatagatccttagctttagtttcacctgaatcttgtgcaaaacacagctaaataattgaattgtattatagacattatgaggtaattgatcttttaaatgtaaggagtaagattgatctataataatgtgctggggaaaacatttatagatatgtacatcatggttactttttgtcctttcaaatggactttttatttctatttatggagagactgtaactactgcttttaatgtctttttaaagcaagctatttaccagcttgaaaatatcatgcatttaaaatagaatctatctggggagtctaattactattgttcctatttgagccagttgtctttcagtaaagctatagaatctctcaaagaagtaaatagaaatactacttcttaaatgtcataggaagcatatccactttgtttctattagtactttaagatctataagaccttattactaaaaagtagaggaatataaagaattcatcaatttctgtatatgggctttaacctaattttccaggttatgcgacttataaagcactgtgaccaaacttccagagacagtaaaaaaaaaaaaaagaaaaaaaagttttactccttcagaagtattgtcatgctactgctgtacttattttcctaatctctctctatctgctatactccctccttttctttctttttcttttaagcttttatatttattccttcctttgttttcctctctgtaagacagctactactgagcactaattagtagaaagtcagagtggaggttatctgtgcatgtctttctgcaaacattactgttgaggccatctgaagagagggattgataggttaggctgttgcaccgtgaatgtcctgctttgcatttttaacctcagctccccaacatatatatcttgcagtttatatgccttttcatttaaccgaaacctcttttatttaatttttaacataacaacctacaattcttgtgtttttattatgctgtatttttctgtgtttcttattacatgtgattgctaaataaatcatatttgagggaaaacattgtgaaacatttggtgttttatgcaattcaatttagtgaggcattgaaaagttggagaaattgggggaaacccaaaggagaccaacttaaaaattgatatgagtttggtaagaaagtgctttttgttccattaaataaatactgattgaattacttattattatacctattattcataagctcctggctggaagcatggtgcatatatgcatatggcaatatttcctctagaaatttcaagtcttataaaggagataatctacacagactgtaatttatacctaataactagaatgccacataaaaaagtaaccagttgcaaataaaatgcacctatgtatatttgaggaggtaaaaaactgcttctgtcttcagagctttcaggactaagtggtgcatcagttggcatttagtaaataaaaacaagtttataaacattgcctattttccatgtgtggcctccatgtcaatgcttaacaatattatctcaaatcctcacagtaatccagtaaagtggtgttgatatgaacaaaggaaaccaagtctcagagaaaaagctttgtccaaggccatgcaggtctccattggccatgcaggtctccattggcagactccacactggatttggttctgtgtttctccggcaccttgttttctttctacaacatccacgtggggctgggcagaagcacagcagaaggaaagggtctgtgaagaagagcaacgtgaataaggcaacaccagagaagaataaagtagcaaagagtgttgaatcaaggtgaagacccagtgagtctcaattaattgaattaagagtaactggcatggtatgtgtgaaaccttaggctgtgtctctatgaagccaatgagttccagaagaagatgtaaacacttaactggtcatcaaatatgtgacacttagctgaattttttactttaagtatgattacatgataaatttccacctaatatcaaaaagctttcaaaggctatattttaaatatgaaagtccatatttatgtttagaaatataatttagatataaaacacatatttcctttggaagcaataatatattaagccttctgtcctctgtttaaatgtttttctaaatacggcaaaccttctctaccatttaatacaagtcctggacaataaagacaatgtatattttagagtctaaaaagcaaacacctaataatgtcctgcattattacattaatcttatcatttctttggaggtaattgtaaatatttaagatacattttctatatatgggccaacattatgtttaaagctctagttggggctttttattccttaataacattaattaatttctaggtaatttgcttaatatgtgtgaaggttggagagtttcctttgcatctcagttgatatatttttatctctgacaattaaagagtataatcatgtagttttagtttattgtagtcatactagtgcattatattattttcttacattatctcttttacttcctacaactactctgtaaggcattattattcgttattataggtaaggaagtgtggcagaggaaggtaaaataatttgtgtaaggtcaagcaactagtaagtagaggaaccagatctgaagtctaagggagtctgactcaaaaccactaggctagattgcctctggccactggagtaggatctgtcatgtttttttctgcttatgatattcattaccttccttttttactctttgttccattttgcaggctcttgtccctaaaaactatcactatgagagggaagaattttcagtgaccaacagcaggacggtgtgtgctttggtgaccaatttaaccacgtattactgtagaaaaggtgtcttttatttttgtggatgggagaaaccattttccatacttaatatatgactgtaaagtgtccttttcaaaagtaaccactggtcctcactctacacttgctactcaaaatgtggtccacacctgtgaacttcttaaaaataatctcaggtttctattaaactggaattggcattttacaaagataactaggtgatttctatacaaatcactgttctagacagtaattacatactattctaagcacctactagccacttaaatacaaggttgtttttcttcacagtagaggttcttaacaagtgacttttgactactgtacccttccttagatctatcagcaaacgtcatggaacaaaggctaaaggttcaggctcttgcgtcatttaatgaagtgtatgtatctgtattgatgaaatgtggttccttacacaaataattagaggaggacttggaggaaagacattaagacttgaaaaaagacattaaatgtgtgagcatgaccatatggcttttagagcaaaaaaaatctttgaaagcaaaattcttcataagaggcattaacatagttgattgatcctgttttcattggcctatcaaatattgcaattgaattatatagcgtacaaaggcaactttaccttgcacaagtgataaatacataactgttaacctaaaaacatagtttgatgtgtttcactcttatctgtcagctttttttaaaaccttaaaatacagaaaaagttatggagaatacgcttgaaatgtatggggtagggtgatggagaggacattaaacattagagctaattgccaagcctagagtggaaggaaaagggtttgtgttaactttggaagcagcaagccatctgaattcagaaacataatataccaaggaaaacaaaaagaaaacagggagctgatattggtttacagaaggaaagggagctgggtgtattttcacagtgacataagcccagagagtgtgcaggatgggtatctgggagacctcattccatctgaaactgtggggtgagccacacagtgagaaaagattcgttttaggcagtaggaatgagggagaactgaaaaggaaaaagatgggcagtgtgtgagacgacatttgttctttggtttactgaagaagcattggctttgggcaactgaatttggttgggcaaatttttctgcatatggtacaactttctgtctttttgggtcctgtatttacatcccatcataagccaaccaacagtgtaattgtttcttgtttgggtgtcttattttctgttttggatttgcaccttgaagaggctgaagcatgcacaggattctcaggaacctcccctgactgaaggacttctaaattaaataaatacaaaactcacaacattcagcttttctctaggcaaagccaggctcagaaagccctactaatgtggcaatgtcatgctttcaggtgtttcttgctttcagagcacagaggtagacgtgcaccaacctattcagaagtcagatgctccaaaggtaatgggaactaaacctgtgaggaggtacaaaatcgaggggctgtagtattaatctatgtgctgtaattttaaattttaagataacagagtgacccaaggcatgtttaataaacttctggaaggtaaatagtaatagccactaactgatattatatcttgaaatacacagctgaagtgtatacacacacacacacagaaacacacacatatatataaaatcttcctgatctcatacgtatggaagaaaaaattaatattatgatctgtagtgagcgagagtttatacgaagagcaggaatctattttttttccaagtcaaactttttttctatagatatgatcctataaattatcttttagagatcacatactccttaaaaaaatttttttttcaaaatccttgactttggatgttgatgaaatgtttacttttaccctcaacttcattggcattccatcttagcatttctaaattattacttaaatatagatataaaatatgtcctttttaatgtactcattctaaaaggtattaaagtgtactagagttcattattaaaaattgattttctgatgaataatatcatacatgcatatgaacaagtgaaaataaaaatgtctatttagaattaagaatatacctgtgcatcaagcatgaatcaattttaccttagtatgtgtgtgtgtttgtgtgtatgagtgtgtgtgtgggcatataaaaacttggtggtttcagatgaaatattaaattagagatttcagacgggcacaatgcctcacacctgtaatcccagcactttgagaggctgcggtgggcagatcatgatgtcaggagtttgagaccagcctagccaagatgatgaaactctgtctctactaaaaatacaaaaattagccaggcttggtggtgtgtgcctgtagtcccagctactcgggaggctgaggcaggagaatcatttgaacccgggaggtggagtttgcagtgagaggagatagcgccattgcactccagcctgggcgacagggcaagactccatctcaaaaaaaaaaaaaaaaagacataaagtaaattagagatttcaagtttctaaactccttgttttctaactcctgctccactcattgaaatcacaattttcccactgaaaaacagaagcaagtgacagctacagcgccttttaaatgatagtttgaatgatatctgtctcagattacaaaagtaatatgcatttaatctcttatttgtaaacaaactccattttgttgttgttacagatagcatctacatagcattcttcacttagtctgcaaggtagactagacattccatggggtcaggggtttatgttttgttactttgttttcccatagcctaacacggcttgcacacaacatagcctgactgtttttgattgaatttgttaagttgaaggcagctatatattcctgaagcctttcggggtttacctcttaagattgttgcaagaagtaagtatattgatagaggtaaggaacttagagcctgttgattcatgtaccttagtgttagctattgtttgttcatttatattggcatttgttcctggctatgtgatgcaaacctattaggttggtgcaaaagtaattacagtttttatatctgaacatgtaatcgctaaaattcattgagtgcttacataagtctgctaagttctaagtttcgtgtctctaccaacttatttctcacagcaatcctaagagataaatattactgttatatccattttatagagaggaggactgagacaaagctaggagaagcaatgcattcatggtcttccatcctggaagatgcaggcttgggattctgatttcagagttcatgccctcagcatcgttttactctttcaaaactaaaccaaacttcaagagattgctgaacttgagagaatctatgatttcttcagctgttgagaaccttgccatggcattgtgcttgggtcaatttaaagcgtataatttctataaggattatagactcatttcttctttctaatcaaagagcgttgcattctttaagtctttaccactttacctgtgttgaacatttggcttctctttccagctctttttacttagtcttttctgtatacagttgttatgctaaatctccctaatgaattctttggaaatattgctccttttcttaaaaacaatttctccttgtctacatcagaggtcagcaaaatttttctgtaaagggtcagatagtaaatattttaggctttggaagccacataccattataccaccctcatcctgctgctcctcctccccctcttctcctttcctttctcctcctccttcatcattttcttctcctcctccttctgtttcttctgatccttctcctttctcttccttttctccttcacaaccatttaaaagtgtaaactattcttagctggtggggagagagcatgcaaagaccagctacatggcaaatttggcccacaggcctgctctgcacagcactactatttcaggtcaaagaacttggtaccctaggaaaaagaatgaggctgcttctgccagggacagtcaccccaggagctccagcttctccaggccctgctagccaccctgaggactgcaaatgtcactatctatctccagcacacctgccactcattcccagtacacacatccgtttggaaggcctggctacagcactggttctcaacccttagcatgcatcaacatggccttaagggtttgttaaactacagaagtctaagccccatccccagagactctgattcagtagttctgggatgggcctgaagcaaagctaatgctggtagactggggatctcactttgagagccactggccagcaggtaaagcttaaactccttagcataattttcaaagcccctcacagcctaacccagcccattttcagtctagccttcattacagtattcactgttcctgatgcctttgcactgagtgcctcttctacctgagtcttgctgctccctttgtcatctttacctgtccctgtcccttcttcctctaaggatctgtgcatttgcctgctctcttgcaaagcctcttctcattcctctaaccagaactccatctcctctttggatgaacactgatctgctatccctctgtgcgaaagaattgcagctctctgtcatacacttgctgctagatttttagggaaaaaagcactgagttttacacactgtaaatgttcagtaaatatttgtggaataaatggatgtgaataaatgaatgaaggcaggaaggaaaagtgtattattatttgtcctgcttggtatgtgattgagtcagtccttttcagataacatctccagttaatttagtcaaaataagacccacttttcaagcactttagatctgcaaaatcccaaaagccatttatgttttttttctcagagcagacaaatggggagtgcatcaattcttaatagcatactaaaagcaaacctgaattatgtgagagaaacagtaagatctcttcatctctctcttgtctgtatgcttggggagttgggtctgctggtgtagagatatgttcataacagcaaatcctaaactttgctaagaagaaaagttcacatttcctagttgatttcctacagccttgacgattaataatgggaaccatacaggatttagaacaataatgactaattcttagtcattggtggttggtagctgctaactgtaacattttctaatctgaagacatttcttaaccattaatactttgatagaatggtaaaataatgacaaagaatatttaaagggtccagacagtatctgacccattttttggcccttgatgaacagaaaataatattattttgtatttatccagataccattaaatttgttacattttatgtggaagacttgaggcaagaaatatctcacccaagatagctcatgaaatttggccttcagttcaattttggacttcactttgtcacttaccagtgctgtggtcttggacaagcctaaattttttcatctataaaatggaaataattaaagtgcctatctaataggtacttttggaatgattaagtgaaatgttctatacaaggtgctgagaatatcacctgacacatagaaaaacagaaataatatgagctatacaaataaaaacctacctagagcttcacccctttcttttaaaattaattgatatttacagtttcaagagcatagcatggctttaactttagtagcaatatcttaaaagtccacatgatggagaggttgctccatgcagagtagaccagccattccatagtaaagattatattatcattaatttaccacttatgtccttgcttgagaggaaggctaaattatacatatatattaattagatacagagagagattaatatatagatttatatatatatgtgtaggtagatatgttgatttgttcactggttgctatatcatgtagatattctatttgggggaacaattttaatgcaaatattaaacagaaaaatatcaacataaagataaaataacagtaacctttgtatttcctagacagctcgttaaataaaaaatatcttcagacatccaggtgcactgagaagcaacaatagcaatttctcaaagaggaaaactatgtacacatacacatacacacacacacacaaacacacacacacacacacacacagcagcaaactcccccaatttcatggactcctcattagcaaaacaagctttctgcagaggaaatgaaaaaggaagggacttttcataagtggaaactgtccatgtgagaggaacagactcattcaacaagcatggtaagtcagctgcagtctaaaagtcgagtgtgtcaacactgaaatcaccatcaaacctttcctcagacagaaatgggggcaaaaggaaaatagccatggtgcaaaagacgcgttcatgtggaaatgacttagcagcagtggacaggaagctgctaagaataagttgtgtggccagagagggagagggaaggagctggccttgccctccctcgggtcctctccctctggctatctttctcttttcaccggaggcaccctttgtgaggacctcctcacctctgttactgtgtccagtttactctggatgtcctcctctgttctcacctggcttctccctaacagacaagaatatggaaattataactttgggaggtatttgtttagtaaagtgtttttctgtttttgttttgttttgttttgagatggagtctcgctctgtcacccaggctggagtgcagtggcgcgatatcggctcactgcaacctccaactccagggacagtgactgcaacctccagctctgccagggacagtcaccccaggatctccagcttccctaggccctgctagccaccctggggactaataattctcctgcctcagcctcctgagtagctgggactaaaggcacatgccaccatgcccggctaatttttgtgtttttagtagagacagggtttcaccatgtggccaggctattctcaaacacctgacctcaagtgatctgccagccttggcctcacaaagtgctgggattacaggcttgagccactgcacctggccctttagtaaagttttatttctctgtgcttaatttaatagaaatcaggttaaatttcttctctatctttcctttagaaaccttcttttttatttccatacagcaaaacattttatgaatatacatatatacatatttagtgtacattttatatatatgtgtatatatacatattttgcatacacatacatgtgtatatagaaatgtatacaagcacatatataaattatagacacaaacacacacacacactgctcaatagaaaaaaaatttaactccacattgcacaatgaaagaaaacaaggagattaattttggcaactgtattttccccagaatattgcattaaattatcttctacagatatagttgtgggtgtttatgatgacaatgtctattttttaacactgttctgccaatacgacaaaaaacttactttgaaaaatcttatttaggtactaaccagttccaattaactccttcctatatattccatttattctgacaataaaagtgtgtagctcgagcttgttatcataggcaagtccaggatttagtagtatcattcctgtcttagaattgaccttcatgtcattttaatttttaaactattgggtgttctcaaaagcaaataaaggaccaatgtaatatttaaaacacttgacaaatgtaacaaacaagtgacaaattcaaaacagaaaaatctatgtttcattagggtaaaagaagagagcaacatataattagtctgcttaggaaaacacatccacagaatatatgctgcaggagaaatgtaacaggagactcactcatctactgcaaggctttgaaaaatgttggtatctgtaaacaataaagaaagaaaagatattcttctctaattattaaagagatgttcaaccatctgcaaactatttttttaagttcttgttgttcccttcctttgattcatgcaaagccatgttgtacctttgctacttttgagaataatgggactttgaagtcaattaaactcattcctcagcttgaagggagcagcaggtagaatgttgtctttggctcctcattaagtagtatattgttcctttcaatgatctaatatctacagcataatccacaattccgcaggtaggtctgggtgattatgctttttcatattttatttctttggcaatacaaagtctaagagtaggaagtaaaagttagtacttaaatcctggggcaagtagggaggataataataatgaacaatttgtgaaattatttttatttttattttgcaacttatgagaaatcaagaaagggaaacaaattaaagattgatgccttgttctttaagaaaaggttatacctaagattgtcataaactcagcaattctctcattttacatgataaaggttatttttaaaatatagatttagacataggaaacatttttaaatgaaccatgtactttttttattaaagtttcaaatttacttcttttatttcttataagtcatcttagtttgaagtcaatgcccaagaattaaagtagaactcagggttttcttcccagcttagcctcattagcaaaagtatctgcctatgctttatgtctgaattggaggaagtttagctctaagtcaatatataagacagtataagaaagaataaaagtctatggctcctaaggaggataggcttttttattctaaaatctatcacaactcaaacaggtcagaagctagttagtggaagcgtttgttggattattggttcatttggggacacttattttctttggactctagttttcttatctataacataaatcctacctgtcatacataattaatgtgattattaacagaaatataggtgaagccacttaattaattataaataattgaataaatctttactagcaggatggcaataacaataaaatagcctttttatttttataagtctgctgcataattcagtagttggcaggtagtagactatcagtaaaatctgtggaactaaattaaatcaagaccaatggaatttgaaaaagaaacaaggcaataaataaacacagtggaatttgaaaaagaaacaaaaaaatgtttttgaaagactccctgttgtaagagaaggctcagattccagaattagaaaaactaaaaatgaatcacttaaaatgtacctaaactcaagatcccttttttagttgtagagaggaataaactaaaaccaaagggaaggacttggcaaatggtgtaataaaaattattagaaaaaagcaataagtgaagaaacagcttctgaaaaacatgtcaatacttatgtataaaatatctaaagtgcttcaggaggtaatccagtagaaagcaacgtggcatcatgatggaatcggaggtggtgtttgttttgtgttgggatttttccaagctcgagtagaagcacagcactaacaagtcaacttctggttgttatcaactcattttgcacctggaggagaaaaagaaaatacttcagaacacagtggaaactttccagaggatttaataccatgtcatgtaaatctctgtaaagggaaaaatctggtatgcagcacttagtagcaacaaagcttgtatgctaggatagagtcaattatccaattagtgatttgtaagaggaaagttttcctggaagaacttctaaattttaaaaacaaacaacaagcaaaaaaactgatcgtcactatttaggtcattttctaaagggaagttttaaaagacaaaaatcaactggttacaatgctcattttattacatacatacatgcatatatacatacgtacatacatatgcatatgtgtgttcatgcatttctaactcaagcaattttattccgttggctgtcatacaagcacacagatatcatttctcttctgagcccatattctcataatactgctgctttctgtctattctcatctcttcttttttcctttacaacttgcctgcagttcttgaaagaaaattagaaaggagaaacagatcttagagtcagaggggccctgacaagattctctgatcttctattatataattctccacgttttaccgagcagaaaactcagttctagagtggttaagggacttgcccaatgtcacacagctttgataaaaaggagacgctaccttttgcaatattaccattttatttccttccagaaacttatcattatcagaaatgatttcattactttattagtttacatgtatttgactgccttcaaacactaaaatatacacccatgagtttaaggactctcacttcttattaatacctagaatcagcagcacttaaacaatgtttagcatgtcataggtattcctacatatttattgaataatgaactagaattttggtcttgtgtttgtaaaggataccttttaaaacttcaccaaataatcctatgaaaaacagcacagaacagttaataatatctgactggttctatccagcccgtattacctaatatatgcatttttaattggcaaaaatgtctacagaatgttaatatttttaactccttgacaaatatgaatagtctgtggttcatttaaatgccttaaggaagaagaaaatcccaaaactctgttcacttgggaatcagatactgctgaacgttcaacaaatacctatgctgactttcactatgagaaccctaatttagctgggatgtggcaaggcacctggttaaaaatatttactttctccaacactgttgcatcaagggatagtccggtgacacagttctggcctacgagacattagttcaagatttctaaaaaagttttgcttctttgttattggttcttccccttttcttcccactgttctttctacttggaccgaccagatgcttggagcagcagcttggttgagatgtgagtttacaactctgagaatgttgagaaaaatgaaaattgcctgttgcttgttggtgtcttgattcactattccagtcctagacattttattacttgacataaacatatctctacaccgttgtttgctggtttttcttttatttgctgccaaataattttctacatgacacaattttgaactttctaaatgtaaatttgaagaaaaattctctaggcctcactttttctacctgtaaaatgagggccatagaccagaactgtgactcattttccagctcagaaaatgctagcccctctagactgctctcacctcttgaaaacaaagtcatggtaatgtgctccacaaaccttacaagtttatgtcaccaaagttcagctggacttctggtaactgtctgccttgtaagttaacactttgtctgaagaattatttgctgaatatactctaatattctgttactttcaggattctaatatggtaattttatatactgctgggattctcactatgttcgttccttcgaattagcttcattgttactgaaattcagagaaaagggaaaaccctgttaagtcatgtttatagcgtaagaaattaaaaacaaagatgaatccaatatcattttaatttacttcatcaagaatttttcccttgtctccaagttacaaattccctcctttacctacttttctctctaatccagtctcttgttcatcttccctctatacaccaagtctccattgcctgcatgaaatatattattatattcagtaggggaagtggctgcacccctacacacaatgtctgtgtccacaaaataaatgtcaaggaaagacctacggttgagtggtagtctctttacaaaatgtcatcaggcacctatcattcatgttgattatttcagaatttacaggacaatgctgcattgctgtgtgaattatgtgagatgtttgcatctcacatattacgtgagatgtttactcacttaaaatgtcatttaaaaccaaacattccccctagcatttttataaagctcttctctgatatagttcttcaaaatgttatgatgttataaaatctaacaatttaattttgttaacatagacaaaatagacatttcagcaacatagacatttcttattaattaatgcaactaatggagctttgaggactggtttttggaatcactgagttagaaaataagtaaaggcatttcttctacattctgcttactcagagaaagcaaatattaaaaattgtatatgtatatagacactttaacataagtagacatgctttttctattattcattttgcaattaaactgtttgctttttgatagtggccaaaaaaacatataaagacttttaaaaaaatacaatatatatggtttatttatgaatgcataaatctatattacaattaaatgaactctgtaatacttacacttaagttgtttgctatgacaatatttaaaaccagtgcttccctaaatgcccacattagaaagtgggaaagatctaaaattgacaccctaacatcacaattaaaagaagtagagaagcaagaacaaacaaattcaaaagcttgcagaagacaagaaacaactaatagcagagcagaagtgaaggagatagagacacaaaaatcccttcaaaaaatcaatgaatccaggagctgtttctttgaaaagattttctttgaaaagattaacaaaatagatagactgctagccagactaataaggaagaaaagagagaagaatcaaatagacacattaaaaagttataaaggggatatcaccactgatcccacaaaaatattaactaccatcagaaaatactataaacatctctacacaaataaactagaaaatctagaagaaatggataaattccaggacatatacactctcccaagactaaactaggaagaaatcaaatccccgaatagagcaataacaagttctgaaattgaggcagtaattaataccctaccaaccaaaaagcccaggaccagatggattcacagccaaattctaccagaggtacaaagaggagctggtacctttccttctaaaactattccaaacatagaaaaagagggactcctccctaactcattttatgaggctagcatcatcatgatactgaaacctggcagagacacaacaaaaaaagaaaatttcaggccaatatacctgatgaacatcgatgtgaaaaccctcaataaaatactgccaaaccgaatccagcagcacagcaaaaagcttatctactgtgattgagttggcttcatccctaggatgcaaggctggttcaacatacacaaatcaataaacatcatccatcacataaacagaaccaatgacaaaaagcacacaattatctcaatagatgcagaaaaaggcctttgataaaattcaacactccttcatgctaaaaacactcaacaaactatgtattgatggaacttatctcaaaataataagagctatttatgagaaatccacagccaatatcatactgaatgggcaaaattctaccattccctttgaaaactttgtcttatgcaagacaaggatgccccctctcaccactcctattcaacatagtattggaagatctggccagggcaatcaggcaagagaaagataaagggtattaaaataggaagaggggaagtcaaattatctctgtttgcagatgacacaattatatatttagaaaatcccatcatctcagtccaaaaactctttcagctgataagcaacttcagtgaagtctcaggatacaaaatcaatttgcaaaaatcacaagcattcctatacaccaataatagacaaacagagagcaaaatcatgtgaacacccattcacaattgctacaaagatagtaaaacacctaggaatgcaacttacgagggatgtgaaggacctctctaaggagaactacaaaccactgctcaaggaaataagagaggacacaaacaaatggaaaaacattccatcctcatgaataggaagagtcaatatcatgaaaatggccatactgcccaaagtaatttatagattcaatgctattcccatcaagatcccattgactttcttcatagaattagaaaaaaactactttaaacttgatatggaaccaaaaaaagagcctgtatagccaagacaatcctaagcaaaaaaaaaaaaacaaaaaaaaaaacaaaaaaaaaaaacaaaaaaaaacaaagctggaggcataacactacctgacttcaaactatactacaaaggtacagtaaccaaaacagcatggtactggtaccaaaacagatatatagaccaagggaacagaacagaggcctcagaaataatgccacacatctacaactatctgatctttgacagtcctgacaaaaacaagcaatgtggaaaggattccctatttaataaatggtgttggggaaaactggctagccatatgcagaaagctgaaactggaccccttccttaaaccttatacaaaaattaactgaagatggattaaagatttaaatgttagaactaaaaccataaaaaccctataagaaaacctaggcaataccattcacgacatagggatgggcaaagttttcatgagtaaaacaccaaaagcaatggcaacaaaagccaaaattgacaaatgggatccaattaaactaaagagcttctgtacggcaaaagaaactaccatcagagtgaacaggcaacctacagaatgggagaaaagttttgcaatctatctatttgataaagggctaatatccagaatctataaggaacttaaacaaatttacaagaaaaaaacaaacaaccccatcaaaaagtgggcaaaggatacgaacagacacttttcaaaagaagacatttatgcggtcaacaaacgtatgataaaaagctcatcatcactggtcactagagaaatgcaaatcaaaaccaccatgagataacatctcaggctagttaaaatggcgatcattaaaaagtcaggaaacaatagatgctggagaggatgtgaagaaataggaacacttttacattgttggtgggagtgtaaactagttcaaccattgtggaagacagtgtggagatttctcaaggatctagaaccagaaataccatttgacccagcaattccatttctgggtacatacctaaaggattataaatcattctactataaagacacacgcacacgtatgtttattgtggcactattcacaaaagcaaagacttggaaccaacccaaatgtccatcaatgattgactggataaataaaatgtggcacatatacaccatggaatactatgcagccataaaaagaatgagttcttgtcctttgcaggcacatggatgaagctggaaaccatcattctgagcaaactaacacaggaacagaaaagcaaacaccacatgttttcactcataagtggaagttagacaatgagaacatatgggcacagggaggggagcatcacacacaggggcctgtcaaggcggggggctagaggagggatagcattaggagaaatacctaatgtagatgacaggttgatgggtgcagcaaaccaccatggcacctgtatacctatgtaacaaacctgtacgttctgcacaggtatcccagaacttagagtataataataaactaaaataaataaataaatagtgccaggaaaaaacagagacaactccagaatgtaggacatctcacagtaccactgacctagtttcttgaacacttcacctacttgatttatctaacaatattttttcttttttttcttgcttactttatgtctgttttggcttacgtatttaaaagtaaatctcacacatcatgccattttatctttccatatttaaatatgcatctgttgaaatgggtgcattgtc

SEQ ID NO: 5637 - DNA, 52050 bp, Homo sapiens
  SDPR gene - 192525247 - 192537296 of chr2; NCBI Entrez Gene ID: 8436; Build 35; sequence includes 20,000 bases upstream of initiation codon and 20,000 bases downstream of termination codon of the gene
aaactgctaatgtgaacaaaagttcaaaagcagggcaagaggaggcaggcctctctgtgccttgtgtttacaaaagaggcaggtttcatccaaacacacagatctttctcgcacaaatatgtggctcagtgttttggcatctttcaaagcaaagttttagaggctgcttttcctccccagttctgtacacacacatatgcacgcacacacaaacaccagctttgaaatcggctggtattgtctcagaacttgaaacgcacccagcatttgaccttaactttccaacacttcaggaagcaggaattctcacacccttaggcctcgagttaaatgaacccatggaaatctctttccaaaagatggttaattgtacacaccacatatgtatcattttcccttctcactgaaaacatacaaggtcacacattccaaatcttgacacaagttcctcatctaacaatcaagcaatatggctacataacaaacatacacaacttgtgagatctatttgccatctgcatgtgaacctaggaaacaagaactgaagggcattcccttcttggagctgtagtgaaacaattagctccaacttttctttgtcctgtgtcatagcactcaacattcaaattcaaagaaagagacacttggccaagcatcagtcagttctcatccgttagcctgggagaggccaagattctttatccgaggaagcatcaaaacagcctgcaggggtctcccaaagaaaaatgagggtgctgttaccagaggttacgggaatgtatactaggtaggaaaatccacaggttagctctgcaaacaagaaggtaacaagatggccaagctcagttcggatttttagaacgttggtcaggcaataatgaggagccatggataactggttgatgttgtaagttttccttcatataggattatgtactcaaacagagaaaacaactaaaaaataaaaataaaggacataagaccaacttcattacagccatgtaattggttcgattatcttactaaggaatgtaggaagaaagaaatagactttcaagcctttgtccgtcctctgtcaaaatgaaaatagaacaagaaactcctgattcagaaaattatagaatatttgaattacacggaatctttacaggtctggctcaactacttactcagtgcaggaattttctccataagatcttgtagcttttgcttgcagacatacattccatcattgtacaactaataagcagaatgaccgtccttatatagaataaaaatctgtttacccatgaatcctacatattgattctagttctgctgactggaactgcatggaaaaagaaaaataatcatttgcattttcacatgacagcctttccaaagtttgaatcatggccactaccctcctccaaaaaataataacgataataataataattgatccctctaggctgaacatctccagtttctttcaatggtttcttatggcactttgcggactcttcgccattttgtatagctcttttctatacaggtactagttatgcagacatgaatgtagttacgtttttctaccttgttccaaaaagatttctggtggctgagttccagtttgtcaatactcctttaaaaaatatgatgcccaaaatgaaacacaatactccagagtcagaaagcaaatgtactattcagcatacttcacagataggctaccatatgtcactaagtgtttcgggatctgccgtcattgaggaggaggaagtacaagactgcaggggagtcaagacagagtcctgggttgtgttccagtatcattcagtgtgaaatataccctatataaagaaaacaacagatgtaatgtgctgcttttcatacaaaactcttccaacacaggaatatcttatcatagtcacaatctaatgttgcctcacaccccctaggggaaattccccggggatgtgttagaagaggaaactgccttgaaagaaatttttcaggcacattagagctgacagaaatcagctctgatgtcaggactgggtatgtgtaggatctaactaggaacacagaccaggtgcactcaatgagccatcacagcctgtcttgaaagccgcctcctagatgctcctggtgctgaagattttaactctgtctgattctggggtaagaagagaaaaatgagggttggaaaggtaggaggttgtaatcacagggatatgaaaagcacatttcgcaagttcaatacattccctgtgcctgctagaacaaacaacatagaggagcctcctttgatttgcagttgattgtaaactgtctggctccctgtgattttacaactgtttcagctaattcggaaatttaaaaatccagcccagggaccatcttgtgcatttatgaggcatctaaaagattactggttctcaagcgaggggataccttacattttcccccactcacaactcacgtttcctctgttcctaaaatatgcacacacaaaggacatggatcagcatggggtgtgtgtgtgtgtgtgtgtgtgtgtgtgtttgataatagttttcttttaattcaagcgtaattatttactttccaattctcctaagcaatgacaatcaattctctatgttttgtctaaagtctactcctgaacttttcatacttaccactgaaaataatgacacagtggttagtacttgtagaaatgtgacagtgaacttttttaagctgtttttgaactccgtcttgtcaaaagaaaaataaatgaaagccctgcatggtgactctagctaacactgactacatcttgcttatgcaaacctgcactgggactgtagcatttctccaccagtagcacaaccctgctagagatgaaaggcgtgtcatactggtattctgtagaagcatggaagttatctcacactcatatttcaagagaagcctgccaaaaccaatcctgtttgaaaagctagcctgcaacataatgttcactttcttgggaggaactctacttcctatgcaacacaaactgctgcatcccaaaagcaaaacactgaaatatttgtagtgtagaaatccacctgtatttttatatatgtatgttacatggaaaataagtaccataagggcaggaaatttttggtgggggaagggtctgtcttgttaactgatttatcccaagcacccagaacagtgcctagctcacatttgttgaatgaatgatatggctgagaatcactgtcccaaatccagttctgagaaaatactgctgctggacccactattctgcttagaaacattaagaagtaaacaatcctttgctagcaaatatcagcatacagactaacatggtgatggacgttaaatgaggagcctccgtagaagataatatttggatccatgtacatataaaaagttgcgttgatgttttactgaccaagagatcgtttttcatatcttttgattttatccgaacaagtttatgaagaaaagactggtagtcctcacaatcaggtgttttcatcttcgtgtctactaggaatttaaacttttataacttttataactctcttaactcaagcaattgcaaggtattaaaacaataggacagatgagttgagccctgatgccaatagacatctctagtaagattgaaaaactggaatgtggaggactcagtgccaatagagatgtgagactgaaactgcagggtaaaggtatggttgccagaaaccagcagagcagagggcctgcagtcaggaggccaggcaaaggggcagagctcagaggaatagcccaccagcctctccactgcccaccttgaaggatgaaaaagagaatggacaggctccttgacaaatgtgcttggctgtccccttagttctaataattgttctgttttattatatgttcatgcctgtttaacaattagcagatctggtagatggatgaaccaggagtgtcggcatgaagatcctgcaggcaaacattagcactggttttctagccacaaaacattatttctgataggtatattaataacaataataacaacaaccataaagtattcataaccatcttattgataagtgacattttttcctctagaaacttcaaaaacctcatgttattatttgtacataagtaagaattacaggttaaacaatttacccatgcttattgttgtcagtagcagagtcagaaagccccatgctggtctacaccatacacatgtatagattctattagattgctacatggtttgttttgatggtttcacaaaaattctatagtggtgccatatttgaaaatgaaagaaattagaaaaatgtttattacagggttgtattttttcccttcagactcagaccaaagatttaaagcctgagtcaaatattatttattctccactgtactaatttcaaggactagcatctttgggtctaacaccagtcatatttggattgccaagccctgatgagcaagccaaaatatatgtggtgggtcatagggaaaaaaatgtttaggtacattggaatcaacattaactgtactttaaaagtgttaaaaaccagctctgagacacaggttttcccagagccaagataacatgaaaaaattttcatgtacttggagccacgagagaaacgaagagccaagttctgtcatctggtgcatatttccaaggggccgactagagcccctgggactgactcctcagacctttcccaggaaagtcttctaatgtccctaacagaattcacaaatgggaccttgggaatcactcgcaatgagataacatagaaacatctttgtttccaagtcatcatttcctccaaatgaagatggaagctaagctttccaattggaaatttccacaaatgatgagaatgtgtatttaatgattatggctttatatttcattgaccttatccccattcaatgtatataaaaataaaaaagaagcttaaattcaaccaaattaactctgctttttagacctctttcattttttagtagctatagagtaaatattataggtgaagattatgatactattccaacatcctcttcagggatgtgaacaccgggaaaggggtacaaaaagctgtctctgtggagccatggaaagagtgtagaccaggaggcaggaggggtgactctggcccaacctcccagctcactggttgtatgatgtaaggcaagtcatataatagttttttgcctgttttatcatctgtaaaatgaaagggctgaataataatgatggtgacaataataataaaggtagcaataataatagacaggtgggagagcttggtagtgatcatttaatcctttcaacatccctgtgatttaaaataattgtctccattgtatcattgagaaaacaggctcagatatagtaatttccttagctcaatggcaaacagaggtgaacttactgagaaattaataaagtttaagcttctgaggcccttatttgcataagcccccttccaagactctgtacctaactttatattctctatcttaaagagggtttctaaaattgtctaagtcctaggccccataagaattggatttgcccctaatgcaagcaagagatgaagctggaattcaaatgcaagtgatccaatgcgaaagcctgaaatcctactccccctactgaacctgctccctttcaaagattcctttgttcctcatagctctctaagctatctattgtggactgaactatgtcctctctaacttcacatgttgaagccttaacccccaaggtgactgtatttggagattgggcctacaaggataataaggctgaacaaggtcctaatcatttaaccttaagtggagtcctattctaagaggattgatgtccttatgagaaaaggaagaaagagcatagctttctccctgtgtgtgcaccaaggaaaggctgcaagaggacagagtgagaaggaggccatctaaaagtcaggaagagaccttccctggaaacaggatttgctggcaccttgatcatggacttctagcctccagaactgtgagaaaataaatatctgtttttaagccacccagcatgtagtattttgttatggcagctagagtagcctaatacactatcctatgcctgccccatccctgtagtttcctatatctcaaataataggagtgcctacatttcctttacagggtcattccacaaagtagtatcttagctacagtcaggaaaacatttttctgaacctaattttgtattatttctcctagaaattaaaatgccttccttctctctggttttgaggaaacagtggaatattaaatttccaatgacagacagcagaagtccaagttctaatatcaattaatcctgatttgctaatgataaaccgggctttcatgtgcaagccattctagtatcctcaggtttaacaacttcatctgcataagacctttggttagaaatattaatcaagactatactacagaaactttgctaatataatacaaaaaatactacttgattcctctttacacggtgtaatagtcacaagtccctcagtaagaaaagtgaattaagtggacaatccaatcacaagattgttttgaactcaatataggatgctaaacatatatctgaacacaaccaacagtttatttacatttctcactgattcctccgttcttatttatttaattgacatttactcattcattcactcattcatgcacaaatatgtgtttaaatacctactgtcatttaaatgggctacaacagtgggtaggcagaattataaggtggcctccaggatccccaccgctggtctacctgccctgtataatcctcacccctcgagtatggtgacacctgtgaatatgatgagatatcactcctctgattacgttacattaagtagcaaaggtgaagatattttgcagatgtaattaaggtctctaatcagttgactctgagttaatgacaaggagattatcctgggtgtgtttggcctaattaggcaaacccctaaaagagggtctagagataggagactctcctgctggccttgaagaaataaactgccatgttgtaagaatgtctcatgtctagacccttgggtagtctccaggaactgagagcactccccctcaccctggtttacagccagcaagaaaaaaaggatgttagttctacagccacaagaagttgaaatgtgccaacatcctgaatgacctcaaaagaggactccaagtcttagatgagactgcagcctagccaataccttgatatctgcctggtgaaattttgagctaaccctagtgaaacccagcaaatctaaccctggactcctgactcacagaaactgtgagacaataactgtgcgttgttttaaactgctaagtttatggtaatttgttacaaataatagaaacataatacaaaccatgaaaaatatagacaaagtccctgccttcctggagctttagatctagtgagtgacacaggcaaagagcagctcacaaacagtattatttcaattacacagtggtatgtgaagagtatgcaacagggtgctcagggagagaaagactgaggatggcacccctataaggtaggatggtcagggaagactagctgaataatgagagggaaaaaagccagccatatgagaatgaataggaagaactccaggcagagaaaacagcaagggagatgccctcagcggcactggctatatcattacaaaattaactccaagaaccacatggagacactgatacataagctcatttattcactgaatgtttaatttaatataaatgtataactgcctaaaaaatatgtttcagtagagtgggtcccattggacattaatcggtttaactgccgttagcgaaagttctaattatagtagccttttaaatttggcttttcttcaacctttgccaggtggaaatgtgtcttataggactcacacttagcacataatggaaattcaaaaagacagttattgaattgaaatgaatgctgcaactttatttaaagtttcatgtttgtttgattcttttagggtagaatgttgtctcctgttaggaggacataaagataaacagcaattaaattgtactctatccaagacctctgatgtataagtcaagatctgaatgatgaaatatacagcagaaagactatatgaagtgaatacatgcaaaatgaggtagcataggtaattttggctagctgactagtatttattgagctgtatgtaataggcactctgtggtgtcatcaaatccacaaaacattaacaccacaataggtattattattagcacagttttatttaataagaaaagtgaggcttcaaaagattaagtaattttctcaatattatacaactagaataataagctggaactcgaatctaggtaactgactctaaatcccagcctgtgaaccactagctgtaagatgattgcaatgacgactaaaatgcactgagtttttaaccacacgaaaggcattagaccaagcacattacatgtagaactaatttaaccctcagaccaaccccatgaagtaggtactcttaatgtttctcattttataactcattttatagctaaatctcagagaggttaagagacttgcacaaggtcacttaacccttgtaaggcttagtccctttatcctaaaatggggcctcaatacatggaccttttcccagacagtctggcaccacagcccacactcaaccagcacatgacactgctgcactggtatcaaacctatgatccaaaataaaataatacttactccaaaacatacatagcatatattctgttcctcattactctggtgtcaagtttacatagctaaactatgtaacgtacatttggacattttaacgtcatcattaatgtaattcattttagttgccttttttcttttcctctggactgtctagttatcttccattgcttggccagtggccagggctggagtaagatgttctctcccgtccctacccaaatctcaaatttgattagtaactaaaatgttatgctctgcaattgaggctaaaaaaaattaattaaaatgagtgcaaattgcttgtctacattataacctattgtaataagtattttgtaaaagtggggctaataagaccaggggacttccttgttttgtaaaaataagaccaaagtgacttctaaatccaaacaaagtagagaatatttctcaaactaaataaggtgacaagggtgtatcctaagggcggaattacagctaacatatagaaagtttgtatttaatcaattgtattgtaacctatccagggcaacaaatgtgcaccagaagggatatggtctgtgtggaatctagaaaaggagatccaaaaaggaaacacctgtcagtgtttattcagctacgtcctgggaagagaggactctgggtctacaacagtgtttttcaaattgtgggttgtgactcattagtaggtcatgaaatcaaattattggatagcaactgacatttttaacaagtaaaatgaaatagatcagagtacactgaatgaggtaagattaagtattgttttgtgaaacttctgtttctattataaatatttacatattcatgtatgtctgagtgtgcatgtactttttgatatgataatgcatttcactctgtggatgaataaatgaaaaccattggtagacaaatcttattgaagttttctaagccaggggttctcagactttgggatttcatgaaaccataaatcaaatcacactccaaaaaaggaaaaattgggacctgatagggtcgccagtattcttattctgtaaagttaaaagtaatttaaaaaaaattgtactataatgtcttaaaatcaacattttgacatcagtaataacaatgacataatcaaaaataaagcacattcttctaaattaaatacatttagttttatggtaagtccactgtattgcccttatttttttcatttctctacagattcatgaaaccccccatggcaaggcataatgtacccaaaatatgaaagatcagtacatatagttacccacaactcaataaaacatttctcgggaatatcaatcttcttttatgccatcttagcatttactaggcttccaaaatggccactgtgctttgttataccaattagctctctttttattaattaatacacagatacttggattcatatatttctctcctgtgagtttcagtagagtgagttaattttccccaaatattatctaagaatgagcggataagattacatttctggacctacatactggagatttgggtattttagaccatgtgactctgggaggcagagtcaaagatcagctcacaacagttcctgccattatgaataccagtgtgattagctcaaaaagctgaccccagaatttcacatggcgtttcccatgttttgaatgctcttcaagaaaaccacccggtatctccttgcttctgcctgctcctgcatccagactgcttcctctttcaggatttcttttaaacttttgtcatctcggcttctccttaattcttgcctggatctgaccttcttcctacctgaacaatagctaagcttgaacagacactgtgaggaactctcctgaccactttgttttacttccatcttccaactgctatcaatatatttgtgtccaaaaagagcctccagaacctcatcagtcatgtcccttactatgacatggtatatgacagcctgaagcagttagctggtctccctttatgatttgattttatcgacagctttttagggataacagtgccagatctgattgtcaacaagttgcaccatttctagcacataagaacctgagtgagacagcattcattcagactccactaattcgtaacgaacttttgaaaattagaaccatattggacttgagtttacctctgaactatttatataaagggggtcactaaacaaattagcagcatgaacaaaatttaaagagcttgattagccattttgtttcaaacatattaacacataaattatatgcattccaaaggatagtccgcatgaatccaaatttatctattcattaaaagaagattccaatagcacttaaacttagaaatgtttttctagcaattagttcaacttaccacatatacttgaaaataatataattacattgcattttttgaaagaaagatcctataatttagataatatttttctctaatttagatcaggctccctcccatttaaacttaattagttcaatcttatgtcagggatatttacactcatttactctactgacataaccctctctctgccctgattcctttaaaggtcaatccctgaactggaaaaactctatcttcccacgttttcatttctcttacaccctgcagaggagtgaaattagcagcgagagatggacatgcctaatcaccatagtagattgtggctctaagtagctgctgcaatgaactatatccgctagctacggtgtccaaaatgcaggccaaatacatctttccctgaagggctcttccattataggttaacattatctttcataatacttgaaaacttcgaaatgtattcattgcctcctttgtgctcctagaactttggtttttttctattgtaatgcttaactctgtccttttctctcactggccgcatatttcattaacagtttctttctccatgcttttaatttgtattttccccaacttcacccttatgtcctattcaaaggtcttaaactcaggaagcaattaataactgtttgttgaattgaattagatcatacagtgaaaccattcatgttataaataaggaaagccagtgcccacaaggttgagtgttcaatgtcatccagttagtgtcagagccaaaaatctagttcaggtcttttgatttctcagtccactgaaacactacactttgtcaaactacctcgactgtgagaagaggtgaaatctagtgaccaaaaaatgctgtattgtttctgtttttaaagttgagaatgcgagacaatactaacaaaattactctgcaaaaaaatgtgttaaagtgttcattaaattataaaataatatcactggaaaaggcctccgaaatcagagaccagttttacaaatgaggaaagtaagccccaaagacacgaaattcctttcacattataataaattccatcatgttttgtgttaatcagccctgatatgatgactgtgcctgtgcaacagcccataattgttttaggaggagatactgaaaatatgttttaatgaagcagtcaggtacatgaggacagtcagccaaacccttattccctctgctcttgtcacctctgcttgttacctggatttctggctcgctcaatatttatttattttttcaactggaatagagccatagcttccactaagacaatagttctttgaagccaacaaatgtgaggccagagggaaaggaatttggaatcacacatttttagcattcagagataattcaagatagttcaagtacttcctaagtgtaaaccaccaggcaaatgcttctagctgccaccattattcacctacaaaaatattttattgctgaatcaagttgcattgccaaaatatttttgatacaaagttatttataagcagtgggttctatccagatagccttgatttaaccaggaatcctaaattttaatatgaatatgtagtaattacagaaaaatgacaataggtagttcataaaaatacattatatgactattcattaactcaaaaaacagcagaatgagaggaaatggttttatgttgctatgataaggatttaaatcatttatgaagaacttcctgacatataacagacttggttagcaaaatggttttagaatttccttctctaaagctttcaaattaatataactttcttttcagacagggtaacacatttccgttgttgtccttggcttttatgggcttgtttgtttgctttaatagaggacagaattttatgacttcttgacatccatctatcatgaaacttcaaagaacaaattcacaagatagacctcaaaactaacaatttcaaaataaggcttattaaacgctgaaacgtgaccaaaggaatctctaaaatcgccttcatgggagagatttaagattcaataaacagcagttaggtgtcacgagacagggaaaggaaaactgaggaaaagggtggaaacgctgcctctagccggggaaggaagagcatattatatctatctgctcatcttgctgttctttgcagagccctagacttcccctaagcatcaatttggtcatggaaaaacaatagatacccacccatttccttcaagcattattttccaaggttttacagtatctcaagacatcatatatgaaaaatgctgtattataagaaaagcattattactaaattatccttttaatttaaagctctttgcctcaattcctgtttgctttaggggtctgcaatgaaaaacaaaaactaagggttattgtgatattaagtgtttcctgaaactaaaaaaggacaaattcaacacttcatcaggtattgccttgtattgtcttctaactgtttcttgtgcgtaaatcttgctcttcctgtaagactctgaacctctccaggatgaagatgttgatttatatttatttcatattgtctgaaagtctaagtctgtgctgagcatatagcaattcacttaaggcagttgattaacttatgtgtaagaaaggccaaggcactcccatatatttccctaaggtacgccacacagtactgagtgaatgaacagggcagatagagacagcagaagaggcattaatttttactatggcatatgcaatacaagatatcaacatatttttgaaaagaaataaagtcacaccttcaaagccatgaggctgaactaaatagttatattagtaagggtttttatttaatttatgtatttaacacatgtgctgcttacctgttccaggcactggtccaaatatttcacaaatattaactcatttaatctctgtaacaacccataatagtaagaattatcattatcctcattttataataagaacctggggcctacaaaggaaaagcaatttgtccaaggtcatacaaccttgctggaatcagaaactgggaaatctggtttgagagtccatgctcttaactgttactctgttgaccaagggcaatgagaaaaggtggcgggagagagaggtaaggggacaagagtgagagagcaggaagagctgccatcttcaatcattaagtcaatggtttctatttctgtgtcgacagtcagcttttgacatctccttaaaaaaaaaaaaaaaaaaagaaatacggggaaaagaaggtaagaatcaacagggcacacaactaattatttgaagggcagcatttggaaggggcccatatcacttttcacatctattgaacagaagtcagtaaaacgtccacacccagctcaaagaaaggttgggaagtgttgtctttagctggatgcccatgtgcccaactaaaactatatcaccatgttaaaaacgacaaattgctacagaagaaagccctttcctctcatccagattcctgcaacatatctctgcttaaatggtcctggttcaaagaggacttccttgaccaccctaagatagcatcctcatcactctcaggccgcttagtctgctttagttttcttcctagtgtttatcattatctgatattacattgtgttttatttattatctgtttccaatctcacacccctccccctgccaaaaatatatgctccataagaacaggggctttgtctcttgttcactgctgtattcctagcacttaatatttactcaataatatttgttaaatgaatgacttatgaaggaacaatgttctaatgtgtcttcctacctgtgttcttgacaaaaacaaaaaaaaaagtaaaaaagagttaactggcaccagagcaccagaattcttcttagaaagggagaaaactttcttttatgataataataacatatcttcttggggtagaacataaaacctaatgtccagtgtttgagtaatatttcttttcatgatacagagagtggatggaggtaaggagaaaacagaagaaagaaaactaggaggagaaaaaccagcaagatgtcagaaatcttcctaactgtgactctaaaacttcattaacatctactccacttagaaatactttatgtgagtggattgtatgatacttaaagaaggggttggagtttacaaccgggcagttatggagaagtacagatatggcacatagagaaacacttatttaaacccaagagccagagaaggccttgagaatgtaagctcctctagagttttctaaaatcttggagttcctaaatgacagcacatgggaagtgggtaaaatttaccttatatgtaaacactatacattatttatgcttcatcactcatttatgtaggatttccttatacatttctctacttcttactgacatcattgatacacaaggactttggttggaagagattcgaatcatataatcatgtgcttttcatcattaatatttctagtgaaagtaaacacttgattcctcttcactgccgtagaaaaagataaggcaagacgttcaggcattctgcaaactgcaccctcactttctatccacacccactgcaggattcaatgactcgatatagagttcgcccagatagggtcagatgatctttcaactccaccttcctttctgcataatgcattttatcctggtaatatgcttttttcctaccaccttttggtattaaacccagtgttaagtttttcttaaggtgagaataatcacacaaagtcctttattttgctttataacactaccttagcagttaagttttggaaacagtagtatgcataaaacatattagatagaggggttctaggaacaaacctagactattaacaataattattttagaattacactgtcattgcaaactacagttcccagttatctactgttgcattaaaaaatcaccccaaaactcgatgacataaaacacgtggatgtgtcatcacatggtttttctttctttccatatggtgaatatacaaccctaggactgcctcctgttcaagaggaaacccaccctttgaaaggctttcaaactccaacatagaggacaggggaaaatatatatggagtagcctgcttagctttctttgtttctttagccactggggcaaagggctttcttttctgtgggatcctcattccaggtctcctattgctgtcagaccaagagtgcccagattactttatggacctacatggaaaaggtcaacaaaagagaccactgagctgcctctggtctaggaattatgggctagtggttcagaataggaaaccacatagaaattgggaccaattccttaactgataataaagtaggtattttcctggaatgacttctgtgcttctgtgacttaaacctctgaggttaactggtgttcgggggagctggtgatcagctggaggattctgagtcctaaccataccctgtcatgactaaagccttcatggtcctagactccagcagagctaatcattccctctctgtgcccacacctgtacctctatccctaggatttgtctacctacctatcctcctaaggtgggagattttaaagggtaacaaatacacaccattcatctttgcatccccagtgcctagcacttatttcccaccagccaagtgacccatctctacatcttattgctgtacagattcttcttaaacacatcaccttcacgtgttcaaaaacctccccagcctgtcactgtatcaagtctaaactccactacctaatttccaagaaacttcataatatgtggtaggtagaattaattattttaagcatttcttttaagaactgaccgctgaaattcactgatttctctcagacagaaagaagacttaatttaggacaactaaatggtaagtctggctgctcagggtagtctattacttagtttcaggccatcttgtatgttcccattacatagctccttctagctcccctgattgtaaggttgtccaacaaaacaaattgcatcacagcatgaaactattcactaatgaactgatcacttttaaatataatttttaaaggatatatgccaaattcattaaaatgattacctgacaagagagggaagggaataaaatggaaatggtgatcaaaaggggctccactttatctgtgatagccttttaaaagaacaatctattcacgtggtgattgttttcaaaggtgactacaacagtctctcccaagcggctcacccttttgtcatgggacattactgcttctctctcttaaagaggtggagtctatttccaccccttgaatctgatcttggcctgtgacctacttggaacacagaatgtagaagtgacaaggggagagttccagagataccctgcagccttaagacaccctgcagctttgcttctactctcttagaaccctgaagtaccatgtaaaaaaagtttgacttccctactagagagatcagatggagaggccccagaggctgaaaaatggaaaagagagaaatcccaatatcctagttgccccagctgaggaggcagacacgtgaatgagtccatctcagattcctcagctcaaactacagatgaatgcatatgcctagcagaaataatccattctagttgagccctgactagccaaccacagaatcatgagtaaataaaacgttattttaagccactgagtttcatgctggtatgttacacagcaatagatgactgatattacttgtgttattcaaaatatatattttaaaaataaataagcccacacgcaaacctttctttctatttaacaactagcctctttccttttaccacctcacaccccatctctttaatgtctctattcatctagctgattatacaatatccaacaatgcaatgcaaaatcagcgcaaatcaatgcaaaatcagggtgaagtgattataatgtgaaatcgcaaattttgcaaaatatgtaggaaatcatgaagttgatgaaggtaatgttagagaagcccttgaatcatgggcaactcctctgacaaatgagaatctgcagctggaatagttaacattaacatttgaagaagaacaaatctacatggatgatggcacaataagtgcttcaaaaagaaatgatttgaatgtcaaaatttaagagaggctcttggaaaattgatgaagccctcaaatatttttgaaatagtgacactctatgatttgcccacaaaagtcaaatgtaaaaggacgtcgtgtcatgatatcatataattttgttagaaaattatgcttcttaaaatcaacacttgattcatcctttattctaatatttaacacatttttgaccaactaaattttattaaatataaggtaaattaattttaataatgttcttacttttttaaaagataacatctcaaccaaaccttcttttcaccttttttggtctctatttttaaagcatttgctttaagtgggttttggtggcaccaattatctgaagaaattgaaggcctctgtaaatatctttagttcatcttcctaactggcagctatactcattgagagcagggtctccgtcatgctttgccaatgtcttctggatagtgcttcatgcatatagcagaaggcagagattcaaccaacgtgataaccaatggcctgctgattgattggcttacatgtaggtgttactattgacgaatggcattgttccattatcaatccctgacctggtatgagctggcatttgttcgtctcaaaattgttcatagaaggcctattacaaacttcctgctgaaagcactttcaaaggctggatacgtttaaaatcaactcaagcatgtaaagccattttaggaaaataagccccacatcccaaggttcagctgaggagggccacatttgagaacaggtgtgccacttcactgagcaggaattttaaaatgtcaaacattagaaccacttgagaaactccaactcagcctgccaacagacacttctgggcacgtgtcaataaatgccttgcagagatgggcatttgagaaagtctctcctcaccaactcaaagttagttaaaacaaatcatcacggtaggttcttaaaaagaccacattttatttttcctcagtctcacttcttgaaaaaaacaatcatttttttaaatgtggtcattcaaaaagtttccatatattacataacagtcataacagcagtattactttttttaaatatccctgaagttcaatctcttttaacttattttgtatctgcaactgcaagagtaataagaactgagctgttttccttatcattatcagagttagtcccattcctttgcaaatgagaaactaataatacaaacttggctgcagtaccctttaaactctatgcctcccagtaggacacccggtgttctgcaacccatcagtcagttctagggcaaatgcaaacaatactttccgttacaataacttgtatccaggaaaaagaaacaggcaccctgttgcatctgcagcatagcagccagagaaaagtttaccagctttagccaattggaagctgtggagctgggccaagttagcatgtttttctccgcctctagatgaagtcatgattgaaatatgacattgaaagggaaggggaacaggaaagaaaagctaaacctgcaacaaagtgtcctgtgcccagaacgcggttaggaagtgtgtgcatacgtctgaaccctaaatggttctcagttctgtaaacttctcctcccactgggtggagtagggcctttaagagcagctggaatgcagttcccctgatcagcgtagccagttgttgcctgtctgaacctctgccagtcctggagactggtgccctgagctccaaccagcgggcctcatcctacaccctcaccaccgcaacttctcacccgagcaagaagcagctcccagagagaaagaacgttcccacctgcctagccatgggagaggacgctgcacaggccgaaaagttccagcaccctgggtctgacatgcggcaggaaaagccctcgagccccagcccgatgccttcctccacaccaagccccagcctgaacctagggaacacagaggaggccatccgggacaactcacaggtgaacgcagtcacggtgctcacgctcctggacaagctggtgaacatgctagacgctgtgcaggagaaccagcacaagatggagcagcgacagatcagtttggagggctccgtgaagggcatccagaatgacctcaccaagctctccaagtaccaggcctccaccagcaacacggtgagcaagctgctggagaagtcccgcaaggtcagcgcccacacgcgcgcggtcaaagagcgcatggataggcagtgcgcacaggtgaagcggctggagaacaaccacgcccagctcctccgacgcaaccatttcaaagtgctcatcttccaggtcagttccccctatgcctccttacaggcgggctggaactccttatcattcttgatctcgctcatcctggctctcacagccatttttacatttgtcctgcctgtcagggatcacacatacaaggcactgtcccctgtctgcctgcggaaagcaaatgtgaaatcttcacacaggggtgggaatttcccaggtcactacagactaatccaaagaagatgtccccgggcttagtaggccccgggtcatttgtcagggagcacctggatgcactctgtacaggttgggaagatgtgcaggtgcgtgcaccctagtcaaattcatttgtctctttgcattaggagcttagggctctggctgcagctgttagctggacagggcaaattaattcagtggctgttcattaactcttagtggaaatgaagtgatcatgtgaggtattttgtggtttttttaaccaaaaagtcaaactatccctttatacaaaggctatcaacgttttggggaccaatcaaatagaggattgattccattagagttagccttgttcttttaagacttttttggggcaaagcaatcttgtggagttcttttctagcaaatgcactagaaaaagagagtacaaacacactagacgtgcctctccttgttcagagagaccacaactgttaagtaaaataaaaggagtgttatcagttatagtcacaaaggctagtcttaaatgtttctccttcaaacggttgccttagaataaaaaggccacttaattttttttaatgcatcaatgatgcaattaatgtagcaagaggctatctggggacagggagattgcgtggggctcttgttccgccaagtggtgggcatttgtgaatcccagggcagccctgcctaatgctggaagcccttccgcccagtggaatccagccagcacagagcccaggaagcgattgccatcctcgctccagggctgtctcgttgtgaccatatgaataggagaggatttcaaagccatggaggggagaggctataaccaacagtttgattgtgaaaggcacacagggaaagccttcatctcccaagagagatttagaaattgggatttaaaccgagggagtcttctttttcaaaatgaatctgctctgccaagttagaagccttcctacccccataaaaggaaagactcatctcgctgcttttttgtcctcctcaaattgcacttgaatattgtaaaggtttagggagcctatgtcctcctctaccttgcaggcttttgcagctgaaaacttttcagcttttaatgcaaatgcagtagcttttcatgcaccagatgaattgaaaagagatactgtaactgggcctttcttaagccatatgagatccttactttattagcctaagagatattagaaatctcagctctcaagccatttctaaattaaatactgatctccaaacaaaaccaaacatgtacagacctgtttaagtctgagacaccaaaggaaattttcctgcttccagtatgaatcaggcaaattatctcttgtcccatccctcagttaaggaggaggaaaaaagtatttatcttgtagaggaaagtcacaattcgtcaggattgggttttgttttgttttgtcatggatgttctgcagatgttggggggagggatggagaggatatgctagtagaaattcaggagaattataaatctgacattaaaaaaaaactgcttgggaacttaaaggcatatgctgttgtgagggtctgacatggtctcctgttttgtcacattgaattgacaggtgtgaaattgcagccagatatggtagaaattctccatatagtgagtaaaagctgaaacaggggtgctcaagaccaaactggaagctaagaatatccacagaaatgtgctcggactccattctgggccctttagaaaacaatccccaaggacacctttaaagagcattttaggaggcaggaaactagaggcaagtgactggacctttcttaagccgtgtaagatcctttattagcctaaaggatattagaattctcaactctcaaggcatcgcaagatgattgttttgtataaaactaatgcaagcacagtccctcagtggactctcttgttccttctaaaagtagcagtttccccagagtagtaattatgccaatggataaaataataatttgtattagagagtggtccagtatagtagttcagaagataaattttggagtcacacaaacagtagttcaaatcctagttctaccacttgctaaatatgtgatattggacacagtttgtagcttctccaaacctgtttcctcatctatacactgatgatattaataagagcaaaaaaaatcaagcacttaataaacccagcatacattggtaagcatcttatctcatttatcccgaatctacagatgaggatgttgagattcgaaaacgtttatggcttgtctgaagctagttagtaagcaagtggtgaaactgggattcaaactcatgtttaattgatttcaaagcacgtactcttgaacactaatgcttcttccctcctatctctctcatagagtgaggaatgaaagaaataacatttaaaatagttagcaaggactggcatggtataagtgctcaatgaatagaagatattactgagtggatctgaaattcatttgctcagaaagaaggctacacttttgcttggttagaaatatggtccttgggtaaaaactgacctcaccttgcccaggatcttaaaacagctccgctacacacagagaaccatgtattgtataactaccgccatgttgaaatcaacattatatctcatctccatgaaagcaaaggaatcttcccaaaagacctactcaacgaaccctccagtcacagcataatcttcacagtggagcataaggggactgcttcctagacctgtggagaatgtggagggcaaatatgtaccaggtgttactcagtgtctttaggtaatttatcattttcagcccatctgaaccctatgccagacttccccttattaaatctactgtttctaatttaagacaaaaaattatgtaaaaataagagagcgagaaaggaaaatctatcccatgacctgagcatatttggtatggtactgttgagaagagtacattttcagtttgtggaatcctgttgagcccgccgaaatctacaggtctgttttggttagtggttgaagatacttacacattttttttcttttttttctttgagacggagtctcgctctgttgccaaggctggagtgcaatggtggaatctcagctcactacaaactccacctcctgggttcaatcaattctcctgcctcagcctcccaagtagctgggattacaggcccctgccaccacgcccagctcatttttgtatttttaacagagacagggtttcaccatgttggtcaggctggtcttgaactcctgacatcaggtgatccatccgcctcagtctcccaaagtgctgggattataggcgtgagccactatgcctggccataattgcattttttaaattccaaactttgtccttaatttgtcccactcaaaacgtgacattacttctttaagtctgtactgagtgttacaacattgttatagctgttaagcatctaatttcttagcaattactttaaattataaccagtagtgtctaaaactgaagaaacattcatctctctttcagcaataaaataaatcttaaaatcctagttaaattcagcagttttctcttttaaacttttttgtaatagcttcagatcaatatttgaattcaaaatactgtgacatgacccagcataaataaaataagactcataggcattgctgatcaaaaagcaaatgctaaagaaagactgagactttgcttctaagcacagcgatcatttactaaaagaaaaaatagaatttgtacagaaaatcagttactctacacttatgaggaaattttctcttttgatttaagagactagaatttcacaggtaactggccctgaggatgcagtagcctcttacgtcctcttaggttctagtaatgattatttgaaaaagcagttgggagatgatttcaaatccagggagcaaaatgagagtactcttggacagcttacactttcgtccacataaaattgggaaactgggtgaaaaaagtagaaaggttagctatttgcagtggatacatttctggagaatggagcctataaatgtgttcaaatcttcatcctttgggttcctttgataaggtcagaattttagagagacgctaaaagtgtaacatcttcagaccatttttaaaaagcctgtactttatccaaagtcactgctttgaagactgttacattagtacagacctggaagaaatgaggatataggtaataaaagacgccttcatatgacaactcgccatgtttctatcacgctacaatgttcccatatgggatattagttttgatgtgttacttatccagtgcccttttactttatgagataaacaaaatattagttcttattgttattatttacatttagtgaatgtgagcactgtcccaggcactttaagtgaataactgattattgctggtattttttagaaagaatcattgcatactcttatgtaaaaaaaaactagactccttcagatgcagcccttccaagtaaatgctgccccttccactgctttgtaatctatatctatttgaattgaatgaatgaaaaatgttctccaatgcaactcaggtcctagagttttgattcttacataaaacaaaacacatttggtatcagtacactatggaatcaactctgtaatttgttaattctttttgtggggtttatgttaacatcacagaatcaaacatgttagagctggaaagcaccttaataattgttcagtttaacttcgttttgtgtcaaagaaacagaggccctgagaaacagtgactagcaaggtttcattttattattaataatagagattatagaattgaattgcaaaatgagtaaaaacaaacactataatcccaccttggtaaagttcatgtttactgggttttctacatcagcttttaaataattcagtgtgctttggtttttttgtttggttttgttttgtgtttatttgtaacaaagaacacctaaccagtgtgtcttaaaaaagaattgaacccttgataacactgaaaaataatgaaacttttaaatcctccagaatgtgaaagactgctcagggattataactaatgcattttattcttatgacttgctgattccaccgacagctgccttaggggtgcagttctaatcaatgactgtatccacttggcaatccatacctcagaaacacaaatcggagaaaaccatcaatgtgtaaaagagacctataaatcagaatgtcaggtgggcacagtttcattttagtaactagtatttagagattattggataaaatattccatggacacaaatttatggtcttcatatccctccaggattctactgcatcccagtgggaatatgacatcctttgttattttcttctgccaacaggaatgatgagttagtgacaggaaagcaaactgttgttttttctctccttattcaagcttttaaatgacttaccatgatttcctttctaaggagagtcatagagtcttcttttctgttaaggtgtgcatatctaggtatttagatatgtacacagaagatttgcttccatgagcttcaaaccaagaagtgtccagcatgttagcaagtttgtctgtgttgatacaaataggactattagttcactaggatcgatatgaacagcaaacaagttaaagtacaaggagaaatgctactttttcagttctttccattcatttttatgctgtgagcatatcagtcatatatgtttgaagtgtgctgttttattccccttcctttgaaaaactcctaagggttctcgtgaaaggtcagaaccgggaacacctgcatcaggggagctgaggacctttttgaaaacaaagggtaaataatcagctctcttggggcctctactgggcagaactaccaaaggaagcagtgcagcccacaagggattcctagtgccattttcaggagctacgaaccctaagtagacctagaagtaactagggcagggaagcagtgacagaattgaggatgtgtacttgatcttctctcttgaaatcgtcatcagtcttgcaacctgtaagagaaagcaaatcagaaacactacaacaggaggctgaaggcagaagtgtcaccttgcttataggcatatgaaatatcaagtgtttccacgaggtgtgtgggggagcttgagcacagggcacgtgtgcaggtgagattaggcacctcaggagagggcagttatccagcatccattatcttaagtttagactgagtttccaccaccataagagttacttcactgtcaaacaccactcacatgttttactatagaacagaaattttgaaaagtatcagtatttttctgcttccaaacaaacattatggaaaggtaagagctacatgtgcttggacattcacagatttttgtgtgaaaagaaagggcttaccttcagagtagatgccatcagaagccacaaaataaacactgttcaatatacagaacattaaatcctgtttgtgtaattaaaatgacagcagaagcatagcagttagccaagaagacatatctcacttgtttccagttgcataaagacacatccaactcattctggattatctctgttcctgctgggtttatttttatagctggcatcaaaaaagctctcatataatttccctggcattttacaaaagagttcaattgggtttcctaccttcccccaatacccattcatatacacagtgtgtatctaccacagatcatatatgattcaccttataataactttcctcaaagctgtcctcaaaagatacatgataaaagaatcgaaagagtctaaaactcaacagcaactatgcttttgtaataataaaatgtatatttaaggaaaaactgtaatattattagtttaattcctttagaagttcagttaatatgcctaccttttgttgggattaaataaagggaagttatacaacttactacctttgattaccctgagagattatactatgcaaaatgtacctcttctctggtagccaaggattatttttacagttttctgcctgaatttctgctttcctcactgaggacttttaatgacatttcactgatctcttggtttcttcctttcctgtaagcaactcctgtcaaaccttctcaaccctcttgtcaaaccccagaagtaattttgcttctagactaagcatccaagccttagctatttcagttgtctaaccctcttttagtaacacccatccactgcaaagaaaatccttccttaaaaatggagatcattgtccccattgggacttaggttctcttgatttcccaatggcaccagcagtcagcaaacttccttctagacacagagctgaacttgttcttttatagtcctcaagcctgcccaaaagaggggcaatctccattccagccactctcagggcgttcttagaaagccacctcacccaacatgcactcatttaacaagcagctgttgagctctaggtgctgggacacagcatggacaagagacaaaaatccctgccctcatggggagtacactccggggaactagaggcaaccgcaacttgaaacacgggaaagcagtgcttgtaaaaggccatgttataaataacctgtggcagtcccatgctccttttatttatttttttactttgtcttttactatggcctggacacttaaccatgacattcaaaatggcagagtgtggagagagttttgggaaacacaatatatgatatcgtcactctaacgaggaattctatttaattggacttttctgctttttgcgtcgacacaagacattaccctttgtttctaaccaatttatggaaaggactctgtatagtgtgtataaggggagacacagggttgtatttttcaaggaatatcataattctaccattcagttgttaacaaggagagggtttttttaagtttctgtataatatctaaactttatttagtctttgtatcaaatataaagtgacactcttaaagcatgttttcatcttttcggtcaatcaaaattacaaaacaagaagggaagttcttgccattaacataaactttgcatgacgtttaagtcccaggtagactttaaaatccactaaatccagttatttttcaaactgaaagtttactgaacagccttagatataatcaggcaatcctgaggctctggttgcaggagaggtggcaggggggtctggagctttgcccccctctggcattccagcagagcccctggtacccctgggagtgcagtatgaaagctgctaatctaggtcaaatctcttgttcatatctggaagaaactgagacccaaggagattaagttatttgctgaaagctgtcctgctattcagtagtacagcaaagactgagactcaggcctctggccacacattcactactgtgccatttctttcaaaaaagatgtgaagacatcttgctgactggctctccttttccagtattcaaagaaaaatatttaaaaatcaagagttctttagctgtgtaacccgagtctgtctgcattcaaaactccccagtgagcaatgttgcaacaccatcccccttccactctagagttgagtgttcaggtgctgctccttgagagccaagaggagccatctttgcctgtgtgcccggcagctggaggagagtgctggcaacggtgaagggggcagctttctgtgcttctctcctcactcttcgctggaagtgagggccaaagtattcttgcccaaagaagctctgtgtaacactagagaattgataaactatggctggcagcataatttcccctcactactctaaaaataaccctaagatctcacctccgcttagtaactccccaaaggatattctaaaccagaaggcttcctgagtgcacccccaggaagcctagtccttgcttctctcactcttaaacgatgtcctcagcaaaattagtgtgcacctttgagcagatactaaggctggccctacctttacttctgactcctagttggagagggaacccagtcaaggctttatgtgtgtgtgtctggtacttgaagacttctcagttctcacccttgccctatcttttatctgccaacttgatcttcaggctctcctgcagtgggattttggcaggcccaagccctctgacctcaaaagaggataggagagagagggcctctgggttcacagcacagtaacgttctttagctctgttatctaggcagcttcctggtctatctcagtcactgcccacttcccctctgcctgtcactgatacagtttctgccggttgtcctcctgatattcccaacaggctgcccttggccttatccagcctaaatagaatgacttgacgagtttagaattaactcttcctattctagaaaactcaagccacaaacatttgtttttttaccatcaccgtgtctccaaaacagacacacgtattacagcagctcaggactatttgtgaaatatgttattaacatgaaacctacattgtccgtcttttcaggaggaaaatgagatccctgccagcgtgtttgtgaaacagcccgtttccggtgccgtggaagggaaggaggagcttccggatgaaaacaaatccctggaggaaaccctgcacaccgtggacctctcctcagatgatgatttgccccacgatgaggaggccctggaagacagtgccgaggaaaaggtggaagaaagtagggcagagaaaataaaaagatccagcctgaagaaagtggatagcctcaagaaagcattttctcgccagaacatcgagaaaaagatgaacaagctggggacaaagatcgtatctgtagagaggagagagaagattaagaaatctctcacgtcaaatcaccagaaaatatcctcaggaaaaagctcccccttcaaggtttctcccctcactttcgggcggaagaaagtccgagagggagaaagccatgcagaaaatgagaccaagtcagaagacctgcctagcagtgagcagatgccaaatgaccaggaagaggagtcctttgcagagggtcattccgaagcgtccctcgccagcgctctggtggaaggggaaattgcagaggaggctgctgagaaggcgacctccagggggagtaactcggggatggacagcaacatcgacttgactattgtggaagatgaagaggaggagtcagtggccctggaacaggcacagaaggtacgctatgagggtagctacgcgctaacatccgaggaggcggagcgctccgatggggaccccgtgcagcccgccgtgctccaggtgcaccagacctcctgagcttagagccaccgtgccatcctgtgctgtgctcaagcgggcagccagggctgaagaacaaactcttgcacatctccagcacgactcacccactcctgcgttcctgtccaggcagtaatcattgaccatatagtcatagtaagacacacgagaccaggctttaccatgaaagcgacctgtcacggactccacttttaatttgctcttaggttctatctctgtagaatgtctccaagattgaagaagaaactgagcagttgaaaaatgctaatctctttgacttagtcagaaaaaaacagaggataattaagatactagtcatgaaaagtgattcattcttttttgtcattccataagcttgctgaatagtgtaccggtaatatattgtatttccaccgtactctgtgaatctaattattattctttaagtgttgatatataatatacataaatatgtaagctaaacatataactatatgttttaagaagaaaacatctacgaaaggtaaaaagagatgatcagttggttgtttacttgctagaaaccattgttttattgcaaacgaaggaaaaatgaagagattataaaagtcagctaatgaagtaagatacgtagtaaagtcaggactattcaaaaagtaagaaagaaaatttggaaaatgagagaaacaggaaacaaagaatgccgaaaagaatgaaaacagagaaaaaatgtatgtgcttgaaagtaaaatacttacaatagtagcttaactatttcactctttaaataaaaatactaaagaagttcgtatatcctggaataacatgtcatcttcaaaatatttttattttctaatatttttaataataaacattttatagtgttaaagctgtatttttcttaataaataaaggacattacaaatatttctttaaggaagttcaaaaggatgttgtcttgttaacactggaacgaatataaatcttcaaaatacaattaatatatactgttttgtggaaacttagctcatactattctttaatgctcttcaaatttaaactaacccttacattccatgtgatgtgatgtaggcttataagatgctaaaatctataggttttggaagtgaaagattctattttttctttttttgtacataatgggaatttcattccagattatattttatttacatattaatttcacagaatattaatatttcttaacttcttaaagcatgctagcgttttatgtatatgtacacatatattcagacagggtaattttatctgctgcctaacattgtactaaaatattgctttatctgtttttaattacaaaatgctaatgatttcttaaattatagtttaaagacaattggcccaggaagcaaatcccctgcctttagtatgaaccactataagtaaccttacaaatagagttaatccaagacaatattaacaaactgtgctttgtctttaataaaagggataggattaacaaacatattgatggcataacctattcagctatgtccttatttttgcaataatgtaacctcaaatattggattgttgaaccaacaatggctgtgttaaagaagattaaataaaccgaaaaataaaaagcatgaaacaatgtcagtttctttggcagaacagttttagaacaagcagaaagaattgatttttaaactgtcctccaaacgtagcagtaatgttgattgtttcagtcttgatttcccctattaactctgcttcccccaaccgatctcatttagaaatctaagtctcatttttcaagtttaacttttttgacatcaccttgccagccttggagagtatctgaatttactgcagcagcttgatgagtttgatagttacatctgcatttttcttgtattatatcagaacttctaatactttaaatagtcctgcaaacatgaatgtattgacctgtaaattcagtttattcatacagataatcctttgtcttctgcagtgccatagagttggtagaagacttaattttactcagggcccaaagcaagcctgtttaacctttatggagttgttacttcttgcagctgagaagttggaaactagctgtatgtcagctgaaaactgcacttgagcatttttttaaagtttcactggcaatcacatttattctatgttccacatttgaagcattaaaatcctaagcaataaaacagagaataaggccagataattgttgaaaatcacacactgtagggattagagagagaaacagttgtggaaattgaagcgatttattcgtattattcttgcaaactggtgaggcagcaacgtccccaaattagatatgtcttctccccacccatccaacaacccattcctaactttctatgcctggagctcaagaactggattagttttccccaaagatcggttatacattaataaggactgatatccatatcttacaaatataattcaggagtaagaattttagagttattacatgggtctattgtaatagatgtaagcatctattacatgggtcacaaatctcacagaaatatagcaaaaaagaagtcatttttctgtgagatttcttttaaaagtaaataggtatatatttcaacaggaatattttcttctttctgcttaggaatccagtatgtggctgaattactggttctttttatatgtgaaaacaaaatactctcactaagactagttctgtacaaaacaaggacttctgatatttattgtctgatgaaaacccaaaatgtttctgcttttagcagtgctcacccagaagagcaaagtttgacactcatgcgattaagcccactattaggaaaccttaacatagcctaactgccagtataagtaaaggttataatgaaagtcatttcctacattaagacactaatgcccaagtccagttaattcctgctcaaaagtgtgtttactgccctggagcccaaatctaagtgattttatattgaagattgggagtatgaagaattgagatacaggcagcaatcattattaacagttccatagcaaccacaagtcttttcctaaaaaccaagactcaagcactgcaaaacaagtttcagatgaaattggcattgtgacctttgtattctgcttgatctgggtgtctagataaagacttctgtagccaggaactcattcctaaagggaacaggcagtaacttgcattattaaagatattttcttatttttgttttaaccattacattatcctgcagtatttgaaactctaaaattatttttaactctccacataaactgccctagttaaggagtcacacctttaaactaagcagcttgattttcatacatatatacacttttcactgtaaaaagcaatttgttaaatatttattgagcaaagcaatctttagttcctcgtatttgctaaaatttttagcaccaaagcagtaagacccaagaaagatggaggaaaccaatatttttgaaaacctactttataccagctgagcactccaatgccagcagtactgtgtacctatcacatgttagatacatgcattatctcatttaatcatataaaatcctatttggaaggtatgatttttacctccattttaagagtagagaattttgaagtttactgaatccaaccagtaagatagaatggagaaaggactcctgagttcttaactactctaaggtctcacccttcatgttataatttaactacttttctattaagggtcacagaattgaatgattagtccagttcaaataactagtgtcaacgccagtgttcaattccaatctgaaatccatgctactgccaaaacagacacttaattatcctacaactgcttaattataagtcagtttataagctatcaaatggtataatattaacttcattttaccaccccttatacagcatcacttacactgcattttgtaaatgattttgatgattgtcattccagtgctaaaaaaaaaaaaaaaaaagaaaaaaagaaaacctcactgttcttggagagccacagagagactattattcaggtatgctgaggccacagaggggctccttagctccttggcctcatccattgtcagtagctgcagggttcactttggggaagggtataataagagcaagctgtcaacagagatagatactagaatcagctcattcaaaaatggttcatgaagtctgcctcaaactcttcaagttaaaggagttatatccctgtgtcataggagagaacttgctatattctccttggacacttcctctcataagctgaaaaaaggaacaaatggcaaatcagcatgcggccaggggtgggggattgtggaggttcaggaagtagagtgaatcatgaggatacagagacctagcctatgaatataattcctgcaaaattatccagctgtgttctcagaaaaacacaggagctaagtcaaacaaatgctggtgtctccatctctgtgtgcaagcaatcagagaaagccctctggccagccctctttcatcaagatgtatgctgcaggcagctacttcctccaaaggctttggcaggggtcacaaactcaaatgcctgaaagctcagacatgagtaaactgactcaaggagatggtggcaattgtggcaaagctattacacatgggccgtgtcctgtccaatggggcacccttaaaatccacctgtgcagaggcagtgcttctttctaattcccacacagggaaagtatgttctaggagccaccctgcgtgtggtaaactggcaatcactacccagttccacttgctgtgtgagaaatggggtccaatgacttcccggtccaaaacataggcctcttttaagaagagccaaaatttagatttctttttacatgaaaatctcctggcttttagtttttggcaactgattcaaatcattttaaacgttatgcaagccaaatgtaaatgcctgctggctggatgtggcacaggcatagaccatccatttcggactcctggtctacagagatgaaggctcttgggtgcttctttccctcctggaggcataaacacaataagagaaagttagtgacaggattagatttgccttaagaaaaaacacagacgccttcttagggggatataaaatgcaaaacacccttgccagtacttacaagaagtttccctattgccacttcccgaatttatgaaaagattgctgttaatgctgtgtgaggagaagtagtcaatcacattggagggtggttgtacggtctctaacggaaaagcaccccaccttgttatcaacattgctagccacctgcgcagcccctgggtgtcaaagggattggtgttcttggtaacctgagcatatgaagttaccatcccacttctgtgttccagttgaaaaatacctactcttgtcaataacctgaggccctatagatgacaaaaagtaaggctgtattctgctctgtcatatatcatcacaaaattgtcagccaacacaccagttcttcttcaactctttattgttggtaatgacgtacaaaagagaaaggacacagctcaatttctttggatgctaaattgagccttcagagctcagagttgggaaaaaaaaaaaactgatacagatttagcacaagggtcaagatgtcctctgttaaggagaaactttttatgttggcaaccacttgaagatctaaggaagcacgaggattagctgtgttctcttaggtccactgcatgttaattgtctctatgaccctaacggcacgcagggaaaggcagcatattccagtgaatgtgcccttatttgaaaagtcaaatttcctggggactttaaatcaataattttacatacctacataataaaaggaaggcctccctgccaggacggatggagaaaagcagtttcttaccctgtgagattgcccctgaaatcaaccagagaaagggaaactgatgcccattggctgtaatttcactacaatctttagtgttttcttttttctttctgccatcactctttttaattatgagactaaaatgtccttcccaactatctcatagctagacttttaaatgattaaataaaagaagttggcctaaattttccagtaactgcagggcgtttttatcttcaaaaaacatttccccaatacagatattcattttgttttattaacatttattacatttatggggcagctatatgtgccaggccctgtgctgggtatgtagataaaacagaggaataagaatagtctttgccatctataaattccccatctttgaggaaggtgaaagtgctgagaatcctgtatatagagaatttaaacttataatagcaaagcaataggaaacaaataatttgtaaaagagtcacccaagatggttaaatggagatactgtagcttagctttgtaagttattgtcttagtcctttccggctgctataataaaaatattataaactggatggattataaacaacagaaatgtatttctcacaattctggaggctgggaattccaagatcaaggcaccagcagattcagtgtctggtgacagtgccaatttctggatcaaagaggctactttctcactgcatcttcacatggtgggaaggacaaggcaggtctctagggcatcttttataaaggcactaatcctgtttaggaggactgagcccccatgatctaatcacctcccaaagagcacccatcctaacaccatcatactggggatttgttgtcaacaaatggatttggcagggagtaggggaggacataaacattcagaccatagcagataccataaatgtccaggatagagctggcaggaagctaagctgtgactttgctatggaagctaagttgtttggacttaatgatacaatcacacaggaataggagtttctgcctctaaagcaggaaacaaaatggtggaagagaagccctgagtggaaggaaccttataaagtctttaaaatgaaacattgacaacaagcacattcatttgttttaactgacaaataagtgttgaagcagacagtatgccaagacctgtgagaggggctgggtttaccggcaaaagcaaacagacattccttttccatcctatagtcctagtgtccctcaataaactgcttggtcactctcttgatgaaagttttcaaattggtttgctttttggttttaaggaaattttctctcatgaagtcacattgctaatttataatgttataggatgaggtaggaatgtataaatgaaaacataaaatggaaatcaatgagaaaatatggctcccttcaggtatagtaactttatatccaactttgaaagagggcatattctccttacgataacaactcatccttggtttttttaattctatttattaaggttttttatttattttaaaaaatattaagtagggaataaatgacccataatctcactgtccagataattcctactgtaattatttactttcttacattaaaatattatggaaaactaatagtagtttcctttcttcttcttctttttttttttttttttgagacagagtttcgctcttattgcccaggctggagtgcaatggcgcaatctcggctcactgcaacatccaaaaaaatagatttacattgctagttataacttgtgacttctgaagcttccacaacctccgggttcaagcgattctcctgcctcagcctcccaagtagctgggattacaggcatgtgccaacacgcccggctaattttgtatttttagtagagaccaggtttctccatattggtcaggctggtcttgaactgcttacctcaggtgatctgcccgcctcggcctcccaaagtgtaatagtagttttctattgttgtgtaacaaattaccacaaatgtagtgacattaaacagcactcattttttagcccacagtttggcaggtcagaaatccagtgtgggaaataagaaataactggaaaataataaatttcccagtctgagttctctgctcagagtagctaaaggctgaaatcaaggtgtcagttggactgagttcttgtctggaggatctgggaaaattcacttccaagctcattcttgttggcagaattcagttcccagcagtaataggaatgggtcgccattccctcgctggctgtctgctagagactgctctcaactcctagagactgcccatattccccaccgtgtagtgccctccatcttcaagccagcaatggcaagtccagtccatctcatgctttaaatgtctgacttcctcatcatctgcttccaccagctagagaaaactctctgctattaaagggctcctgtgattgggtcaggcccacttggatcatccctcttaaagtaaatggtgccacacaacatcattaaatcacaagagtaaaacccatcatagtcacagacctggggattacacagggcatgtccactgaggaggtaggaaatctgggagccatttgagaattttgcctaccacataaagaaacatagtaaggaaattgaaatactgcaaaaaggtattaaacaggatataaacaagctactcctatcctacttctcccaaccccacaccacagtgataatcatggtcaacagttttcttacacatctttccaggaaaaaatatatatatatataaaatgcaaatatgtctctgtatctcctctttgaatttaaataaaaggaatcaaattgcttttctcttttaatcttgcttggagctccttccttagtgacaaatgtggatcagcattattcattacacattaagagtagctttttatttctttaatagttacataagaataagcaaagagatcagcaatgaatcatccctaaaacggagacaaattatttattatttccttttttaatttatggacagagtttgcatcagacccattgttctacctgaaacaccttcttctcttagaacagacgagtcctacaagagtctctattttggaatagagtcaactaattttccgctaaggcaaatttaaataacaacttctgaaggaagtgatccctttacacacaaaaggcttttaacagtatgtccttacctgtgaagaaatggcaccataaaaaagaagataaagcataagaaaaagaaaacagaaaagcagaagggattagattaaagttaaaactgaagtctggagttcatctatgcttcagagcaggaagaaagttctaccctctgaacattaccacatcttttctccccagcaacaccaaagaaataaaaagtattactttttccataaaagatgtatttctttctaattattgtcattctaaaattcttaaactacaatgtttgatctatgactttagaataccaatttttcatatctatttcttctaagcacaaaaagacaaagagacttccactacctttcattgttctttgaatgggactagatactaaaaaatagatttacattgctagtcataacttgtgactcctgaagcttccacaaaactcatatattctacttttttctactgaagtgacaagttgctctgctttcatcaatttaaatggaaacacagtaagcaataataatggccccattttcgtgagctgtttctctgtgtgaagagtccatgagctgaaagtttctcttcagagatcagtccactgttctgaaatggagatgaactattacatataatgctaatgcatatgaatttatgttaattcttgaagaatgtggtaatttgctctcagaatcttaaacttcctcacctctgctgcagagagaccctaaaagcacatctctgcagattacctaccgggacatcaaggagggcacttagtagtaactaggcagcaatttaagaacaaacctcaagactgtatgaggcaattgttagtgatgaagcaaaacaaagaagctgagaggagatccagtaccatcctttgatccaggtaagcaggaaacctgacctgggcctgcacctcagggagcaccctgccttaaagcaccttccaagaaatgttctaagtccccatctggtgcctggcaccagcccctctgctatttggtcgggaagtctcagactagatcaggacctatgtctccatttctcctctacagagcactcactaagcctctacctgggccagccgtggtagttcatgcctataatcccagcactttgggagactaaagcaggaggatcacttgaggccaggagtttgagaccagactggaaaacatagcaaggtcccatctctacaaaaaattaaaaaattagctgggtatggtggcatgtgcctatagtcctagcttctcagggctgagtcaggacgattgtttaagcccaagagttcgagattatagtgagctatgtttgtgccactgcattccagcctgggtgacagagcaagaccctgtcacttaaaaaaaaaaattaaattattatctgcctcatgcatgaggtaaaccaaattccccaaagaacctctaggaggaaagcactgctgcccaggagaatagtttttatatgagaccgtgaaagattggataaaattgggcctctggaatggtgctgacatgctgtcttagggtgacagtgaccctgactttggagggacacagaacaattcaggactctgccgattcctgggcttaagccacacacgtgagctggcataatagctctttagactgcggtgccacctccagtgtatgaaggaaccaggatggcacaaggtatcctctacctagagctgtcattctacttcctccacaggctctacaccatgggtcaggctttggggtggccttgcccatctgcacaaagagctttcaagatctttgctctcctttaccccgtgactcttcagatccattttctctcttgccttacatcatgtgttgatgttgtaatgtgccaggctggtcttgagccatgctagacaagggatggacatttcttgtgcaaatgggaccactcttcttatcctctgtaggtccctcacttattttccccactggtagaagtggtggaaggcaaacatacagccagcactaaaagagatcacattgtaggaatacagtggccactgcctaaagcattcagcagaagacatactggaaaatacagtattctaagtttacatgctgtaaaattctatacagtaaattttacatgaccagaaaacaatgtatcattcacatttttctgcatatgctggataagatttgcatttgtggtcatcatcaacaaagcgtagtaacagcctttgagacagtcatgagaaaccagtagtcatgggtgacaatatgaatgatgcagcctcatgagtaatgatgcaaccagcattaaataaatggtattagagaactgcagaggcagaggtctatactgtttcagcacaaacagaatctaaagagccgttgcattgtgaataataacagcattgctacctgtttctcacatggtggaagatatgaaattagccaggaaccacacatttgacaataaagaaccagaagatacaatgccaatctactggctgatataaggaatcattacaagcaatgattggacaataaacgaatgtgtaagtagctccactttacccattttctgaagaataaactttgtaacactttttaaatcaaattgtttatacagacagaggacccacaaaaactatttacctgaggccctgcacatttttgggatgaccctgaggaaaactcttggggaaaggaagcagctaaccttccaacatacagtttcatcttttctcaatatagatttcatattacatggttttggaatcttcatgacttaatgcaacaaatattttacatatgcaacgaaataattaccactctgtgatacaaagaccctctgacacagacgggacttttgcacctttttttttttttttttttttttttggtagctgttggtctgttgcattttttcctgcttgaagagggttctcaagtgttcagatgaggcttgcttacttacttagtcaatcaactgcagtaaaagagttctttctagactgaccttcaacacccagagtatttttggatgacatcactgtcattaattggtaaaaactcagagaatgtaaagtaattttcaggttagccttaaatattttaattatagaagaaaacctgctctaaaaacatataaatgcatgttaataacatatacaggttattgctgaaatatctcttggatcttttccttttttatgaacatggataattaaggattaactatattttaaggattccgttttaccaatggtctgtttttcccacagtcgtatctacaaaaataattacttattcacaagtgattaatcttccttgacgacttaaagtattagtctaatcatgcaattactagccaaacaactaagagaggctaataatgaacttctagtttcagttctagttcaaggaatcttggcttatttctagagggaggcaagaaataattagagaagaagactgaattttaaaccaacatattaaaccaacttaaagcggtgacatagccaatttataagcatatgaaaatatccttgtgtccttcctcttttttgtttttgtttttgtttttttgaaacggagtctcgctctgtctctctggctggagtgcggtgacgccatcttggctcactgcaagctccacctcccgggttcacgccattctcctgcctcagcctcccgagtagctgggactacaggcgcccgccaccgcgcccggctaatttttttttttttttgtattttttagtggagacggggtttcaccgtgttagccaggatggtctcgatctgctgacctcgtgatccgcccgcctcagcctcccaaagtgtccttcctcttatccactgattttttttctccttgccagattctaattgtagaaactactactagagatgcctaagctaatcaaggtcaaaattttaactcccacaggattttaaaatttcaaatatcattgaatttcttttcagtaaatcttacaaatacatgttagagaacaaaacattccaataacatagtatattgaaatataaaatctgtagttaatttttgtatttccagttgctgcttggtaagcaagcttaaagaaaagcatactgtcagtgccaccattcttgtttttaaaaatttgacatatgtttccatttcgataaagacagttataaaatgcattatggtcataggaaagagaatagaacaattcagattttctgatgtatttttcttttaactcaccaagtattgctttcctcctatcaaagagggataggaagtacctaactttgagagacgcctcttctgtgatctaaccctttaaagtgggatgacaatcctgtggcaggcagggaaaggatatttattgaaaaaggacattagcaactagaatagttacctctactttctcagtaataaatggcaaattccaagccttaagcctttttgtttggaaattcaacaacaataacagaatgagttcatctttccttaagatccagtggcctttttgaaacagaatcccaggaaaataatcttaggatgtgaaattctgtgaattttacaaataaaccgtaaattacataaaattaaaagcaatttcctggcttttcagcactgaccttctaatggatgcatcccagtcacagatcaaatggcaaaaactttacatcctacaaatccagcaaaaatcacttgtaaacatgaagacattggacccaaatgaacatcaaatgtctaaatagaaaacagcaagaacctgcttgctttaggaatgttttaggatagaagatgttgattataaataagcaataacatggtagaaacaaaaagccaatttgtttagagcaaaatatagtattgagaatcagtaacatccaattcagtgcatcagtcaatatgtttggacattatgtttgatacaaagcacaattgtgaagtgggtgaaggattccaactcttccactgtgcaatcatgtatccttgccccacccaacataaataataatgcctttcaaatatttccgttccctgtatcctttgccatcacctctctgttctgcttttctaagcagcagggtcaacctggcatttcctggaggactgcacctgtcagctggaatcaccgttcttccaattgctgaatcagcccaccctcataccactagctggtagtgatacaaggagaccttcaaattctgtgaattttgtgtccggattagaacaggctgtaggccaatttctttaaaaccagaacagattttcagacatttatacaatcacatttctaattacagagggcccagaaaatacatatcatttcagacttgaatggactatttgattccaagcaaaaatcttttattttgtcacccagatgactaccatatactaaggccatcataattattcctattgtggcagaacattgttctaacttgaaaagccaagcttttaagaggagttctgtaaatagagttgaatactagacaaactaaaaaaatgaaaaagaggcaagtaggaatcagtcatagggttcaaattttcaacctttgtgactttgatcctttgccaaccatgatttttccacgtaagctgatggataaaggctacacagagaacactgctgaactgaaagaacttttcttattgaagaaaagacttcaacctgaactgaaagaacttttctaattgaagaaaagacttcagcaattcagagagaatagtctatcatttttcaagagaattctagttaacaatgatattatgttattgaatccattaagaaagatatatgagcaaactcactcttttagttctgggcacactggaatcagagcctcagacggaagttctggtgcataaggtttagtgaagccgtgctcttcagagaaagccagcagagtggggtgcaaagcgggagaggagagaggaaagagctcagcaaggatgtggtcccgtacaaaggccagtcttgacctgatccaggggatcacaccacaaaattatggccctcaccttcgatgtaagggggccatttgtagtcccacattcatcagtcattggctgcccttagttggggcgaggagcatgacctcctgggagatgcagctgccattcgcaattctctaaaaatagggggcagctgtgggtcattagaagtctacactcacagcaattggagaagggagtgatgggctgggtaagggatccaggcagggcaccacagcatctactacacttgctaattgcagatcactcagcaattagaaaaccacctgggctctgtaaaatgttagacagactggaaagggtcacctctggcatcaacaggtgaagtcattgggatgaaatggctggcaatcttacccgggtgcgcttaattgtattatactccatgctttgtgcttcctttgcttgttaacaatctacagcctctgacataatgtatccttaacctattttggtgttcttaattcagaattatttcttcttcccgcatgaagaaaaagctgccagttttgagaatatccattaagttaagggcacaaagcagaacgttaacattcaacttgaagagaaagaaagagactttatacatcacaaagcacaattctgttttaatggaagaatgaagtttcagatggagagatgtggggacagagaaagaagttaccttctttgtacaatttttatttgcatttgacgagtggtgttccatgggaatcctttaccctgtaaaaaatgtccacctctgctgttagtttgtgatgctccccatttctcaaacacgagcatttagaaattccaaactctctgattctttttcctccccgaccttgtgctagaactggagtgatctacattttctctgttgctctgtgatattctgaaacaatcaaaataaattgaatcttttattacccaataggtagatcagaaataagaacccaaggctggttaacaataaatctggtggtatctttacccaggtgggtattttgaagccacagaaaaactcagacatgtcattttgtacttccaactttctccttctctattttgaggtgattaatttcctctggatatctagagaacaagatggctttatatttcagttcattataaaaacagaaaaagaaagaaaagatttgcctatctccataggaaagtcgatttctttcttttttgacctaatcaatgagaaggcattaaatataatggtttcaaaatcttaactagaaatgccagtttggccacaaaaggctttgttaaaagggcatgtaggaatccatggagagggtcatcattataataatccactcaagatgatttgatttctatagctccaagtcttgatatttgtcctggattctgcagccagccaaggcagtgggagattttcttctgaagcaaacaaatctccctgtttcgtactgattcaacctaattctagccacccagcctacacattatatatttcctattttgagaaaaaacagtcctggaacagggagtgggcagtggactcaattcttttttccactaaattgagacaccttacagataagaaaagccacattttctgtgaaggggaagaagcagaatacttgctgcagtgaaaaatcacaaaccaggaaccagaggataagaggagaatggcagattaacttccggttacaggacagccgtaagctcttacaaggctccctctggcatccgcctctaattcctaggctgtatacacatccataaagaaatagtttcccaaaagtagactcatctgggagtaaaatgtcagctttgcaaggcttctgaccctgccctcccacaatcaggcaagaccctcaagttataattagcttcattgacccttcagtctctccgtttttgcatggccaattcactgctatttatatcggggctcagtggcgatttttgtggccacaactgcgttctgaccttctccagagaggatactgagggtcaggacagttttgttcatgtttggatagagttaatacatcatctctaggattagaattctagtttgaaagagtgaatggtagctttggttttatttttggtacaagagaataaggctttgcttttaatatttgaatttaggtgtgggggtcagtaaatacatttatgaaatgccagttagaaggagagagaaggtgtagaaaatgaaaagtgggggaaaacttcccactagaattttgccagaatttatagaagtctgaggttagaactgactttctaagttaacattaatacagacttacctctttaacgagcctaagttcagtctcataacaaagagtttcagctcttcagaaatataattttaaaaaaatgcaaggtaggtgggcaaaagcactaaagccagaggcacatcctccttgctaataaaattagctgacatttattttgtatttgcaggtgccaggtactgttaagagtccaatgctagggtgaagtgttatcacttccagaacacaatctccacactagtcagtgggactgaagcccagctgtaacaattgctagctgtgtgccctgcaaaaatgtatttaacctctctatgcttctggttgttttttttttcagctgtaaaattggtgttagaaataatcctcacctcatttcaatttaagatcgtgaacagatatccacattctcaacttcattacagcattatttacaaagccaaaatgtagaaacaacctaaacatctataggtggataaatggttttttaaagtgtggtatatacatacaataaaaatagtattcagcttttaaaaaaaaaaagaaggaaatcctgccacttctgataacatggatgaatcttgaggacattatcctaagtgaaataaactagtcatagaaagagaaacattatattatttgacttacataaagtatctagaatagtcacattcagactagaaacagagagaagaacagtggttgccaaaccttcagggagggagaaatgaggaattattgttcaatgggtgtagagttttagttacgcaaaatgaatcagttctagagacctgccctccagtgttgtgcctattgttaacaataacgtgttgtacacttaaaaatgtattaaggcggtagatctcattttaaatttttttactacaatttttttttgaaaactgaaaatactaaatccctacttcacaagatgctataaagttaaatcagttagtgcatgtaaaacaccggcacagaacctggcaccgggaaagagcttatataaatgttggttattactattatccactcattaaatgaaaaagtggaggtttaaaagggtaatttgttcaaggtcatgcagggaaagatgggcaaagctgagatttgaatgcaggtggtctagctcaaagtccatgtgcttttgcggtaaaccttaacacctccctgataagcacatccccaaggactcaatgtgattggactcagccctacctgatgtggcagaagcagcacagcaatcagacacccatgggttccttttggccaacagcttgtggcagaccatgagtctaagaattagtagctactacaaaggctgatgggctgatggtgccacaaatttgaagacagtgggaaggaagaccctcaattctccacgaaaagacttgaggtgggaaaggttcttggctaaaactagatttctctcatgtgaaattaaggtatgattatgaaattaaaaaaaaaactcatgaatttacagcttttgtgagggcataatatttcacttaaagcaaagagaaattaccttttgtggtagatgggtacccatgttcctaaataatcattttatcctcaagttgtgcccaatactatatcataccatgtctcatttcatctctattgaaacaccatgaagtagaaattattagctttgttttatgaatgagaaaatagagaggttaaataacaagatcacaaaatggcagagctagaatttggacccacgtctgcccgtcctaaaacccagtgttttaactgtgaaaccaatactgccttgttgcttgtggttgtggtgatctgtttatgtacaaaaatcacagtaaggaatatttagataaggctctctccttatacaatagtatgaccttagcatggcttgttacatatagaagaaacctaataaatgtttttattttttttcttctaaccatacacttgcaacgtaccttggaattttaagtgatttgtacttcttttctattaagcaaagctaagaaaggcattattactcccactttaactggtgggaattctgagacttataaaagtgacttgctccagccttaaagttttgaagtagcgtcttatctctagtcccctgggctttttcctacacttcattctctacttttggaaacattttccagaataggtgattagagggtatagaaatacaataaattttctataaatataaataatttgtatcaagaggcgaatactttagattccatataggtgaaccaagaacatttcctgaaaccctgtctccactaaaaatacaaaaattagcccagcatggtggcacgtgcctgtagtcccaactactcaggaggctgaggcaggaaaatcgcttgaagccaggaggcagaggttgcagtgagccgagattgcgccattgcactccagcctgggtgatagagcaagactccgtctcaaaaaaaaaaaaaaaaaaaaaaaaaaaacacatttccatggagaaaatctgtgaacatatgaggctcccaagactgatagatgcccttgggttctgtcctgtctatccctaaatagactgcaaatactatggggtttgcaggcttcaggctgctagatggccaaaagtgcctctaagctgttggtgggagaattaaaaggttaaaagggaagcaatggtagagaaagtgtagtaactgggagactgcattatggtgtttgtttgtttgtttttgtttgtttgtttgttttgagacagagtttcactcttgttgcccaggctggagtgcaatggcgcgatctcggctcactgcaacctccgcctcctgggttcaaacgattttcctgcctcagcctcccaagtagctgggactacagacatgcagcacgacatccggataactttgtatttttagtagagacagggcttcaccatgttggtcaggctggtctcgtactcttgacctcaggtgatccaccagcctcggcctcccaaagtgctgggattataggcgtgagccaccgtgcccagtttatgtttattttctatgaggggattaaagcaaaagggaaaaaaaaacaaacacagccaaatgtctgctacacagccatatacacaatggcaagctccttagcatagagccatttatcatttatatgtacctcaactttagctttgaattgaatactcaaaattaaaaaataataataataaacaaaaaaaggcctcattttccctgtctttctacaggatcaggagaggggaaaggtaagtttgcaagaaaaaaagctttgatttcctgcacatatttatgcaggaagaaaaatgtcttcactgccatctccagacaagagcaccctgtgccggtcaagaacttgtgtttcatcataggcactcaagacatgcttattggatgaggaacctggggctcttaaactgatggagatggcatcagtcctgctctggagggacttgcaattgaaaacttctgacattaacccagacaaaaatggacaagctatctagataatgcactcagaactttgagcaatcaaataaatatccagtttgattttttttaca

SEQ ID NO: 5638 - DNA, 212458 bp, Homo sapiens
  DNAPTP6 gene - 200996302 - 201168759 of chr2; NCBI Entrez Gene ID: 26010; Build 35; sequence includes 20,000 bases upstream of initiation codon and 20,000 bases downstream of termination codon of the gene
caacagtcagtgagatacaggaaaatataatcaaaatgaattaaaagataggaaatttcagcagaaaagcagaaactataaaaagggcaaatagaaattctaaaactgaaaggtaaaattcttgaaataaaaaattcactcgatggagcataagtttgactgaggaaagagagaatttttagattaatagaaagtatctgatctaacccaggaggtgcagcttgcagtgagccgagatcgcgccactgcactccagcctgggtgacagagcgagactccgtctcaaaaaaaaaaaaagaaactatctgatctaaagaataggcaggctgggcatggtggctcacatcccagcactttgggagactgaggtgggaggcctgcttgagctcaggagttcgagaccagccatggcaacatggtgagactcttcctacagaaaacaaacaaacaaaaattagctgggtgtggtggtgcatgcctgtactcccagctactcagaaggctgaagtgggaggattgcttgagcctggcaggtggaaactgcagtgagccatgatcatgccactgcactccagcctgggtgacagattaacccttacaaaaaaaaaaaaaagaagaagaaaaagatgagggagagagagagagaaaggaagattgactaaaagacacatactcaggaacctgagagacagtatcaaaatgcctaacacatttatgattggagtcccagaagaacagtgaaaaaagaatggggaagacgagaatatttggagaaattatgaccaaaagttttctaaattgtaaaagttatacattcatagattgaagaggcttagcaaaactcaagtgggataaatatgaagaaaatcatgcctaccacatgataaaactgctaaaaacaaagaaaaaatcttcaaagcagtctgagaaaaactatatactgtctcattatataggagttatcattaactccttatttgaaacaaaggaggccaaaaggcagtggaatgacatatttaaagtgctgagaggaaaaaagagcatagccagagacaatatccttcaagaataatgaggaaataaagactaaatacagatttttcaaaaagaaactagtaagaagctttatcatcacaagacctgtactaaaagaaatagaacattatttaggctggagggaaatgacactagatggaaacttaagcgataaaaagcattgaaaatggtaaagagctgggtatttattaaaatctcttttttccccaacttttaaaaagcatgcagtttagatttataatatatggagatgcagtaaataaggcaacgatagcataaaggacaaatgaggtaaatgaacctctataaatgtgagctttctacattttacacaaaatagtaagtaatatctctaagtggaccataaaaagttaagcatagatattgtcattcttggagcaattaataaaatgtatgatgctaagaggtatagctaaacagcctattgatagattgaaatggaattctaaaatacattcagttgatcccaaaaaaggcataaaagaagaataaacaaatcaacagaggggacaaacagaaaagaataccaaaatggtagaaataaatctaaccacatcaataacatcaatttaaaagtgaaaggagtcttttcaataaacggcactggaataactggatatccatatgggggagaagagtctttgacccatagctcacactgtacacaacaattaatttgcaatgaacagagacttaaatataaatctgaaaccataactcttttagaagagaacttaggcgaatagctttatgacttggagacaagcaacatcatttttttttaacttttattttaagctcaggggtacatgtgcaggtacataggtaaacttgtgtcatggggttttgttgtacagattatttcatcacccaggtcttcaccctgatacccattagttatttttcctgatcctctacctcttccaccctccaccctctgataggccctaaagtgtgttgttcccctctgtgtgcccatgtgttctcatcatttagctcccacttctaagtaagaacatgcagtatttagttttctgttcctacattaatttactaaggataatggcttccagctccatccgtgtccctgcaaaggacattaccccattcttttttatggctgcatagtattccatggtgtatatgtaccacattttctttatccagtctatcattgatgggcatttgggttgattccatgtctttgctattgtgaatagtgctgcagtgaacatacacgcacatgtgtctttataatggaatgatttatattcctttgggtatataccaagcaatgggattgcagggttgaatggtattctgtttttaggtctttgagaaatcaccacactgtcttccacaatggttgaactaatttacactcccactaacagtgtataagcattccttattctccacaacctcaacaacatctgttattttttgactttttaataatagccattctgactggtgtgagatggcaacatttttttaggacacagaagcagtaactgatttggggaaaacgataaattagacttggccaaaaagaagggcactgtttattaggttgtaatcaggttataggagaaccaatagagatggtgccagaacagagctggtaacagcagagggcaaggagaggctaccacaacctagaaggagagacttttgcagcacacatggttgtgatcttcagaatgtgatctggtcaaggttgcgtcagccagcctgaggcaatccagtaggaagagagccagggaaataaacagtctaacagcattctcctccatctctcccatttctcaccaggtttctctcttggcagaatccaaccagaagccaaaggaaaggaagccggttgatatgattgcaggagacactgtagggaccccacacacatcaccttgacatttagagtctcatgttatatttgccaaaatcaccttttagcatttttattacatgattacataggaactgccaacaggttcattccagtagttcctatagacacatgttcagatccctgttgactcagcttcctagatccttcagtcttctcatgcttctcattgtaagtatagggattccagaaagcatactgtcttggacaggatatatacacggtgcctagtagactcccttctaagaaagctcttgagtgacttccacacttcttgcctgctgctgaagacttccttatccctcattaccatgcgtttttatcattgatctccttatcctaggaatatccagagtggaattaagcaggcagatatctatgtttgccaacaaggttttagagggattgtcaagcacacgtgttgccctggaattttaactgactgactaaactaaaatttggatgtgagagagtgtaagacagccaggtaactagtagcatttagagaagacagcagttaaattgccaacgtattagagcactggagtaagattagacgctaacttctgaagagattaatacaaaatagatttgctaaatctcaaacttttttttttttttcttgagacagagtctagctctgttgcccaggctggagtgcagtggcatgatctcagctcactggaacttccgcctcctggcttcaagctattcttctgcctcaacctcctgagtaactgggactacaggcatgcaccaccatgcctggctaattttttgtatgtttagtagagatagggttttaccatgttggcctggctggtcttgaactcctgacctcaagtgattcacccgcctcagcctcccacactgctgggattacaggcatgagccacagcacctggccctcaactgtttcttgaatcaattttcaatttttcatgagacttgctgagactttctgatatatcctgataaacctgaggagaccagaaactatctcagttccttgtaaccttaaaaagcccagttttttctttcagttaagtgacaaggcatttttaaaaagggaaacttactgcatcacacaattgaacggtcttgaagtattccaccaaagtttgacctggcaattcaatgatatcaccaaggacttttctcactgtctatcctttctgccatctgcagtgttggcttcatttccaagttccaaatagatgctctcctcttgtggcagcagtttcagcccttacaattttacaatccactgtttggaggggtagagaataaatttctgatagtttctgaactagtcttgagatgcactctcatcaaaccaatttaggtcacattccccatccatgaatcaatctcagaggctaggaacattgaaggagctaatttgtcaatattccacacctgaagctaaatgtgggctcagcttttataaaagtatatgggtacccaaagatgttggtggctgtagagaacgagatagagaatggatgcttagaaacaacacatatgtccatatgtattcagttcttagcctaaatagctacccaaaaacagacctctgcaagcattgttttattgagccctggcattccactattagaaagtaagccttggccctccactaacatgttaagatgatactttcagacataatcatcattcctgggcagatttgaggaagggtgaaagcatgagagcttggctacctaagaagaagaaaccaccagaaaaggaagtgaagaaaaagagaattgggaggttaatggcaaatgtatctcattaaaaaatttgccaagtgtgggctgggcatcctggttcacgcctgtaatcccagaattttgggaggctgaggtgggaggatcgcttgagttcaggagtttgagaccagtctgggcaacctggtgaaaccccatctctacagaaaatcagccaggcatggtggctcatgcctacagtcccagctactggggaggctgaggtgagaggattgcttgagcccaggaggtccaggctgcaatgaactgtgtttgtgccactgcactccagcctgagtgacagagcaagactctgcccctacaacctcccccaaaaaattgccaagtggatacttcccactgccaataataagttgtccctgggctgaactgagcaggctgagaatgtccatttgctatccctggcctaagaatggcttcaggacttctcagacgactccagttacctgagacattttcgtttaaattctggtgggccactccaaggaaggaacataaatctaatccaggaattctctctttaataaattgaaattaaaaagatctgtaatcagccatcctctttcaacttcctactaaatcacacagatatacacatattgttaaaggtattctattcttgctagggccaaaatttatacagaaaagatgcttcatgaaataaccctgaattttccctaatgtatgaatttagagttaggagcattctaaggtgtcaattaggcacgttcatccatagttcatacctaccctgcctcccattcctcctccccacaaccctactgaacgcccaggagctatctggatcaaagcaagcttatagaactcaaattggataagacagtaaaccatcggagcagaaaagcaagggtgttgacttattcctctactataaaaataagaaagttaatgagacacttcaaaattagaataagtaaagaatgtatttttaagaattaagtggccgggcgcggtggctcacgcctgtaatctgagcactttgtgaggccgaggcgggtggatcacgaggtcaggagatggagaccatcctgcctaacacggtgaaaccccgtctctactaaaaatacaaaaaaaaaaaaaaaaaagaaagaaaaaaaaaagaaaattagccgggcgtggtggcgggcacctatagtcccagctactaggggggctgaggcaggagaatggcgtggacctgggaggcggagcttgcggtgagccgagatcgttccactacactccagcctgggcgacagagcgagactccgtctcaaaagaacaaaaacaaaaacaaaaaagaattaggcaagcaattcgtttgggctgttggcatattaatctttaaaaattttaaagtaaagcctctacctattcacagcaagaagagactttcttataatttttaaaatatatgtttcaacaaattaaatgtccatatacaaaaaaacacttcataactgctaccatatataaaatataactcaaaatggattgtagacctaaatataaaatctaaaattataaaatatctggaaacaaacatagaagaaagtatttgtgacctttggttggcaaggatttcttggataagataccaaaagcacaatccataaaagaacaaatttgactccattaaaatttaaaacttctgcttttcaaaagacacagttaaaagaatgaacacacaagccacagactgggagaaaatattcataaatcatatatctgatagaaaacctgtattctgaatatataaagaactctcaaaactcagtaataagaaaataacacattttttaaatgggcaaaagaaatgaacagacatttcaccagagaagatatttatacagaaaagatggttcatgaataaccctgaagattctctaatgtaccaattcagagttagatacggatgacatttaagcatatagaaatatcctcagcataattagtaattagtcactaggaaaatgctaattaaagctcctatgagttaccactttacacctatttagaatgattaaaatgactgaccatatcaagtgtcggtgaggatgtagaggaacaaaacgctcatagaatgccgtgtgaatgtaaaatagttgaactgtggaaaaagtttcttataaagttaaacatatacctaccatataatccaatcattccattcttaatttacccaagcacagggaaagcatatgttcccacaaagacttttctgcagatacagcagctttgtttataatagctaaaaactggaaacaacacatgtctccatccacaggtgaatgaataaataaagtgtggtatgccattacaatagcatactacttagcaataaaaaggaatgaactattgatacctaaagcaatgtggataattcttaaaataattatgcagagtaaaagaagccagtcccctccccaaaaagaacatataaaatgagtccatttatataaaattttataaaattgaaattaatctaccctgacggaaactagatcagtggttacctggcagaatgttgggtgagggaaggtctccggatcgggagggaagtaaatgaggatgggattacaaagggacacaaagagaaaacttttaggggttataactatgttccctatcttgactgtgatgaaagtttaaaaggcatatatatatgtcaacacttatgcaattgtacactttaaatatgtgcaatttattgttagtcaattatacttctataaaatattaaataaatgaaatttaagtatatattttttgaaaatatccagccatgttgtaatttgacaatatttcctgaatgttcccaagcactgaagctattctttaagaagatatgaaatgtaactcctaaccttcaaaggctttcagagttcggagggctcaaattttggacttgtgggactggagctgtgtgtgtgtagatttaggatatagaagtttagagctcaggacagatttttgatctgaaaatatagacattagagttacagggatacagagttaatgaaataacttgcatgaaagatatgcctagaaatagattctagattgagaagtggaaagaactgaggacagacactagaaacaccaacattcaagaggcaggagagggaagataagccagtctgagactgaaaagaaataagcggaaagtttggatgggaactcagagcagcagcacaaggagtagagcattctcaaaaggaggacagtgtcaaatgactcaggagggatgccaaagataaggagtgaacagtgtcaatcgaatttagcaattatgtctccagtggccttggtgagagcactttttgtgtcactgcattgaggaagccaaacactggtacactaatattcttgctttgcatgttggttattgtaaaggaagcagaaaagaaacagttggatatttgaattattccttctcagacaggacattacagcacaccagagcattgaaaagatgatgttcatgtgtctagacttctgtctctcaattctctgctctcttttcccccatgtgaacacaatcatagtctcctaattttgatcaaaatgcatggcagtcatcgctccattatcctctttctccttcactcaagtccctgagccccttattcctttccagttccacctctccccttcaagttgccagaaagagtggtccctgtccaccacttccacttctttacactctttcctctcctgtcatcttcatgcacccaggaatctggtcctgataggagggggaagtttagagtgctagaacaggaagggcctagagtatgatcaccaggcttcttagccagatgctattaatttccccaatgagaatgacactaaaatatctctgaaatatttgctcctttatgtccatggctgcagatgcagttcattcgctctttgatataatgacctacctggtcccctcccctgagatggcccttacagccatcttacacctgctcacagctgcaggcatttggctgctttctgtaggccatggctgttctgcctgtggcttattgggaaaagagaatgctggtggaagcgttttggatttggatttgagtagctctctctttcagtgaactaggctttgaggagtgttgctagtgtggttttcatcttatgttctggtcctagcaactaggcttctttctttctccctgccttgtactagaattcttgaaacataatccccttctctgcttcctattcctcagtgcctgatttgttacctggctacatcagacaggaattccaattggctgcttgtaaccaaagtaggaaataacagtggtttaaataaaagtttttctgtcacataaaaagcatccaaagtagatagtcccagactgttcaatggctcctcagtagtcagagaccaagatgggttcttactggaacaccagccttagcactggtttctattttctccctcccttccttccttccttccttccttcctcccttcctcccattctttcctttctttctctccctccctctttctttctttctctcttgtcagggtctcgctctgtcacccaggctggagtgtagtgctgcaatcacagctcattatagcctcgaagtcctgcaagcaatcctcttgcctcagcctcctgagtggctaggaccagaggtgcacaccaccatacccaactaattaatttaactttttgtaacctggcctcaagtgatcctcctgcctcagtctcccaaagcactgggattacaggtgtaagccaccactcctggcctttgttttcattttcaagcttgcctcctggcccaaattgtctgttgaagctccagccatcagggttgtcttccaaggaaaaaactggagaaagggggaaagcaggcaaaaggcataaagcagtcatttgtcctctttttacagaacgttccagagatttccatctagaaacttacacttgtatttcattggctaaaaattagtcatatggccaaactttgctgtgctaacagaatgaaaccagggttctaagtaaaaaggaaacagtagattttgggtggggaactagcagcctctaacagaattattcagcttagaaacttgccattttcattatatcctccttctttccctgaaccagtgtcctgtcttatctctctgacttgatatctcctgatagatttctctacatctgcctgcctgctgaccactcacctgggcctccaaacacagtctgcttcaaatgtttctattgctatgtttatcgacataattgttcaattgcttgatttctccttattgaccttccaggctgttgacaccaggctcagattactttgtctattaattcctggtaaacagtactttctagtactgccaaagatgcttacagttcccctggggagggggagataagcatattacacaagaggtaagtgtggaaaaggggccaggacaattagtcattagttcatctggttgaaacacatctactcctgggcaagagctccttaccctgcttgaactgcagcatcttcctctcttctcctcccttgtctattcagtcatgatttctagaatacgccctgtacttaagattttcattctcaacttgataactggattgcaaccttcatacatttctcctcttggtagacttcttgcctcagaatcattttctgactgtaagtcttcagtcttcaaagtcctcttgaaattatgttttcttgactttctccttcacttggtctatcagacacctattttcattagtagcatttccaggctttaccctgagactgacgataaacaagtttgtttacttctagtggttcgttagagcaggcttgtattggcttgggagagctgtttgttaaaaacaaaataattataaaaatataacttgttaaagtgttggtagcttgaaattagccatggtgggagtatgtaccacatggaaattggcaaacactattaatcagggctttcttttttcccgaaagggtgtctaccagcacgccattgcttgtttcaccccgtcattaccccctgaatgcgcgcgcacgcacacacacacacacacacccacacgacacttctcatcccagatccttatctcttcagcctaccttagcctccagcttacagataacccttccacactcagctatagccagtgattcaacatttcataatggaatatatattttgaaaatacatcctggaccctaaagacttttccaagactgctgaccacgctatttgagaactgctaatgtagtccatctgtctgccttcagaacacatgtaatcatatggaggaatcatttgctggggaaaaacctacatcctggtatttcagtagaaggaatttattgatcaacatcagagatgactcatcacagaatattaacttctgtgaagttaatattgggtgaaagatgaccaattaatgattacaggtatttcagaaagcctggtgcaagctgtgcaataatcaagctgcatgagccaaccaaaacgtcaagatgctttgcctttgacaggaattgtatcaattcacatcatgccattacctcttattgatcaggacctccgttccacgtgtcttcgattaataacaatgaaaaatgaattaattattacttataattacagtattttagtaaacaaaatcattcaactcatggaagaaaaataataaaaaagattatgaaagcctgggaaccactagactatgccaatttttgattacattaagaagctaatatttctttgtttaaaaacatgtagcggttgctaatattatagactagagcacatgctgtggaggcagactaattgggtcgtattagaactttgccacttagccctgtgatttggggcaaattgcttaatctctctgtgccttagttttctcatctgtaaagtggaaataaaagcatctatctcacacgatgactgtgaaattaaaatgaaaaaacacattaaatgctcagaacggtggttagcatgtagtaaataattaatgaacatttgctctcatcttcatccttgatattatttttgaagcagttttattgtaccaggaactgtgctataggctgtacatgcaatctcctctaaccttatcattaagcccattttatgagtaaggaaactgaccctcaatagaaatgatgtaacttttccacggtcttgggctagtaagtgtgaaagaggttggctcaatatcttttaggagatttcatttaaatggtagaaagatgtaaaaccacagcttgcattggaattcaagccatcctgatatttaatattctactgggaaattcttacctcatagtcaactgaacccgtgcatgtggtagcataaactattctcgttctgtcttcagcggagacagaagagctcactcataaacatccctgtgttttcgcttgaactgttattaagttgccctcctgacttgtcttctgcaggttttacaaacacacagctcccataggccttccccatgaatcctatttgttagccacagaataatctccacaaaagtattttcactttctctaacagtaatttttaacttagactttaaatctaaagttcattactagcgtaagtagagcacaatatcctttggctgaactggcttcatttatgaagaagctgaatataaagatcctttctgtcttggactttcttattccaccttcttatttaaaagctgctgcctacaatgcaccacaatgtatataataagtattttaataagtatttttttaagtttcaagttgcatgtcattttgtgtcacaggggtgagtctagactcacatttagttgtgcaatcaggaagacaaatgacagtgggaatatttttaaaaaacacctattatatcactatccattcattcactttttctgggccagtcactgtgctagacaccaggaccaaagaacacagtccctgctcagggagcgcataagtcccacaaaggaggccaatatacagttacctagttattgtgatagagcaatgcacaggaatcaataggaacatgcggaaaggagcagcgaagagaccctggaatgtagaggtaatatagtctgatcaagaatgctagggagccagtcagaagccctggctctaatcccacttttacaattaattattatgccatctgttaatggctgaattgtgccatcccaaaaaagatctgttggagttctaacccctagtacttcagaatgaccttatttggagatagggtctttaaaatgaggtccttggggtgggccctaattcaatataactgatgtcctatgaaaagggggaaatttggacatagagacagacatatgtagagggaagatgatgtgaacagacacagggagaacatgggcatctgtaagctatgagagacctttccttcacagttctcagaacaaaccaaccctgcccgtattttcagcctccagaactgtgagacaactttcagcctccagaactgtaagacaatatattcctattgtttaagccactcagtttgtgggtttttattacaacatccctagcaaactaatatgccatctcagtgtcacaagcatatcccaagcttcagataccacactaggcaaggccagtcccacatttgggaaaatttgggcaaaagcactcagagcacgactaaccagaaacatgcctgcatctgcctgcagcttgttcttatgctgtgacccagatgaattcaaaggtttctctttaaatactgaatttgagtctatgacaagacccattaaacctccccagtgtgacatccagaaacaacaccagtagtcctttgcttataaggtaaataatatatactattgtagataattttagagtacaagctaaattcaataaaaataaactttgtgttaaataacagatcaacatgacattacttaaaacaaatggttaataaacatgcaagattttctatctcactggtaatcagatttgagaaaaaaactgctcttggcaaacggaagatgctaatacagttcaccattgaacactgtgagggttagaagtgttgacccccatgcagtcaaaaatctgagtataacttttgactccgaaaaacttaactattaatagcctactattaactgtagggcttactaataacgtaaacagtagattagttggttatatgtattatatactgtatttttacaataaaggcagagaaaaaatgttattaaaaattattataagagaaaaaatattttttattcactaagtggaagtggatcaccataaaggtcttcatccttactgtcttcatattgagttgattgaggaggaggaggaagaggagggctggtcttgctgtcaggggtgacagaggcagaataggtggaggaagtgaaagaagaggcagaagaggcaggcacattagatgtaaatgttattgaaaaaaatccacatgtaagtggacccgcacagttcaaatccatgttgctcaaggatcatctgtacacatcagagaacaaatgcatgcatcctgaatgagtgatagcctgttcacttagaatacacaactggttccatttgtctttctgttggcacaatctgaacctaaaattatcttcctagaatacacagtgacatgaaacctgtaaaacaaacaaacaaagaaaaaacccctctattaggtacatgttcatttcaggcaactcttctgaggacagaaggtttgaacataaaaaatgcctgaaacaatgaaaagataacctaatatttagctcctgtatagactgaaaaagttcagccaaagtgcattgtttgggtttcttctttccaacatgttttaccctcaggccagcaaggttatactttctcttctcaccccaagtcttcatcttttctggaaaatttccaagctgagccctggtctcaggtcataacaacttgatctgctgcaccagaacaccaagggagtgagtcatccctttggatttgcctcggcaggtcttcaacaagtctttgtttctctgcctatccatccctcaactgcttgacattggccagtgtccatgatgggtttttcttctagtttctgttgccttccatctttttactttttaaaaaattataatgataaagaagcgcacaaagttaaaagggcaggtttcacccctttcaccatcaccctaagggtcaaagggttaccagggtcaacagtgtgagtatccttcgagagacaggaatttccatcctccccgccctgcccccttgctgtttagagctcatactgtacacagtgttctgacttgctcttatcactcaaaaatatatcatggacactcttccatgtcaacacatacatagctccctcatttttaaacagctatttatttttctacagtgtagatgtgcccaaatagagaagtagatgaaccattcctctatttataaacgtggaatgtggtccaaatttttttggcccttacaaataatattacaatcggcatatctgtaaatatattttggcacacttaatatttctgtagatgagatcacttgtagtggaaaagtgtgattaaaggatacatgcatttttaatatctataggttctgcaaattactttccaaaaatgtttattaattcacactccagtcagctaagtatgaaagttcctatttcttatagatgcaaacacctgatagtaaaacatatttttgccaatctgacaaataacagatgctatcttgtttttatttatgctatgatcattgatgaagttgggtatgttttcatatgcttattagcacatagtccttcttttgagaattgtctattttctttgtccattttcttacccttttgctgcttctcgtttcatactgatttcaagaagttgtctatattacccatattaaccctttcctgttgtgtatacatgttgcatgtattttctccccttaggtaacattgtttatggtacccttcacttgatagaaatgttaaatttttatagtcttctctgtttaatttttttctgttatagcttgtgaaattttttcatgatatttctaattagtattataaagctcttataaggagcccttatagctcctacctacagtacttactaagaagcagccttcgattataaatattataaatattgtaaaagtctcctatattttcttttagtcttttatagttttttatgtttagattattaatccatctggaattttttctggaatatgagctaagacagtgtattagtcatgcttcattcaacagaaggattttttttttactcagataacaattgtgggtgttcagataacaactgtgggtgttcaacaagcagacacaggtatattaaatgtttatattaaatgttttaatatcaggtgtttgtgagtgtctataagaaatagtgacagggtgactcagagacccaggctccttccatcctagctctaccctcctcttgataaggggtcagcaaattacaacccataggccacatgcagcccactgcctgtttttgtaaataaagtattattggaacatagccatacttatttgtttacatagtgcctatggctgctttccataaaacagcagagttgagcagttttgatagagactatatgatccacaaagcctaaaatatttactatttggccctttatagaaaaagtttcctgacttctgctttgaagtctcagggtccttagtttccacatggcagatggggaagagagatcatgtgggaggctttccacggatgaggcctggaaggggagtacaacactttcgcctacattccattggccagaattcagtccctggcttcacctaacaatttgggaggctaggaaatgtgaatttattgtgcactgaggaggaaagggaataattagccatattctgccaaggtgttccctgcaattatctgtttctttcttccttcctatttttaaacagaataggctagattacggtgcagaaacaaccaaccatcaaatctcagttgcttagaacaaaaaaggcttatttcttgatcatactacatgtccactaatgctcagcagggatggcattgctcattgttgtcattcactccagtctgatgaagcagtcaccaccacgcaccttgatgttgcagcactaggaagaaaagaatgcggtgactgatgtcccaactcttaacttctgactcaaagttatactcatcacttccggccacctttcattggctgaagcaactcgcagggctatactatactttagtcaggtggggaagtacaatcttatcatgtgcttcaaaggcagcagagctggaatatttgtgaacagccctactggattgcacattaacaaacacagaacacatattcatccccttcctatgggagataacccagattccattcattcactgcacacaaagtccaagatcctagatggtagatgccctccccaataagtttgaatattgcctagtgatctggagtctagcaactaaaattcctctctgtccccactacttattcagatatcaaaatcctaacagagtcacaactgatcatggcctgaaacaggtttccagaatctgagctatatccacaaatgtgagccctgctctgaacgatcatgcctagagaatcaggagcctggtacaatctaggggtggcaagcgggaaatacggcattttgcaaaaatcaatactgcaagaaaagagtcatctttattgaaggacatggcattgtttctccaggcttacaattaagcaccctgaataaagagtgtaggtgacaatgtggaggaaagcagtacgcacagattaaaaatacctacacgtaaatgttaaaaaatataaacgaacatactttgttcatccctcagaaaacatctgctcttatggttcttgttttgtttgcttaagaaaagatcttcacatttctatttagtttagaaaatagtaaaatgcaattcaatctctgaattgtaatcacagagaatcattttgaacaatactgtcaaactagcattacacagatcaagatttcaaacaatgtaatttttcaaataaactttgaccatctggtgaaaacatcaacatatatcttattcatattttgtttcttcagacttttctatctccctataataataggaatataatgcatattttaaaaatcatttatgcctaattcagaaaaataatgctttgttagttatatgatgtgcaagaagcttttacatgtttcaataagcatattaaatcctctctaacagaaacagaagttttcattatttccagaagaaattaatttgaacagcaaaaggttcaagtttgatttgaaattcactgtctctaaaacttttaaaactctgatttttttgggggggtgctgggccccttagctaactcttgaaatatacaattgttttcttcgaagttattctatacttgtcttttcacgcgctaggcctccactcacagtagagaattagttttagcctagtctgtggtacagtggctactcctacctgcctagtctctattttttcattgattcactgctttaacatctttgctctcaacacatacagcatttattcttatagctcctacctacagtacttactaaaagaagcagccttcgattagaaaggcggtatatggtcttcttaaaaccctttcttccctctggtcatattctgttcttgaaggcatttttttctgtcggacttcactaagcaagttagatttggagtcatgggaagattatgaagtggtggaagaaaagaatgaagactgagttcaatgttatttccaaagcccttcctaggaaaagtgttgtttattattcattttggaattctaattatggaggaaacctcccaaaaacataaataaattatttagccagaggacctaagaagtgcatcaaatttcaagtcaaatggctacaagttacttattacacctaaatttaataagcaataggatgtttgttctttatgtgtggtatggcttctagaagcaagctttcctctctgtagcacaggcagggtccaacggtctaggttcaaattcttcctttaccacttactagctaaaaacttaggcaacttatttcacctctctgtgcctcagtttctttctttcttttcttttaaaggctctggctctgttgcccacactagagcgcaggggtgtgatcctggctcactgcaaccttagcctacctggttcaggtaatcctcccacctcagcctcctgagtagctgggactacaggcgtgcaccaccatgcccggccaattattattattagtttttttgttttggagggatggagtttcactatgttgcccaggctggtcttgatctccagggctcaagagatttgcccacctcggtctccgaaagtgttgggattacaggtgtgagccactgggcccagccctcagtttatctgtaaaacaggacaaaagtagtacctacctgatggggttcttccaaggattaaatgagctagtacttataaagcacttgctaatgtctgttaaataaattatattatccacacaccaatccaaggcgactataaggtagcaagaaccactccaagtcacataagaaaatgaattcctttcgttttagctcctctctttatttcagcagtgcgttgtcaacagggccacattatgttagcagatttgaactttatccgaaaggtgtttgtattttatttcaaattatgaattcctgaacatcggattatgtacgattctgcagtgccctcggaggcccattagagtctggagctcgagaagcataacaaactctggtctgatatttgtaaggagcttgacagccaaggagccactcagaaacagttattggtattgccaaaaaaaaaaaaaaaaaaggaagctaagaagtcacccttctaaataaataaataaataaataaataaataaaaacctgaattggagagctgcctgcatttcactctactgcctctggaagaagagtgttatctaaagtgcttccatcatgaataatgattgagaaactgcttttactctcccgactactgtactcccaggcagaaacccacggctgaagcccacgatgcccatgtgtaacttggttattacacacacgtttggagcccagtgtgcagacccgcagcgcagaggaggcggcggaacaccccgggttggtcgggtttccaagggctgacccgagctccagcactttttccgcgcctgatttttcaggtcattttcgaatgggctatctttgcttacattttgagcttggatcctctccagaaagcattactaccttctaaaaggaaaaacatctcgtatttgcagacagtgctgagggagcaaagttcattttctcgggtaggagaagatgattctcttgcaacacgtgcggattgtgacaaaatctttcattaacaaggggagtttcggtgaagtggaggtttggggaaaggcgaggaagtcggtctggagcaagcaagcaaagtgcggaagctgtactgggattcttctagaaagtggggtgggaaaggagctagggagggcgtgtggagggacgagatctgtgtcagaacgtgcgtgtgagcggatacaaaacccgagagaggcgtgagcagcgctgtgtttgcgagcgggagcgaggggcgccggctggggtgtgtgctcctggtgagtgacaccgaggggaaggcgggcgggtcggcgggcgggggcagcctgcgaggggcgggagtgtccctgcgtggggcggccgagccggagttgtgtcagtgaaggaatccagtccgggggccgagctggctgcgccctccgctgcaagcgccggcagcgcggggcgagctccggacggcgcgcggcccaggcagcggctcccgctcggcccgccctccgagccgcaggggccgccaccgccgcggcgcctcccctggcgaccgcgcccccgggccccggctccggcccgggacggaggagccggcgctcgacacagaggtaagcccaggaccccctccacgccgggccggctggggatgcagggcgcgggcggacgcggaggggcctgcgcggccgggacggagactcggctgggccgagcattccgcagcccgggccgcccagcctccgccgcctcccggagcgctgggtgtggcccgcgctcggcgccgaggcgggctggtggcgcggaccggacgcgaaggtcgccgtccttcctttctccagccggcgcgggcaagcgggaggaggcgccggctgggacgcacagtggcgctccccgggcgagcgtgtggccgccgcgctccgacgtgtacccgcccgccccggatctgaatcgcccgcggccgccgtccctcgcctgccgtcctcccgcgcgggcgcccccgttccctcccaagccggaaagagacccaccgtcccccaggctgctctctggcccggagccgcaaagcccacgtcagccgcgaccaccccgccctcggatcccagccgggtgcgggggccgcggccccactgaaccccgcgcccctggcgcccagcgggagtgggatgcgttggcgtccgcgctgcgcgggtgggctggggtggccggagcagacgcggagcgccctggccgcgggacgaagcggtcgcgccgccgcatttgggcggggggaccccggagtccgcgggctgcggaccccagcgggagacggggttgtcgtaggatgcgctcgcgctggacgccggcgcactctgaatatcatgctgccgcacacgcggggctgaagggccgagtcttcacctgcgcggggatgcggcggaagcgtcgcgtcttcgcgagtggaggtttcgtgttcccgcggggttggtgtgtttttgaacttcacgagcttctcatcccccccgcaatcctggttttagcagatgtcggggttttggagacctgacacttttcgtgaaagattctttctgtacgttttcttttggctatattacagggtttgtagcttgagaactagtgaaaacccttgaacttcaaacacagtctcattgcttattttttgaaatttaaatattaaaatatgtaccagccccctcacaagccgacagactttaagacaaacgactgtgaaattttagaacctgtgcagagaaagtggttttataccagtacttgaaatagtaaggtcgtgtaacctttttaacatcgttttagtttgtcttaaaggaaggtttcagcaccactttgactggtactgttttccagagtttaagcagatgtatgtaatatagcagggaagaggacaggaagtcagaaatctcttcactctgaaaaaaaaaaaagacttcaaataatacaaccaataccctgaaaatagagtggccgtctggataaagtatttgataggccttatgaaattgtgttgcttaaccagaaagcaatgtgttgttagatagggcagttttatctagtaactgtcgtgtttaaaaatatctgtgtatgatattctttgttgaattttaactggggaaaaatcaactttgggaatgggtttctatttggacaaggcaaatactgcagtttctaattagagttttggaataagctcaagctgtgttaaaacctattgtatggagcagcagaacagaaaacatgtcaaatctgtatctgtgtggcagaaaacatgtcaaattctgtatctgtgtggctttaaatacacacacacacacacacagacacacaaactagagactagccccaaaagataatttgcataaaaatacaatcacttgaatgcagagaatagctaaagacgttagtaaaaactgaacatctgggaaaagactgtattaattggcaattttctttctttaatccctgaaaatattaaatgattttctaagaatcaacttagtttaatgtgctcatttagacaggcaaaatgatcaagactccttttgtattcattttgttttagggagccccctaatgaaagtcttcagtaaatagtttttctgcatgcactgattttcctgaggccattgtggagagagttatctgtgggcttgagaagctgctctgccacaccagtaaggatcagggaaagaaaatacttaggccacaccgttgcagtctttgattgcatgccagtctgaagcattttatggacccgttttgccatgtaagtggtaagcttttacatcagaagttaagctttagaaatatctcactttggggcctaatttttgtgagtttctcagtctgcgatcagagttgtgttatcaatcacagtgaatgttcgtgaatggttgtgtgttgaaagggcataggtggtcttcattctattactttacacagttttaatcagcattttctgaggtgagccaggacaagaacttctggttacagtttggataggatggaaaaagttgtggttgctcttcgtaagatctaagctgctactacctgtcccactgtatgacaagagtggaatgcattttatgtgcacttgacaggtactgcttagtcactgcttcatagtacttctttcctagccatcttctgtagcacttttactgtcatttgactgtgataattaaatcatatgttttttataatttctgtgcacagaagagtagattttacaagcatgacacaggacatgagagtaggtgtctcatatggacagatttaagtgattgggtctgtttattgatctctgaatgttgtgcaacattcaactaatccatttcatcactgttttgccttaaagtgtaatcacacaattaaaataagattttcatgttacaaacagttaaaaacccagtaaacataattatagaagaaaaacaaacctttcttttttcttcccttttttgaagtagtcttgctatgaaggtgttatgtctttgacacatcaaaatggctaatttggagttgtgatgcttgttatgtaaataggccatatgttgaatttctgcagaagcttattccttcagtgttgtggtaatgggtaggatcccctaagtaccatagctgagaaaaatagtcttatgaagatatatttctctctacaacttatgtaattttttattatttttgataatagctagtgtttttattttctgataaaaaaattttaaatgtgatgttatccttccttgcatcatacaaatctttgtctctagtactgatccaaactccattcctatttatctacttccttaattaatagactttttatggtggatggcctgctgtcaagctaaagactacatgcttgataacaaactttttgtattctctctaaacttcttccttttatgatgaaaagactttcctttcttgatccgtttagcattctcttcatcacccagactggagatgtaggaaccattgctgactcttcgctctctcactgcctctgtgaaactgtgttatcaagtcctgttaactcttcctttttaatggtttctctgagccacccctgcatttcgttttcattcttcactctccctgatcggatgggaggccgtcagccatcaccgtttctaggataattatagtctacatcttggtctctctgtaattgagttttccccattctacgcacttccaccgtatcaaccttcctaaaactcttccctcaaaactcttcaaggattgtttcacaggaacaatactttagcattgtttagtattgcaccagagtgcaaatactttccatggcctcccccattgcccagcctctcaacttggtttcagtgtacctcacagtcttgccccaaattaacttaccaatgttattttctacttctttccaacatgaaccttctgttcctactagttggatctcactgcccttctaagatgacatgctcattttcatgtgtccttttttgttcatgccctgccttttagaatgtgtctcttctttttttctctgacctaaccacattcttcaagttcaagtcagcctgccctgatcatgttactctcattggttctttctgcccttttgtttgcatcgttcctctagaccatcacatcctttcttacgctgttacatgcttctttctttctttctcaactagatagtaaggcactgatgtgccttttattctgtctaccggccctggccgtaagaagcacttgataaatacaccgataaaatgaataaatgtaaggatgattttttttaaatcatgggctttgatactgactctgaactgctcaccattgggtcctcagagcctaactcatagcctgacacatagtcatgacctcaataaatatttgttaacttagaaattcatgttgacattggataaaagggacaggcatttgaaggaggcgtctgtcaagatttttttttcccatttttcttcagtagttctaatcagcttctccattcatcaactgtgagaattctgaggactcggcatttcccagagttgggataatgatggagtctggcagttgtgagttggaattaagaagcttgtagttattttaaggtggagtgatgggccccagtactgagcaaaaaaagcattgaggctttatgccagtattttatacgtcaaacaattaggctaaagttatcagttatataaaagttcagctaattggctctaaaatttcagactgtatttattgcagggctgctcaagtttttcatttaaaagcatccctgtaaattagaaaaaaatacatctgggcacccatctgagggtgaaaggtgatgtagggaagagtctaccacatcccattgtattcaggaccgaatttaattgtttagtaagccttattttgtacaaggcactgtttctgctgggaaggagtttatagcctagcaggaaaaaataacagacgtatcccagaaacaaaggtctagcagagctcagaagggaaaaaaatctgttggggagtggagggaatcttcttagaatgacagttgtttgaggtgattactgaaaggatttggataagatttcagtgttattgggaatataaggatgggggaagggtgctgtgagtgaattccagggccaatttgttgactttacatcagcactcttatagtactcctgcttctgaggagttgaacccagctaggagtcttctgagcattggtgggctgcagtgttcaataatggaacctaaaggatatatagatacctgcagtaattacatgtggtgccaagtgctgaactgactatgacacaaagcaaaaaataaatcttggaagcagtataaccagtgtgttcctggatagcatccagctcacttagaatgctcagaaaggcctcctgcattatggaaatgccactgaaggttgacactttcacagtaatgtaaataatgagaggtgcaccccagattgtggtcccaagcagccagccatctgtgggacactgcacagtgcacctagccgagttgagtaaaggtgtaaacacactgttatatagaaccctcattctgattctgtggaacggagtcccatggtctgtaaagctaggaccaatgggaatgtttgaggaatacagattttgggtcaatagatggaaagttgccccattatggattgtgctatttcaggaggtaataggcccccatcactaaacatatataagcatcgcctataccaggcaatatcttatttaattatatacattctctcctttattctcaaaacagtgctatgaagtacatgctcctattactccagttttactgaagagcaaaactgaagcctagaaaggttgagtagctagtaatttgtagagctggtataaagcccaggcagtttgcgggcagaaactgcatatgcactgagatgaagaaaggatgcaaacattaggtggccatatggattttcaagattccttcctaacactaggattaatactttaattcaccttagggatcaagatgctagctgttgcaaagtactagttcattatcagcacccagttcctagagattcagaacaaagtgaatacagtcatcatcatcatagttatcacttattgatcattttatttaaacctcaaaggaatcttggaaggtaaggattatacacccttattggacagtgaaactgaagctcagggaagttacataacttgattgagtctgcagagttgataagtggcagatgaatctggtgtctgacacccaggccctgctttttcttataccaccctgtgaggtaacacatggtgacactgaaaatatttacctatcggtctgcacagaaaccaacaagtcagagctgtcagcaacgcctgtggctctgcaggtgatgagtatcacctgaagtgatatttaggagcagtttgaaggtgtgtgaaaggcttggtaatctaccaagaccacagatctggagctctagtgacttcttcccatgctcagcatttattttattttatacatgataagtagtactattaaagagagagaaagccttcacggataactattattacatttatatttctaattaaggaaaaatgttttgcagtggtaatctgtgtcccttataaatggcaggctctcttcccactccttgtcttcctttcccttattccagtctgatgctaatccctcttgcttcctcagggaccttgcttcattgtcttttcttcagggtctcaatgatccttttctttcaacatataaacatgcataagtctttcatattctttatgaaaacagaaaacgatgaacgcttttggtcgcttctctctaggtttgggtgtgtttcatcttattcctggtcttagcaggcagctccttgaagtacaggtcctcgtacacatcccgcacctcgccatcttcctttcatcttcaaccccctgcactcctgtcctctcctaatgaccaccaggtccattatctaggattctctttcatttcttgaactttgcacaacatttggtgttcttgaccactctctgctccttaaaatgttgcccacctgttttctgagttatccatttctcctcattttctttcttgtccagctgctctatatttggacttctctttactgtcctcccttcctctcaaaccttagcctcccctacagttcagccctcagccctctgctcattctgcacgtttgccctgtggcagctcatcttctgttttcttctactaccacctatatgccattgattccattgtaaatctgcatctccagccttgaaatcttatctgacatgtgttccaaatgtctttaactcgacaagttcaaaacatcacttccccaacttcaatccagcatactccttctgtgttttctatctcaatgaatgaaacctgcttcaccaagtttaaaacccaggacaacttctttgccttcttcaacctctacattttatatagagactgtcttttcagactctcttgaatctgctctttcctccctgtatcataaccttcattactgccgtggttcgggccctcatcccttctcttgaggattattgcagtagcctcgcaactggtctctctggcttctgcctggcctgtctccaatttgttcctcatactgctgcctttctaaaaggcaaatctgattacaactctccactgcttaaaatccttcagaggagtttctgcatcttcaggttaaaatgtaagctccctggcatggcacgaaagcttctttgtgatctgggccttcccttcaggtgtgtgtcagtctcctctaatgatcctggtccccactgtctgcccctgcccgtagcatctccactaaaggaaagaaatgataggagggatgggaatagaggcgagatgatagacctgctgttcagtactgtagccactagctacatgtggctgttgggcactggaaatacagctagtccaagttgagatgtgcgtaagtgtaaaatacaccatgctttgagactatataaaaaaatgtaaaatttcttatttaacaaattgtaatattggttacatgttgaaacagcaatagttttgatatagtaggttaaacaaaatatattactaaaattaatttcacatatttctttttatttttaaaaatgtgattacttagtggacgttaccatgcgacataaagaaataataaaataaaatgtgattactagaaaattaaacatcacctgtgtgctcacattatagttctgttggacagcattgttagggaacatctcattcccaggagatgcatcctgtacgagccaagcccacgagctttttgaatgattaagtcagccctattggcatagagaagtagcagttgctcagttttttcagtccagaggtatgaaatgtttggataagattcagaattggagagacagcttctgaacgctatagccaggagttacatgtacaatgggcatagtgtggaaagcactattaaagcacatctgtctcagcaggcccacccagccatcatcagaagtgggaggcaggaattctcgtggtatggtagaggaaggatttgaggtagacaggaggaacaagggaagggaaagtggaatcacattccctggaagcctcctatttgtgaggcaccagctgaaaccctgagagccaggtctctgagattccccatcctgccgttgattcttcctagtgggctaagtcccaactcccctactgtctggctgtaggatcctgaacaaattaatgaatcaacgaatctggagtccgaatattatgcacaccatacagtcataatgtgtcaaacaaaatgatgtgacccacactgataagggctctacagaagttagttatgccttaagacactgagggcagtaatctgtggatgagttggcctgaagggctttgagggaagggcatacggactgtcagaaagacctggaagatagcacctgttgccttaagagatatgcagagcttctggctaacacggtgaaaccccgtctcaccaaaaatccaaaaaaaaaaaaaaaaaaaagagcctggcatggtggtgggcacctgcagtcccagctactcgggaggctgaggcaggagaatggcgtgaacctgggaggcagagcttgcagtgaggggagatcgtgccactgcactccagcctgggagacagtgtgagactccatctcaaaaaaaaaaaaaaaaaaaaagagatatgcagagctttatgtgttcacgatggaaaagccaacctgtgataggaaaccagatcttaccaggttggatcaggaaggggaaccctcctggaagaggtgatgggaagaaactgtgactataaagagaacagtccagtgggattagattccagtgaaatctgataggcagtgtgactcagtgtcttctctagtggtggtttgcctgctgtagtctgttggactcttaaattctgagaacttcctctcttggtttcaacctgggcggctgtttttatttgcttcatgagtaggcattttgtataagattttgttaggggcaaaggttcttgtgctaaaaacagaagtttgaaagtcctacattatagaaaatggcctgagaggagtggtaactaccttgatgtgattatttctccctcattcgcaggatctaggaccagtttaggccctttccagagggcatacagcttcctttcatctgaggcttagcgacttcgcggaccaaccatgcagtttgccttgtccaggtagtttagccaggtagccataactcagtcttgttcttgggtaaacaagttttcacttttgtactgggttccaccttgtctcctgcattcccaagtcctggatttgtgttcttgtggagggaccccaagttgtcttagttaaggatcctgtcatgtttctccaagccttcttgggacagtagtgtccctagggttgggccactgctactcccttctaggcctctttagtactgagaactaccagcaagggtcaggaaacttgatagatatttagaattgaataatttgcctggagcttggcttttccctggctccagacccctgagagcaaatattcttgctagtttgcagtcccgctggtctctgagtcccatttgtacaacttggaaggagaaaggaagacagatatagggctgattttcttaaattatggtgcattcatatctttgtctctagtgggaaggttggtcttatgtgtgtatgagaaaggtggccgcctttatgttgtggtttcagaatccatactgctgaaaagggcacttcaaatatcaagtttctcttttttgctctccaatatgtgaaagcctacgttataaaaactctatttagtttcctatgaccagtatgatttagaagaaaaagaggacgggctttggcacttgaaagacctgattttgagtcatgccattgctggctatatgaatttgagcaagttatttaatctttctggaccccagttttctcatgtatgaagcaaagtgagtaacgcctacaattctgttatgattttgttgtgactaaataagataaaatataaagtgcctggcaccagggcctaaaatgcaaatgctatggaggtggtaagtcaaacttatcctcatatctcagtatatctcaattcaccctccttatgttgaataattttatagacctttccctgagactgatcaggaagaggatatgaaatctggggcaaggggcccagattttacccagccaagggtgacaaaggaccagaaggaagttgccttcacattttgcctaagtcccattctccctatgctttgcatttgtgaaaatattcatctgagattataggtacagcatgaagccttggaaaaaaggcatgtttacatcctctgccaggatagcataacaattaacaaagcaggtttttgaatctctgaatagtcaggtgcactgccatcaaaataaacttttatttctattctttgctgatagattacaaataaagccactaaaatatcctgaaaaagaagatttatatatgaattggacaccagggacagatttttcacacttattttgttggagcagttttttccttagctgtgggtgtttgggaagttcttttgttgtagcttttgttgcttacaagagggaaaaagctttagtatgctaaggtaagaatgattttgattggaggcaatattgttctcagtgtgggctgactttcacgtattgtagtgattaccagtacataactgagaaaacccatttgttgaagtgctgtaaacagcagagagtctgatctcacatactgccctgatcgacaagtgtttattgtaggaatgtggtcagtcctgtaattttttaagggaaaaggggaagatgttatgccagtcactgtgattgcaaatgccctgatctggcaggtctttttcctttctcgtttatttctcctgtggaatctgaatggtggattcagtacatgtactgagcttccagtgacttggtcagctcttgatgcaattgatcacaccactgtaattccataccctcaattttagtgccatatcaaaatcatgaacactcaaggagaccatgtaaatctacgtcctcaaaaattagaaataatggcattaaaaatgttatttagtgctggtttgtagcactgaatatatgaactcattcattgttctggtactccctgaacaagaactgtttcggttgcagtggatgatatcaactaaggtttccatggcagcactaatttataatatgaaaacttttgtggaatttcaccttctggactcttctcgattgcatttaaatttacattttcccctcatttattaaggtgaggcatatttagatattacttacatgtgtgtactaggagtatcttcatgaaactcagtgataagaaattacacgtgtagaaagcagacaatggaaacggaaaatggatactgtggtctaacatctcaccaaatgcaggaattctttccacattatcccagttgccatttgaaccagccaggaacgaggagtttggtcaacattttatgaagccaaataatgctaatgacagtagtctgcagtgctccggaccctaagcccatttcgatttggacttcatgttatttgtgattggaccaatactccatcaagcacaggtggacacagatatttgtaaaacctcttccccagtggtgcactgaaacctgcctccctgcagcttccctgttggtcttccatccgccctttgaatgccacagaataaatatgcaccttctgtgtggtcgctcttcaaatatttgaccatagctattgtatctcctcctcgaagtcttctcctttcagggttatgcagtgctagttctcttaactgatagttctcatcctgttaacattcctctaggcacccactactctatcaatgccatcttaaaaatagtgcatctggccggatgttatggctcacgcctgtaatcccagcattttgaaggccgaggtgggcgtatcacttgaggtcaggagtttgagaccagcctggccaacatggcaaaaccccgtatctactaaaaatacaaaaattagctgagcatggtggcgtatgcctgtaatcccagctactcaggaggctgaggcaggaaaattgcttgaaccccaaaggtggaggttgcagtgagccaagattgcgccactgcactccagcctaggtgacagagcgagaccccacctcaaaaaaaaaaaaaaaaaaaaaaaagcatcttgaatgcaacagcctactcctgactgagtattctgaacagtagaaaacaccaggctgctattcactcccttgatcagggcactcttttattaatctagtcaaatattgtgtgggcctcacatgtaaatcaggaacagcacattgtttgttcacatacgaagctaaagaaaacttccaagccttttttcctaacaactgctacaaagccaggtctcctttgttctttacttgagcagtgaatcatgtgtgcctacttagaggactttacatacatttatccttctacattttgtctctttttgttaaattatttttcctctttatcaagacagctttgaattctaaaatttttaaattcgatatattaatgatgttagactcttacttatttatcaattgcacacttggaaatgttactttgtcgttgataaaatgttgaccaagacaggccaaagatagggccctgtgacattctgcaagagaattattaacatcagtatgtgaattttttttttaaactagcttgacagtctttcacttgtttactttgttatccaagagcatagagtcagggaaagacttagtcaaatgctttagtaatgagatcattattggtctacttattgccacacagtagaactctatgataaagaataagattcatgagagtaatttttagattgcattaatttttcttctgaaaaatttcttgaaaaagcatatctaagtcaccttatttttaatgtatctaagagaaaataattttgtaaaataaaatcaaacttcacctatcatttcaactcatgaacttgtttggttcaaaggaattgctatgtaatacatcattctattctctttacagaatcattactcttaaagagaattggtggggtgacaggaaattactccataggtgtcactccagcacatcatgatattctcatctcctgggacagagtcgtcaggctgaggcatgtcctaacagtgtgccagcctgtgtagatggctccatgacagtatcagtaacgtgaccatgacagagagagctctgatggcattgtgtcactaatggatgtgttttcactaagctgaaaattctgtattatttgaaaagaggtttatttttcttcccacacaaattatttgactctcatattaatgtcaaatagctgtcaagtaacacatatggtgctttctgtgctatattttattgtactcatgtacaaaatagtttttttaaaaacatgttctctgccttggactagatagaaaaaataatttaaaagaatagtattcttaagaaacacaaatctataatatatcaaggaataaatgagtgcttcataaaaatactagtatttgtgtctatatttttcagagtactttcatgcattttcttttttgaaaaaaaatctgatgttaaaaataatacatactctttgaatttggaagctactgaaatggataaaaaattaaaagtcagctcaaattccacctctcagagattgtcactgttagcatttggtgtttccctttcagatgtgcatttgtgtgaggttgtgagtgtgtgtgcatgtgtatatttgtgtgttttaaactagctcttggtggacccaggacgtttgtacagaagaatcagcatgacatagtcggtaaagagctttggaatcaggcacttggagatttcagctctggctatacaacttacgtagtgactatgaattccttaaactctctaaaccttaatttctacttctataaaatgaggataataatactatatacctagtaagtttattgtaaaaattaataagataatgcagataaagtacatagcatggttcttggaccatagcatatgctcagcaaatgtgaactatttttattatgcaggttttcttttctgctttcttcacttaaattatagggtaaaaatttccttgtcataaaatattatttgaaaaatatttagaatgactgcataaatttcagtatatgaatgtgctttaatgttattctatggataaacaatttttaatttattgtgatcacaaagaacaccacagctgatatcgtttacattatgttttgtgaatagacaacaaattcaaagtgaattactaatcgcattttatggagaggcagaaaaaaacttacagttctttagtgtctattaatgttccaggttatatgctatgttctttacaataaaattctctttaactttcacatcccctttgaggtaagtctgttacgcccatttttcagatgacagagctctgaggggagataagtcattcgctcaaggtcacagagagatagtggtggtagagatggtgtttgaagccagcgtcagatttcaaagcttatgctttttccattctggcatgtagttcatgcctatctttttgaggcttgcagaatgaatagttagcattgtgccttctacaaaatgtcacttggtgccacatgaaagataggatacttggctggaatgcttgacttactcaatatagtacctcttgcgtgtgtgtattcttatatgttttggaatcaagcctcattaaaataaggtgttaactaaaggaaatgaagcattgatatgattatttgatgaaaggaaacctcaaggaagaaaatattcattgagttgataatatgaaactcttctttgttttagttgtacggactaagccagaatcacttatctccccaggaatcagggtatttcacataagtcagtttaggaattaagcaataacaacagccaaagtaaattgatgctgtcaaaggaattgtatgtttcattacttgtatatcaggggttgaatgtaaaaaaatacctctttagcctttgctgtaagctgatacatcaggaaagagctgtaataattgctataggtataagtataggtatacgagagacaaagtatactaggataagccctcaaagaattatttggtgaactgacaagttgtctttaaaaagtcagccattcggaacatttctcttggcagctctcaaatctgacttacagtgtgtactgtggcagccaattttgtaggaaaaatgcataattaatgtgaagatcaaggtacaggtattgccagtcagtacctaacacacagtttcttagaacaaaggagcaattgaagttgtcttttgatagggtaatcctgatttgtcattttgtgggtttcaattcttagtaaaaatgggggaaaaaacccaactctaggagtaatatttcatatctgagaggtactttgttgcagagtttataaccaactgttgtctagtcaagaaagctatctttggtttttgagatctcgaatttttatagcctttgagcttgctcatttttgtcttaggattattctggtttccctccagtcattttagtttttgcaagggagaaacagtatcacttatggacccaaggccaaaaaggcttcaaatctcgacagaacatgaccaccaacttggcatgttggtactagcaagttaaatttgaacttactatgcaactagtgaatagttagaactgtgaacagagaattagctatgggatctgcaggttggatttacagcatggctccattgtgtggtagctgtctacccctgggcaaacagctttcctatccctgagagtcctcagctctcaaatggagataatgactactatatagtcagagatcatttggagggtcagatgtattgagcaaaccattggttcacccaaaagtttgcttatgatttgtttctaggtgattaataatggcttgagccattataccatttaaaatatttaatgagaatattttaaatattctcatgagccaatataccatttaaaatattttcaaatgaagtatgggaatatttgtaagataaatgtagaaatatataactcctggggctaacctcaccagacccttctaactctttgcttagactttatccagtaataatgggacaggcccttttactgccctggaaacccctggtgcctagcttagagtctctcagagtttggatgctcacacccagggcatattcctctaatgagggaagggggccttttgacttcaataggtggttcctttgatcacagtaaagacctttatagaaataggcatttagatctattatgttgttctaagatagaaacaaaactggtatttgatgtgtattttactcttcaataagaaaggctcagagaaaaagactataaggtagaaaaaagatttcagaagattgcattacagaaaattataggcaactcttttattattaaagtaatgcaagtgctggaggggacaggaaagggaacgggaatttgggaactttgacactgggtagcatccgtgcagaggtttttggaggtctctcttggttcttccccccagttctggtgatgtagtgaagggctcagaaactgcttctgggtctgactgcaagagagtaaatcccaaccctggggctgcactgactcccttatcctgggcggctatgttctgacctccttggcttttatggcctcccatacagtcactgtggatcgccctttatcttagtcccttaagacaacaggatttgctcattgaccacccttgcttggactatactgtaggaccttgaaggtgtttcaggcaattaatgattgaaatgtctctgtggagttcctgagggatgtaagtgtgtgagctaagtgctggacattttagacaaacctctgtgactgctttgcagtagagagcccacccaaggcccactggtcccaggactctctgagcatgccaggtggtgagggtcaacctgcttgctattctcatttggaatcaatttctaaattttatttctccttcgacacagggaactattctgaatttcccttctttgctttggtaccaaagctttcattgagctcatcagctatttcctgagtgtctcctctgcaccaggcactgtgagaggaacaaagggaaatcaggtcttgaaaggaaagaatgtgcatgccttaggtaagaagcaagatgtgtctccagagttgagagaagggagaactgaagatgcagtgaatttttttctgttgtactttctatacaataaattttacttcataaaaatctatactaatatccatttgtgtggcaaattccattataatgaaaatctctgttatccagcaacttaggcaagtatcagcagagcacaatttcaatacagcagaagactttggagagtcccttggagtgagctgaaatgggatttgacctatatattaagcttttcatggttttgatatttttcatttccatgtgtcaacaaatacccgacttgatattaaagccagttaaatcaatatttcttgctgtagtcaaggtacagcaacatatatccaagggcaacaactccccaacagccatattttgttgagaatatatattttatcataaacctgattgaactaccttcagaggaaaaggatgaaaacatcaacatagctatcataaaaaaagaaaagccagggaatctataatcttgtaccttacccctcatttaaacaattccataatttattttgctttctttaatcataaggaatgacaacatggaaaatatttttattgtgatagctgtggtttctttctctatcctcaaatagagctgctttaatccttctcccaaattccgtcccattcaaaggatttttgagcaggtacatgtgagcaaagtggcaggtacagctgaatccaagattcttggactgtaggaatctttttatttatttatttttttagacagagtctcactctgttacctaggctggagtgcagtggtgccatcttggctcactgcaacctctgcctcccgggttcaagtaattctgctgcctcagcctcccgagtagttgggactacaggtgcacaccaccacgcctggctaatttttgtatttttagtagagatggggtttcatcatgttggccaggctggtcttgaattcctggccccaagtgatctgcctgccttagcctcccaaagtgctgggatttcaggtgtgagccaccgccctggccagactgtaggaatctaataatcaaataattgtaatgggaaggagagtggagtagaagcccatttctacttactctttctctgaagttttaactgtttgacaatttctggaagtcacctattacaaactcagtatttctataaacaaatagtctgatgcatcagtttataaacaccaacacatttatttactatgtgttatcagaaaagcctcacttatcttccttgtgttctttgactaggtgagtacttaaccatttattgggctcctactctgtgctaagcacttaaaatatttcacctctcacaggcaaaatgatgctcaaggcacatgctattgtttatattttccagataaacatgagacttcagctgctaagtaacttatcaaagggcacccaggtagaaagggtgtagtctgaggtttgaacccaagtttgtctgattccagagccttttcacttttttagagatggggtcttgggctcttcacagatgcaatcatagcacataatagccttgaactctgggctaaagctatcttcttgcctcagcctcccaggtagctggagctacaagggcttgccaccatgcccaactccttttcacttttttaaggctgttttccataatatattctgagattgaaaacaaaaattcagattgttaaagtagtacatactcactatagaaaatttagaaagcagagaaaattattaaaaagaagaaaaattaccaataatccttcaccctagggattatcactactgaaatttcaatcgtttttctctctaggcttaagaaagctatttatccaaatgagcatttttcctcaaagttgtcctctttgaggaaagatgtcctctttgaggtttatgcatgtattccaacaatgttgccattgcataaaataattgtggaatccctttcagagccagtttaggaaccaacttttctatagactcccaagcacaggttactttggtagaaacatagtaaagacagtatatctgctacctgaaaacctatcagaataatgcatgatatgtttgagcattcttttttttttcgagacggagtcttgctctgtcacccaggctagagtgcagtggtacaatctcggcttactgcaacctgcagcctctgccttcccagttcaagcgattctcctgcctcagcctcccaagtagctgggattacaggcgtgtgccaccatgcccggctaatttttttttttttttttttttttttagcagagttggggttttgccatgttggccaggctggtcatgaactcctgacctcaggtgatccacctgcctcggcctcccaaaatgctaggattacaggtgtgagtcaccatgtccggccctgtttggccatcctgtaccttctgaaatcctatgctgcaaatatttaaccatcctattaaaaatgccatcattgagccaggcgtggtggcttacacctgtaatcccaccactttgggaggccgaggagggcagatctcttgaggtcaggagtttgagactaccctggccaacatggtgaaaccccatctctattaaaaataccaaaattagcccagtgtggtggcatgcacctgtaatcccagctacttgagaggccaaggcaggagaatcacttgaacctgggaggcggaggttgcagtgagccaagatcatgccactgcactccagcctgggtgacagagcgagactccgtctcaaaaaaaaaaagctatcattgccctctcttgagttgtaaatatcttgtgctgacttctattgtagtggcagatggaatttaccaaagtgctgcttctttccatgtcaaagattgatggatattttggggaatgtctaaaagtctttattaaaaatttaatccataaatgtttaatatctcatttgacaactcatgttatttattgctttgtcaacacaacaatgtttgccttttgtggggcataaagaaaattagaaaattgtttttgtcaaaagtgtgaaaagcatattttaaaatcaattcctttttaatggaagtattacactcactaaattattaccctccaaggagtttttgtgaaagcaaatgtatctaggtgagatgaactgatctttatataaagtcagttgcatttatgtagaagtaaatgtttcccgtagaagcaggcgtgtgcgggcacacacacacacacacacatacacacgcaaacaaaagatttctgtcaaaatagccattggtatactttattaaagaaagtcaattaagtaccagctgagttcttgtcacttcggtttgttgcatacaacactactaacttgtagaaaacaaatctaacttccacccaagcatcccattggttttcttgtttctgccttatttttcacagacattcttaccctccccatctgcttagcatgacaccctaccccttcccagtctgctggacacttggggcacgtggatcctgggtgttagactggtacagattgggacagaccaagtgtgtacagttgtcctcagggctgcattcttcccttgtcttctggttgccaagatttcataggatgagaattcaccatgcttatggaggtcattacaaagtgtaggctgtgtcctgtgttatatctttggcattattcatggtgcctaacattgtgttcagtcaatgtttgttggctaaatgaagggttatattttttcaaaactggactggtagggagaaaaagttagtccaaaagaaagtcacagttgtaaagtagaatctcagggcttaaagtctttaggtcaatcctcttatttaaagattaagcccagagaggtcagctggcttggagaaggtcacccagagagttggtgccagagccaggaacagcatctcgtgtcctgaggccccgtccccttctttccagtgcctccctcgcggttgttctccagtcattttgtggaggtcaatcttctgagtctcgtaggaccagttagcggagcatttgaatccccacacagtactcagcagagcattagagacataggcattattaagaaatatgtgaagtgatgggtgaccgagtgagtgattgattggttgacttacgaccttggcacccatctttccacctaagtggttactggttgaatggtgagttctttgggattgtgtgtactttataggatatcttttggagaggagaggattataacaagaacaatagctaacattaaattggacaagatattttggtgaatagtccaggctctggaacttgattgccagctacattttcatgagacaggtgatttgacctctctggtgcctcattttccaacacctgtaaagtgccagtaataccagggcctacctcagagtattgaagagttagcctatgtgaagccctagaacaatgctagacacttcctaagcaggcaataaatgttagctgttgttggtgtatttcactattatatgttaggcagtgtgctaaatgcattacatatgttatatatcatccagtcaacaactttgtgaggaaggtactgttattatccccatcttacagttgaataaactgaggcacagagaggttactccacctacctggagtcacatagctgttaagtcatgggtgaggacgaattccctgtcttcttgactccagatcctgtgcttgggttttgagtgtgatgggaaatgggtggtgtggctactaatttgagacctgcctgacttcccaaatttccatttttcctagagctcttcagaaaccaggctgctttcaggaacattgctgtggattcccaggtgagtagagatggtccttccctctctgtgacctcctcctgctgccatggccagctgtccctacacctgcagctgcctcctgggagccttgtcacagcctttggccgcctctgctgcctctcagggctcaacaccagagttctcttttagagtgtgttgactgaagttattcctgatagggcagtggggtctggtggatgtaagtcagtgccaccccacccacatcccccttccccacctgccttgccacgtctgtggatctttagagtagtttcatgcatatgaaatactttgaagtaccaaaaaaaaaaaaatagggcttttaaagacattcttgtgatttagaaaagaattatggctaagagtggtgggctctggagccagactgcctggctttccctcctcacagtgatagccacttttgctctcactgtccttcttattgaagaatgtgctcccacgattgcagaagtctgacttggaattgacagtgctcagtcagcattgagtgggagtaggacacagactcctgagccagacagcctggctctgcatcctgcctctgctgcctaataatcgtgcagtcttcgcatgtcacttacttttctgagccttggtttcctcttctttaagatggggtaattatacccatcttgcagaattgtcaagatgttttcaagctcatgtatgcaaggcaaacttacacaaaattgatattcaataaaacagtaaccaaagatcatccttggtccagaccctgttaaataatcataaattccaaattgaggtagtccaaattaatgaagtcttattgcctcctggatatttccattaatgtttaatataaacttgattctttttccataaatgtaaaacttttgtggtaagatgattgtaactttttgaaaagagccataaatattggtgggagttggttgttttccatgaatagaatcgaatattttacttcctcatatttgaatcacaatgaaagcactttcagttgttcaaagagaattaatatagaaacaactgttgattttctgtctttctgtctccatacacatgtctgcatgcacaggcgcacacactgcttagttttcctttggttaggcagctgaagagttactatgtagatcctggcagccttctacccatcagacaagcaagggcacaatcaattcctgttttcttgaaacgtataccaaataatcagaaactctgattattctgctggaaggcaacagcttgatggaaagatgtaccaattgaaaacaattctgatcatatttttgtcaggagaatgagatgcctccagctgcctgtcactaatcatattagaggtggaaagcaggaatgttttaccctgcaaaagattactctaatcatgtgttggaacgctacttgtactggctgcttatcccagaacggtgacattagacatcccttctgtaactggtcttgccagttggtagtagtctaaaccatatgccacatgagcacactttaggaattttctaattacagctcaaaggctttacttttatctttttatgcttgtactgcagacatcagtgattgaaaatgatttccccctcagcataatcctattgccagcagttatgaaagactaggaagatggtaaatgaagcccacaataactgaagaggtgtccgaattcaattatgaagaggcctgtcccatgtggacacataagccatataaatccattttaattgtgagctgtgatgcttatctgattatgtttattttcgatgcaagtgccaaagctggatttagaccagaattccagatcttcaagttctaatgactaatttgggtatccactgaatcccttaattcatttcttaatttgttctcccagaattagagagttgcttggttacagtcattttcacaaatttctcatggatcaaaataaatgtacatagatgtttttccccctaggattcacacattttgctctgatctcaaggaactattcttgttgttatcaaaataacaataacagtgccaacaataacaacaaaactaacattctgcaaggtagtgtagggaatatagaccgaggctccaggaggaatgattttgagtcgcacctcagctacttaacagcagtgggaccttggtcaagttagtccccctctctgtgcctcaatttcttcttgtaaaatgggacaaatgagagtattcacctcattgggttgttttgatgatgattaaacaagcccatatatggaaagtataggtaggttgatatgtggaaagtcctggcacaataaaaaatgttagttattttgttgttattggtaagacagtggtcgaccagaggcagattttgctcgtaccacagtattgtcatctaagtatgtcccatttctacggtccacttggagaacatttatgatggtaatgaaaacactggagactctgaatttggaatcaatctctgttatttgtgcttgtactccttagtttggctacagaaataacattttttggctttccaggcttgatcagtattgaacttggaacccttttggtgcaaaattgctttaaaatttgaatgaacattttgttctcttggtatgcacaatattagccctcattaagaggaaaaattttattacaatatgtaaaatgtgtgtgtgtgagagagagagagggagagggagagggagagacagagaggaaagagagagatttggaagaatcagctttagtaagtttactggaaatcttcaagctttttttttttagagagacagggtctcactctgtcacctgggttggagtgcagtggcgccaacacagctcactaaaagttcaacctcctgggctaacacagttctcttgcctaagcctctggtgtagctgggaccacaggtgcatgccaccacaactggctattttttttattttttatagagatagggggtctcactttgttacccaggctggtctcaaactgctgggcttaagcgatcctcccaccttggtctcccacagtggtgggattacaggtgtgagccaccatgcctggcccaaactattttttaatacagtaaaatgcatttattatcatggcttagatttagtgaatgtgtaggagtgaaagtctactgagagaataaatctagtaatttaatgaactttcttcatagcttcataagagttagttaattatgatttcttaattcattgcccaaagaatgaattactggaattcattatattttttttttgaaaaaaaaaaactaagttagctgcctgtgtgtgtgtgtgtgtgtgtgtatgtatgtatctatgtattctagagaaatatatattatatgcatccagagatgtgtaaaatattctctatcagtaggagaatagattaataaattgtggtgtaatcatatgctagaatactatacagcagtaaaaaaatgaactagagctgtacacaataacatggatatatcccacagacatgatgttgaaagacagatatggcctgggtttgttagctcatgcctgtaataccagccctttgggaggccaaggctggggggttgtttgagcccaggagttcaagaccagcctgggcaacatggtgaatctcttttctacaaatacaaaaaaaaaacaccttagctgggtgtggtggtgtgtgcctgtagtcccagctgtttgggaggctgaggtgggaggatcagttgagcccaggaaggaaagactgcagtgagccaagatcacactactgcactccagcctgggtgacaggacaagaccctgtctcaaaaaaaaagagagagagagaaagaaaagacacaagattacatagcagtctttttttttttttaggtttttattattgtctttattttattgagacatgatattttatatatttatgggttacatatgagtgtttgttacatgtgtagaatatgtagtgatcaagttgggagtttggggtacaagggttttttaaaattttttttattttttattttattttattttttattttactttaagttttagggtacatgtgcacaacgtgcaggtttgttacatatgtatacatgtgccatgttggtgtgctgcacccattaactcgtcatttaacattaggtatatctcctaatgctatccctccccgctccccccaccccatgatgggccccagtgtgtgatgttccccttcctgtgtccaagtgttctcattgttcaattcccacctatgagtgagaacatgtagtgtttggttttttgttcttgcgatagtttgctgagaatgatggattccagcttcatccatgtccctacaaaggacatgaactcatcattttttatggctgcatagtattccatggtgtatatgtgccacattttcttaatccagtctatcattgttggacatttgggttggttccaagtctttgctattgtgaatagtgccgcaataaacatacatgtgcatgtgtctttatagcagcatgatttataatcctttgggtatacacccagtgatgggatggctgggtcaagtggtatttctggttctagatccctgaggaatcgccacactgtcttccacaatggttgaactagtttatagtcccaccaacagtgtaaaagtgttcctatttctccacatcctctccagcacctgttgtttcctgactttttaatgatcgccattctaactggtgtgagatggtatctcattatggttttgatttgcatttctctgatggccagtgatgatgagcattttttcatgatgatgagcattttggctacataaatgtcttcttttgagaagtgtctgttcatatccttcacccactttttgatggggttgtttgtttttttcttgtaaatttgtttgagttctttgtagattctggatattagccctttgtcagatgagtaggttgcgaaaattttctcccattctgtaggttgcctgttcactctgatggtagtttcttttgctgtgcagaagaagctctttagtttaattagatcccatttgtcaattttggcttttgttgccattgcttttggtgttttagacatgaagtccttgcccatgcctatgtcctgaatggtattgcctaggttttcttctagggtttttatggttttaggtctaacatttaagtctttaatccatcttgaattgatttttgtataaggtgtaaggaagggatccagtttcagctttctacatatggctagccagttttcccagcaccatttattaaatagggaatcctttccccatttcttgtttttgtcaggtttgtcaacgatcagatagttgtagatatgtggcattatttctgagggctctgttctgttccattgatctatatatctgttttggtaccagtaccatgctgttttggttactgtagccttgtagtatagtttgaagttagatagcgtgatgcctccagctttgttcttttggcttaggattgacttggcgatgcaggctcttttttgttttcatgtgaactttaaagtagttttttccaattctgtgaagaaagtcattggtagcttgatggggatggcattgaatctataaattaccttgggcagtatggccattttcacgatattgattcttcctacccatgagcatagcagtcttattaaaaaacagacaaaactaaactttgttgctaaggtgtgtatattcaagtggctgaaacaataaagaaaagcaaggaacttattactgaaagaatcggataccaagacagtgcttacctgaggcgggagaatggtgtgaacccgggaggcagagcttgcagtgagccgagattgcgccactacactctggcctgggcgacagagcaaagattctgtctcaaaaaaaaaagaaagaaaaaaaaaagaagatagtgcttgcctctaagacaggaaagagaaaggacctggagggcttccaagggtgctggcaatattgtgtgctttgacggggctggtagtgacgtgggcaaaataaatgaatttttaaatttactttcctgttaatgagttatagtaataatttaaaaagttaaaaagataaagtaactatctctttggcctggcttagttcacaccttgtgttcacacctgattttagttctagagatttctgtgattataactggcttttagaagtgaacgactgtgtcactgcatggcaaagtggtctccaaagtgggatatgcaccccagggagcacttgagaagactcatttgggtaggaaaagaaattgattaggacttgcatttacattcattttgttatcatgaaacattatggtaactgatggcaactgtattgacattggcaccatccttgagtccacatatctgggtggttaggtattgcctggggcataggcgaagtctcctgagcaaagaatgggagtgcccagctcaggggcttcctagtggcttccccactgttccatctgtctttgttatattgtgaaatatattgtgcctagttaactggatttacaaattctatattttagttttaacaaaacctcacaaactagcagaatttttaaaagattctggaaagaattctcataagttgaagacaattttaatattgcaagcaaaaaaagaatggcaaagctttgcatgaactttttgtcagccacgttatgagttaatgacagggaccactgaatcaaatctggcaagaagctggccatgaaaattttatgatacctggaaaactaagggatttatattcaccttgtttaatcatgaacttcgtcctgttcgtattgccttgagatattatgattagaaaacattgtattcattctgtcatcctttttccatgttttataaggtatataacatattaatacaataatacatgtatatgaatttaaaaaaaaagacacatacaaaatgtgagtagaaaataacttggatactactgtcatgtatttcaaaggctacttactgctcatagttaaaatgtgtggaaaagtctgcatatcacaggcaggtcatcataccattaaaagaccttaatttttttttctcttgtgaacctattaaagtgtatttgattgtatcacagccatttctaaaacagatgtgtactgctgttcctcacaccaaatgtgtatccgatacataacatttgttctaccaggacttgagtaattactaataatatttcaaggatggaaatgatttaaatgttcatatgtctgaaaaattgatgaataactcccaaaacaattcaaacgattctttcagtattgcccctgacaagttctaaatgttagtatattgtcccctttggatcattcattttaaagctgtgaagagtgttgattccttgtttttcaagcacatgtacatatgaaacaaccaaatttcatattgttcatacttagtgaaattttttttctattaaaagaaaatgtctttcttagagaaagcagatcgctgaagagacagatatggtaataacgatcattagtttacttggccttggttttccacagtgttgagttataatgtaatctatagttcatctttttaactaactctcaatacattatcaacccagtgcctcacactgtttacaaggatgatttattatttgtcagattttaagtgctaacctatgaaatgttaaacttctattggcagccactgcaggaaggtttgtaggtgtcctgactaatgctttgaaagaccagcattagcagtaaatcacagcatacaaaattttttaataaagtaatggaaaggattttacattctgggtcatctaagctttggtatttggaagttagttatgtgcgaaattaaaggggtaaaacattctcaggctttaacccttgaactttgggccagccatagtcaatagcaaaagcatcttggtagctttgttctcctaaccccgagatttcttggctatgagaactgacagagtgccaagtataggcctaattgcattccttgttactgagaaaaaatatctcaaaggaattttccttttctttcaaaggggtacctgggcattttctgggatagcaaaattgtttataagatgtttgcaaaactttctgaaaagagaacttgaagagggctctgacagctagttgaaaggcatgtgtggcttacctagagcagtggagagttcgggagatgcaatttaaaacgtgagagagatgtggctttgtcctctaaaagcttgcttgctccttgatgcacaagctgatggcctctcttctttttctttctctatgttctgctcaaagatttagcaagacattacataagatattcagctagccccataatagactgccagctgtctaggttctgctttgttcaccaatatttcctgtgctgtgtccactgcctaatacataagacatactcaattagtatttgttgaatgaacatatatattcaggtattttcttctatgatctatatattggtgattaatttattgaaccagatatactctgaaacaaattaacttttttgttgttttttgagacggggtctcactctgttgctcaggctggagtgcagtggtccaatcatgactcactgcagcctcagcctcctgggctcacgtgatcctcccacctcagcctccagagtagctgggaatacaggtgtgtgccaccactcctggctaatttttgtattttttatagaaatgggatttcaccatgttgcccaggctggtattgaactcgtgggctcaagcaatccacccacctcggcctcccaaagcattaggattacaggtgtgagccaccgtgcccagccccagattaactctgatcaaggaatcagtagctaattttagtagattgagatcttctaatatatggagtttatattgtagtgggagggccagacaatgaagaaacatgtaatcaagtgaataaacccaatagttcagcaagtgatgagagctgcaaaaaacctgaacaaggcaagtgttgtgatgtagactaagggcttggagaaaccaaagcctggaacaacctgaaagcccagtggtatagaaggaattgatacaacctccccaaaggcttaatttactccaatagttagcatgtacagtgaaaagattcatcttatcacagcttttcttaatgaaaatagttttgctgcatcttaccatactaagaatgtcagttcctactttatagaattttgtttttaacacatcagttggttaacaccagtgccaaggccaaggggttacctctccacttcacttcccttcttctccaagctgcacttctctctcaaagccagacagctgtctcccaaatgtgcactgtcagtcgcataggaaaccagatgaccaaaagagggtggatcagcacaaatttctcatcaaagctgaaagaaagaaagagaaagaacctcaaagccaatgccctgctgactgtgggtcagaagtgttatctttgtatctcaaggacagaaaacttaataaagatttgggtacaaagtacacatcatcctccaggcatgccgaacgatgtcagtcagaaagccgttccttagagtttacaatttcccctttttcctaaattaaaaaatgctaatgtgaactgttgactcgcaacaacacatgttattattgtatatagggcaaagagtaaataagacacttgcctcatgaaataacagttcattttaactcagcaagctggaagtaattttagcttttttttctttttttttatgcttctttatggaagtaggccacaatcatttttattccacgattctttataaccctatagcatgcttcctgtttatgcttttaagacctgtttttaaagacccttaagggatatcctttaatacattccttttgaaaataattattcatctatagtacccccttagaatgtctgagggtttgaaaatatgggaacttcttaatgagatgtgtttaatagtctatgcagagtattgaaatgtttacacctggtttagttaacataaattatatttaattagtcattctggaaaataagtagatattttagaatagattcagtacctaaaacccaccatttgctttttatgtatagtatccatagataaattcaatgcatgtatttataggtttaaaaacatgcttgcaataacataaagtcaattcttagggacttttagaaataatacaaggaacatgtcttgttggggcaagcaaaaaaacatccatgtgggccagaagatcatgtttataattttttacaaagtttaaagtgcaatacaaatgtaattatgttactgctatttttaacgtttgtggcatgaagaacttctgggttgaatgacagtccataattttttgtttaaatgctgaatgttcctgtttagagtgagatttcctttttcacatgcaacctttgtgtcgggggtgccctgagttccttagatggaatcgttcacactgcaattgacttttcagctctttaggtgacacttgtgcctccatgtgatccttcacatgatgctttagctggaagtctcatttatagaaagaaacctcgacccacgtcacatctgcaatctaagagccccactgtggccatctccccagtttctcccatgcactagaaaagggctgagcaatcgctcatccttggtattgggtggcctctgttatggtcctctgaagtatgctgtgctcgcagagtttatctgccctgcactctttactcttgctgctttgatgtcttcttatggctggtatgtgttttgtagttattctggccaccagcagttttttctgcaaatcctgtgtcctgctgggtatgtctgttccttcctgttcccccaacaacacattctcttcacttcagcatctttttttttgtttgccctcaatgctacaagaaaccagaaacaagacagcgtgtcttgataatattcctctgccgattttccactgccttcttccctggatgaaattgctcttttccacagcactctagtgttgccagctgccatctttgttctctgctctttcagagcgctcacatggagggggtgcagcaggaggtggggagggctgtggagaggcacagccctttctgctcagagtggtcctccagagaagtgccacattgtccggatggaggacctgaccatgggaaacagactccctgacagtcaccatgggttacacaaatattacttccatttagcttgacctttcattgtgcttgaaaaaggactgaaaatacttaaatcatgtatagtatttttctggaaacaaaaataaatggggttcttttcagaaggcacacttgaacttttgcccttgctcttcctttttgagccattttatccaattcagtgttttcttttatcatgtattttccttttgtgagaaatagcgaatttctctgctgataaaattatgaatcacagaagcaatgtaactgttaaagataaggatagcgcttgtggccctaaaatacttagttctgggaattcagctttgctaatatttcttaagtgcttactctgtatgtgcacgtatgtgtcactggcagaccgacttcttaattctaaaactgctttaatgcattatcccaaccaattctcacaacagccctgtgaggtgggtagtattatcatttatctgtgttttatggatgtacacatggaggcacagtaaagttaagtgatttcctcaaggtcgcacgattaaccctgggcagggcctggatttgaacctaggcagtgtgacttcagcacctatgttcttaaccactgaactaaactcaataactcaagtgtgtcatagaacctctgagaacctaagtttcctcatctccgaaatgggaatagtaacacttaccttactaaattgtgaggatcaaataaaataattacttgagaggatgcacttaattgtgatgtgctgaagcataaggttgaagtctgggggaaatgttgatatgggattttctgttatgagtcttattggtgaatttgtcctttgctgcttggatatactgctggttcagatgaaaaactgtgtttttttaaggctgttttgaaaccacaggaagacctcaggtttcacaatgaaagggatcctttccaaaatggtggcatttagaagcatttagaggacaggcaaaattaactataatttttttttttttttttagacagagttttgctctgtcgcccaggctggagtgcagtggtgggatctcagctcactgcaacctccgcctcctgggttcaagtaattctcctgcctcagcctcccgagtagctgggactacaggtgcctgccaccacgcccagatattttttttgtatttttagtagagatggggtttcaccatgttagccaggatggtcttgatctcctgaccacgatccgcctacctcagcctcccgaagtgctgggattacaggcgtgagccaccgcgcccggccaactataacatttgtaatatgccaagtaatcatatcattgttttccttttactctaatccccctttaatgtagcacttgacactccctcccttttttctaaatcatgcaaaataagttttctttccagtgtctattcaccatataccatggacttatcactaactatcactcactgtgtaatactggacctgggaccatgtcttgtattgccagcacagggccctgaaacacaagagatattgggcaagggatagaccagtggaagagaggtagaaagcaagtccagagataaagatttagaaaggctgcagactaaaatgactgcttcagaatgtgggacaggagaccagagctgcagaagagtcagctgggtggtattggaggaggacctggaagaggacgctgagaaagacaagcttaacaggagactggttgttctcttgcagctgctttacaggggagtgaagccttcctcctccgtctgatgctgggcctgccttccctgctgtgcagctactctgtgtctgtgggtctagtaccttcatttctcattatgttcacacaagtcaggttgttggggagctgagctcttacagtcccatgggggaagtggagagccaaaggtctcactttttgtgattctttggagattttatgcaccctagaaatttgagtttttcctggtgtcttctgggactggtactgcatacccagggtcaccctgtttgggggcttttccaagcggagtttgtgatcataatgagttatatttttcctcttttctggataagaacaatatccttgccattcagtctccaaatatagcatgtggttatgatagaagaatatccttatgttaggaaagaaattggcagtctcaatgaggcagaaatgtccaatttagaaaacatgtctaaaaggaaaagctgctgtaagtcctttttggaatcaggtggaatataaatgaataaataaaaaaatttcaaataaaatgtgtggtctgacaatacattctactttctctctttaaggtacttgttgattttgcctaaacttcagatgtaatttttttgtcacttcattaaaatttcagactacaaactgatctggcatctaattgggagaataacttggatggagattttctagctgatgcatgtaatcagagcactacaataatattgtcagggactgacccatttagaatgtttttaagaatgttggtaagtgtataagaagagtacttaacacaggggagggagaaaaggcatcaggtcccaaagaaagagccaaaatggaacgtatgtcagtcttggctggaagtatacaaatacggagtatataatataaaatcacctaatcgattaaggtgtctgtagttaacattcatcagaattatggatacaagcacatctatcatacttcaccaacccaagggtgcctgtttagtttctcttcatgtagtactaagctgatcataacacttgataggcaagtaactcaagtaaattgaagtatatgatgccctttctagagggcagtttgtcactatgtttgtttttaatcctttaaaatatatttactgttttatttataggaatttgtgctaaggaaataattaaagatatgtggaaaggttttagccacaaagatgttcattacatcattgtttataatatagtaaacaggaaattgcttcaattacagattagttaaatatattctgtatatgatgtcacagtcatacaataaaatactgttcagccacagtagatgctgttgtagataagtattgataatgaaaagatgtttatgatacattgttaggtaataaaatgttaacaaaagccaagtatgcaatgtgatcatattttgcttaatatatgtatatattcttagaaaatattctggaaatgtatttaagagttttaaaagttgttctctgagtggtaaggtttggggcattcttctattttatctatgtcttttaattttcctactctgaacatatactgctttcataataagcagaaaataatccatagaggttattttttttaaaaaaaatttatttttaaataaaatttattaaaaaaaaatagatttgagggtgcatgtccaggtttgttatataggtaaactcatgtcatgggggtttgttttacagattatgtcatcttccaggtactaagcctagtattcattagttattttttctgatcctctccctccttccaccctccatactcaagtaggccccagtgtctgttgttctcatgtgtccatgacttctcatcatttagctcccacttataagtgagaacacacaacattttgttttctgttcctatgttagtttgctaaggataatggcctccagctccatccacatttacacaaaagacatgattttgttctttttttatggctgcatagtattccatggtgtatatgtaccacattttctttatccagtctatcactgatgggcatttaggttgattccatgtctttgccattgtgaataatgccgcagtgaacatttgtgtgcatgtgtctttatggtagaatgattgatactcctttgagtatatatcctgtaataggatgctgggtcaaatggtagttctgtttttagctctttgaggaattgtcacactgctttccacaatggttgaactaatttacactcccaccaacagtgtatacatgttctttttctctgcaactttgccaggatctgttattttttgactttttaataatagccattctgactgatgtgagatggtatctcattgtggttttgatttgcatttctttaataaccagtgatattgagctttttttcatatgctttttgtgggcatgtatgtctccttttgagaagtgtctgttcatatccttcgcccactttttgatggggctgttttgttcttgtaaatttgtttaagttccatagagatgctggatactagacctttgtcagctgcatagtttgcaaatattttctcccattctttagattgtctgtttgctctgttgattgatggtttcttttgctgtgcagaaactcttaagtttaattagatcctatttgtcagtttttgcttttgttgtgattgcttttggcaacttcatcatgaaatctttgcccatccctaggtccataagaggattgcctaggttgtctttcaggagtttttatagttttgggttttacatctaagtctaatccatcttgagttgatttttatatatggtgtaagaaagtggtccagtttcgatcttctgcatatggctagccagttattccagcaacaaaggttattttaattgagaaaaggaaaatatttagatcaaaccttattaaagtgactgactctggataactgagagactttatatgaggctttttggctgtatttgtttgtaaacatatttcagctgaacatgtgtgctgtgattttgaaaacactgactactctatagtacatttgatttagcagagattattagctttcttcctagactgccctgcaaaatgaaggaactcaatttattaggccagctctggggtttcttcctactcccaaatcccaggtctacactttctaggtttacccagagaaactgctgagtggggattccctgcatttcttctatttactagctcccaagtgatgatcatgtattattaaggactcattgtatcatttgtagtacactcaagctaacctactctgtaatattatccttgatcttttgctcctttgaagaaagaccttcaaaatacctagtttttgtatcaattgttgattactctagtttttaacttttttggagcgcttatggtgagggttacatagctgagagctgctcagtgtttcaggggagcttcagccgtaggtgggaagcagttgaagcaaactgtaacaaagaagtcacttccatcagaaaataaaattcccaccagctgttaaacccctgacaacctctcagcctcttccttttgtgtccaggagacctctgtctgtctacaaaccctggacctggtttagttcagtgaggcaagatgccgtatatttttccttgttaatcacccttggcagatgtcatagtattacaaccactttctcctccctttaaaaatataatttcagaatgacttcacaataaatgtagaggtaaattacagtaacatctggcagactgacttcctaattccatgacttctgagtggttgttagtggaaagagtattatagctccatgagctaggaaacccatattttgatcctggctctgctgtgaacttcttggggaacattagaaagatgacctagtttttttaggtccaagtttttctcctcaggaaagtgaaatagttgaatgtggttgttttcaaccttcctctcagttctgaagttgtgtgactatgatctataaaggtcatttattgttgccttcataactcaagaccaaaggcagagtgtctgttaacactccatttcagtgactcccctgccacttatttctcttggtccaataaactattgtttttttgtttatcttccttttctcataaaacactaagtaatttcagagagaatctcattttggcattctttatatcctctaatgtatgatgtgtcttcgtgactactgaaaaaaattcttaaaagcagctacttccattattctctagtttttaaagctatcccctgagaactaaatgtcaattcaaagattcctgcatttgttatcatttctaccctaacctgtagaagtccaagacataatttgaaactgaaggattcttgcctggagacagtgggctcataaatatgtagcttgatttttctctataagaagaaattaggatttttaacaacactttttcagtatctaagttgaatatgcaaaattgggctgctgtacatgcttgcagatcctgtatttttaattgtagttacattatttttcaattgagtaataattttcaatgaagctactgcaaaataacaggttcttgcctaatgaaagattttacaaaccaaagactcatgtgttttaactctatctctaatttagactctgaaatatgccattcttcctttatatatgtcagatagctgtctgttttctaggccgagcatggaaaacacaacccaagtgggccacagaagaggtcactaatttcctacccagtacccattcttttcctcttccttagtaacacattctgattttattcaaagggataatgtccccagccaaaagactgcatttcctagcctcctttgcagtgaggggtagccaacacagagatcactaggtgggagttccaggaaacctcttcagtgggagttgactgtcctgcgcatgtcttgactctgcatcttctggctcctttctgagctccacctggtcacaggatggtcaagtcagctttaatctcatcatcctcttcatttaagcccagcaagaaaaagtccattttcctaatagcttaaacaaagcccccggtttgcatgtccttgccctcattgcccattttgagctgccttgaacccataactgagacacatagaatacaatgtgccgatggatccatcctggtcatataacaaccccagggctcaggttggaggcagcttcactgggtcccctaaagcaaagtagggctaggagaagtgggggtggatggatactgaatgatcatactacaaatgtccaccccaccaagtatgccagtttcttctctgagttattagtctctgataatctggtaaactgcttggtttgcaaagttacgtgaacaacaatttagtcactagattcatttatagtaaacgaagttgaaggctcaaggctgcaccattaatctggattagctatcaaaatatatatcttctaattttcctgagtaatatcttataataagtcatataacttctctttccattatcaccccatatatggcctgctaaaagggtggaatcaaaagcttgccaagaaattttttcaaatcacagcaattgtattttccagtatggcttgctgatatagcagaggacattgtttctgaacataaagttgtataacaagttacagctaaatgaaatttaaaacgacttgtgataaaccctgaaaaagtggtgctttaaaatagtaatgtcagcaggctgtctattatgtaaccataatactagtgttctgagtttagatggggaagttatagggcagtgacagaaaatgtcgttgtcctgtctttggtatgagagagcatgtaaaagtgattttgaagtgatttactgcagatgcatgttgagacatggtaaacaacgagacagatgattatggccacagttctgaagatgttcagatggacttcaattagctttgggcaaggctgcttcttgcagaagccagtattgattttccagaatgccttctaacttttcagcagaagggccaatcttgtcaattcctttaaagccacgggacacgtcattggagagcagactgtgggaagtcttcctgcagtggccagggactggctatctgagctgaggacagtggggctaggtggaggtgaggcagtgaagtggaatgatggagtgtgagctctacagtcagagaggcctaggtctgacactagtacctccatgtataccagtagatcactaagctctaggagcctcacttccctcctttgtaggataggcacacatgagaatctaatgagaaaaggcctggaaagctcctagctcagtgcttctggcctgtactaagtgttaggaaatgttaactattactccgtttcagagctggcccttgaaagaaagagaaatattattgagtttttcactcttttcccctgagtttcattaagaaaaaaaaaaaaaaaatttgcatgtgaagaagttgaatttgggttggctctattcctttctgactatgcttttactttcttgtgtagaaaaatggagagtcagtattggcatatcctaggtgcttttactatcttaggatcttgtcctgtactttcggtgcaaatttgtttaaaacagcccttttttaaaaagaagaatggtgttattgcatcacatctaagaatggcagccacttgctgagagagcagaaggaccctgagaagtcagcaaagtctcaggcctgtagttggcatcacgttagagaccaccagcattccgtctgtcactttagaccttctggaaagagtgttccaacatctcagaatagcaggaccctagggtcataagcctccagtttacaaatgaggaaaccgagatctagaaaggagaaatgactcacaggctacatcaagagtcaaagacacgtaggccgggcatggtggctcacacctgcaatcccagcactttgggaggctgtggcaggtggatcgtttgaggtcaagaatttgagacaagattgaccaacatggtgaaacctcgtctctactaaaagtacaaaaaaattagccgaatgtgatggcacatgcctgtaatctcagctacttggaagtctgaggcatgagaatcccttgaacccaggaggcagaggtggtagtgagctgagatggcgccactgcactccagcctggacaacagagcaagacttcgtctcagaaaagaaaaagagtcaaagacacaggcaagagtgaaatccaaggttctcaatgcccaggtcaggggaattaatgactataccctgtttatcctctaaccttctccttctggtctcctgttaattgccattctcatccaagcactgaagggcaggaattcattcctttcagcaaattcagtttgttggaagccaccttttactttgtcctcccaccaaagtgtcaacatctaaatgtcttcccactgtggtcactccattacccaggaatgaaattcacatctcctgcctgggggtctaagagtagccactgccccaggctattgaatgggagagagctggaggcctcactgttagtgcccagagagacttcctcctaggcccttgttttcaacctggaccctcagcctgccctccataatgcctggggtctcagcctcttgggttcagttttctagagaggaaaccacatatgtcccacagggttgagagggatggttgcgtggctacggtgagtgaggtgggtctgttccccctctcagccttccaggggttctttggtggccagacggctggcttctctgtattcttatctgtgggcccttaagtctcagtggcctctgctgaatcaagttcctactcttttgtctgctttccttctttctgaatggttgtgtcatgcctcagccatttttgtctcatcttctcatttgttgtccttttgggcttataccttttaaaaattactttctcaccatccaagcaggttttggaagaaaacagatcagcacagtgttaaccacccccaccccatgttaatagccattttaaaaaatatattatttaaatttttctctcaatgcaaatttctaaatttaaattttattttgatttcattttattttttgagatggagtctcactgtgtcacccaggctggagtgcagtggcacgatcgttcactgcagcctctgcctcctaggttcaagcgatattcgtgcctcagcctcccaagtagctgggactacaggtgtgtgccaccacacccagctatgtttttttgtttgtttgtttttttagtagagatggcgtttcaccatgttggccaggctggtcatcggctcctgacctcaagtgatctgcccacttcggcctcccaaagtgctgggattataggcatgagccaccatgcctggcttaaatttaaattttaagtagacctaaaatcctgtggatagtgactgactagggctgagtgtggttaatttttttttgtttcctttggaatgttgaggctcttggcttcagcaatacagagaatgggtgaagcaagtgaggaattaccctccacaaagatcacaccatatgttcagtcactgccaagaaccttctgaaaaacaaatcttctcaggttttgtgttatcaccaaaagttaacctcacagcatggttcacaatcatgtttatgcaagtgttttgaaaatgaaatgcaccactatgaaatcaatgggtggaaagcagtgcgaactctgagggagaagtgcatttgtgtatttcttctgtagctgagcacttgctgggagggagtgccaaacatctcagtgtttgtgtttttagatgcactaaccaacaatagcaagcttttctccaagcatgtaagtaccgggaatacagaggaatgatgtttgctaagtgaataaacttaatgtatgctagaagattttgtgactatagtaatatatttgcagtaaaaacatttgaagttgagatacttttcaaaatcctgagaaattaaaattaaatgaatggcacatattttgttttgccgagaactaaactgtcccattaaaaaaataaatatattaccttgtcagtaacttttctccaacacctgatgtattttggttaatactaaattattcctggtgttctgacacgcataattgttaacaaagggattcatctaatacaatattcagaattgatgactgatttacatagccttaaactgaaggatggggcataaaaatttttttattcactcctcccttcagtagcgaggagttatagattgagatttttttttgatgcaactataaatcaaccttgtaaaaacatagctaacaatgatgtagtctttggtataaggtttccctgttggcttctagaaatatctgagggttttggttataaatcccctgctccttgacacggctctttaagagggtggaagccccctgtgccatttcagttctatcttgtcaatctgtttgagtgttgttcagttaatggttgctttctattgccttttaatggattctaagaatgttgctatatctcttttccagtctgtttggctacctttctggcttgggtagtttcccatttcagtgtacatctcagtttacgtgcttgaagaaagagccagagactgatgggtgtttgtgtcttgccttttgctttttgtaaatgcctgacagtgtagcaatgcctcatggtttacaaccaaaaaaggtagtgctgtatttgtattctgagtttcttttcttgtgtgaacaaaactgacaatttaagggtgatagaaaagggcatatacttaaagaccataaaatgagtttttgcagctctatataaaatacaaaatattttggttttgaggctatataaccagcagtttttatatatatatatatatatatatatatatatatatatatatatatatatatatatatatggtaaacaagctcgattttctctctctcttttaaacattatcccaaataacaggcttaactagttttcacctccactgtattgatcatttgctctgttacgcagacacagcttaggatctcttgtgaatctgctaacctgctgctttttttttccttttttaacccttagctctagaatagctggatttaatggcagggggccttagcctctgttcctgaaggctcttttcctcctgctcccttggagagggaagcattattaatttttccccttcccttttgattataggaaaaatcaggtagacagtaactcagtgccagcacacctgaattcagggttcagctctgcagacaattgctttcttgttccttagcctcatgggctggtgaacagcgaaggtgaaggggtaatgaattcctctaggtgctgataagagctacattccaagaggattaacagcacaaaaacctgcatgtatgagggaaaaaaatgagaaagcaggggaggggaacacccacattgacacacatgcacagccacacagtgaactttctagtgttctcaaagccacattccaattttagctgcccaaagtctgaactactctgacaacagcatctacatgttgtacatggcatgtactttctttaaaaggtttgggaacattcttgctgtggttctgagaaaggatactctggtagcagaatgacatctggcctctatcaaggacttccttgatcaaaacacagaaaaattttcaaaaataccttgattttagacttttcaacctagaggagcaaagaagaggagatgaaaaagtccatgtaatctgttaaccacatctgagaacagttctggaaatggaaatttggctccatttaaactttcctaaaacagcttgatcgctgcgttgaaatttgggatcttgattgtgcaatccaagtggaggtcccttgtatgtgttttgacggatatatttggtgaaacttaaaggcagtatcattcctgtctgctaatcaagggccagaaccaacccacacacatctgcctaactattcctcactgcctgttatgaaaataaacctctcatttttcaaaagaagtcactacccctgaagcagaaaacaagaagagcaaatggatgtggtccctggatatttccaccctcttccaaccctttaccattccctacctccaatagctatgatacccaaaattttcaaactttgaatctaaccaccctttgttttgccacatcccctatttcacaaagaaatctgacttagtttagcttatccctaaaaaaaaaaaattctgaaggtatttgccactcagacccattgtccttgagaaatgaacacataatcaactcttactgaagcaatgacttctacaagtactgtgccgtggtctaaaacagaaatatgcaccactattgtaggaaactacagcttttacattttcttggcagaactctggtcctctctttatagtgagaagagaacattccataaatagcaaagtgggccttcagttaagttgtccaatccatattttgcatggtggtgtccattggaaatataccttcttgatgtcagtgagggcttaatgaagttaaacatttcccaagtaagtttgtttttgagaggaatcacttcaggaaggcatgttggagcaaacttaagcttaactaaccatgaataattatttgcctcggtctgtaattttaacaatgtgaatcattagctcagaccctgtcatttatcccaaagagggaaagatgcatagccaagaccatggaatttagtgaaggctctctgctctgaatagaaaggggtgttgatgttcctcgctctcatacaatgagatgactttaactttaccctgtgatcctagaagtggagccataggtcttggacagtgtagccagccctagtaaagaatcaagttcaggtcgggcgcgatggctcacacctgtaatcccagcactttggaagaccgaggtgggaggactgcttgaggccgagagtttgagaccaatctggtaacatggtgaaatcccgtctctactaaaaatacaaaaattagctgagcatgctggctggcacctgtaatcccagctactcaggaggctgaggcaggagaatcgcttgaacccaggaggtggaggttgcagtgagctgagattgtgccattgcacttcagcctgggcgacagagcaagactccgtctcaaaaaaaaagagaatggagttcagccttttcttcccacttacccacttcattctcgtgcctttcaagccctcaccattgcgagaggctagctgttgccaaggattcttattcctctcctttcttcccatttggagggatagtttgtagaaaatacaaatagcttttaactgtctgtagatgtattttaaaagcgctttttgggatacatcagaaaatatttttcgatttaagagaaaatggccatgagtttgttagttatttgctgtgcctgaacaaaccagattttaacaacaaaggcagtacctttgacatcttgccagggttgtgtttcgtagctatacatgacatttaggaaatgtcaaccgtgaatgacttttttttttaattgtagtaaagtatggttggatatacgtacaatccctgacttacaagaacttgacaaacaggtttcccgtagacataaaaggccgcccttcctctatctctcccttttcagacatctcttttgtttcccctctttgcccttcacccgcctgctgtctgtccccctcaatgccagagccactgtggcactgctgtggagaccgcctgtggaaaaacttggcccttctggaaaaatcgtggtttctggaatggaaggagaagctgtgcaaaagacacagttagggggtctcaccccagacatagcctctgggctggacctggtgggctcctcagtattttctctaatgtggtgtgattctttctaccttcatttactttgattcatttggatttacaagtatcctttttaaaaatctggatgtctgtgagacagataaggaggacaagccccattcattgtcatgttgctgtgaattgggtcaagctatagcaaccacacacacaaacacacaaatctcatatgcatttagtgatttctgtttcactctttacaaaaggtttccacacacgattgttcttcacagctgctttacagatggtgagactgggagtcagagaacttgatacatttgagttgcggaaagcaggactagaagttctgaattgagttctccttccattccgtattccactgtgtatacaaatatgtttatgcagacacatacatctatgtctttttaaacagtgaagcaaacacatttgcaggtaattagaagacagaatataattcagacaatttcagactgtctctgacttcagtattatgctattttataagatccttacacctggaaggtgaaaattagatgactgagtcttatttcataaggaaataaagaaggttgtttccttatttccaagtctttagagattaagattatcgtgtgtacctgtaaaacacacttaaaacctgaatgttaagattttacaacttgactgagaaatatctatgtaatggttgactaaataattaacggaattcatgaattatattcctgtttacaagtcaaagcccaacactaatagtacatttacacctgtggttttgaatttcttatttgaattacaagtcagtccacggtaaatgggtattatgtgtatctatctataaagtgtattggaatttcagaccagaaagtcaggctcattattcatatgaaaacctttctgatcaaggcctaaataacacagttctgaaactgaaaatgataaacatgcataaaagcacattatacaggtctgtttatagtaataataatgatggcactaaacagatttgtctcactggcaatgaacatacaatggggacatcataagagatgaactagtgccattttctgagacagaaaattctcacattttacataaagccagaagtaaaaaaatggttccaagaaaaaaacatgtgttaagaattataagtgtttagcttagaaggagggaaaaaaatgggttatcacaaacattgcttttttttctcccaaaatatagaaacattttccattctctgactacatgatgtcatgctctggatcaaagacatagtggaggaaatggaattatgcaaatgagcaatataacttatcaactagattcaataggaaataaaaatctgaggatggcttggtaaatgactaataacgctttagggatcatggatgtcagcctattttgtataacagaatactctagattgtgtagtttgtgaacagaagtttatttggctcatggttctggaggctaggaagtatggcattggtgtctggtgaagggagggcctttgtgctgccttcatctcatggctggcaagagagcaagagggggctcaccttgcttttacaacaaagccactctccagataactaacccactcctgcaataaggacattaatcatttatgagggcagagccatcatgacctaatcactccccccagcactgctgcattggggattaagtttccaacacatgaactttaagggatacattcaaaccatagcaatggaattgttactttcaaggatctagataaactgtgtttattaaaattgtgtgaagttgttactgaatattttcttgagaactataatgtcatcatccaacattcttcacagatgttgaattctgttcattccacctctgtttggggccagatttttttggacatgtgttttcccttctaaactgcttctgtaggatcggttactacattcctgaaagtcctttcattgtcagtgtctgtagaattatgctttaggctctgctggagcccttagcattgctggctaagtgaggccactgagaaataatgccaagcccatagtgtcattaaaagccttcctcccttacattggcagaagtttggaggctctaactttcagctcagcctgtcactttctttggagacaggtaggtggttacaaagaccattgatttctgccttttgaaaaatgtagagagggggaaaagtaactatacaacttatctgattttttaaaaatcagatgcctcttttcttagattatggttttgaaaagccaacccagaccaaattactttttccatactccagcacaacttggctaaattttaaagcacaggttgttttttatgtaacaagaatagggaaactttactcccatttcacatgaaatgacaagtacattgacttggtttagatcaatctgcattcaagtagactatcataatgtttctcatgaagtagcactgggttttaaagtcttcgtagttaatttttgagcatcagtatatgtacgcgagcaatacatgtctcaaagtgcattggagacgtgatctttgagagatatcaaagatgtcatcaaatcatcagtttgaatttataactgaaggcacccaagcacacatagcctgggagagacttgcttaaccactgagacaaggaaactggcctgatgttaagcagctactgttctgtcacttgccaaacattcctgttacagagtcatgttctgaaattttcgtgaaccaactagacgaacaaactgtgtggtctggataaaataatatctgcctaaaaggaaagaagtgaagttagccagaaagccagatggcagattattttctgcataactctatttggaaagtgagctttatgtaatttttggtcatttcttaccatcttaggagaccattttcagaataagccattgagggatctagcacacaggtttcaaaagatgaactgtacaaatgcaggcacatcatataacctgttcacagaattagcactagttgatgaaaatgcttggacttctttttcttccagcattttcatgacctacaccgctattccatgtcttttagtattcatttggctaaattatcttagagctaaattctatggctagaaatacagtggagttcacatacaggaaaaacctggctgcaaaggtacgtgaatttaatattggtcttcatcttgtggttgaccagattgctctgctcactcacatgcagaaaatcaggagttattcactacatacacacaaaggtgatatttccttttttttttttaaggcagagtgccatttctaaattgcatcttcaagcaaatgtagtaatatcttgggctcttgaaaatttggtccatcttccatgtttaagagttttttagctggatgcagtgggccatacctgtaatcccagcactttgggaggtcaaggcaggaggatcacttgaggccaggagtttgagaccaggcaacatagtgagatcccatctctatctaaaaacaaaatttaaaattagccaggcgtggcagtgcacacctgtggtcctagctactcgagaggctgaaggggaggatcccttgagcccaggagttcaaagttgcagtgagccatgattataccactgcactccagcctggacaacatgacagagtgagaccctgactcttaaaaaaaaaaatacacacacacacaaattttctttgaggttagaggctgagccccaagcttttaaataggagtaaggaaatatcaactcacactgttgttacttactctagcaaatcaggataaaaaacttcaagaaatcaattagggttgtttagtttttaaatggtggaatcatttctaggagtatttggtttcttctctttcttcctccatattttactgaggcttgatcatattctttctaattgatgttcagtttcatactttcttcattattaccacctttatcactctaatcaaactctgatagtctcactacagactcttctgagctgctctaaccaaatccagttttttttccatccagcttgcaccctaacctcagaataatcttcacaaaacatagatatcatgatgatgtttgtatctttaaaatgttgaatggttccatatttcattctacagcaaatcaaatccagatttctctacctttatttcattgttcaaggtaacctgccactttgactcttctctgtcttccaatgactaacattatttcctgttactctgcaatatattggcgctcaagtcagtgtgatgaaagccaacttctatcccatttgtgtgataagcctgttcttggaataaagtattcccagagaagtcttatttggcatgcacctcccattttccttctagctctgtaaatcctggccattcagcaactgttagctcagtcctcacctccttccagttcatttcaacacatatacactgagcatcttctgcaaatggaaagtcatcttacagcatgtggcaaggagtgcacggctgtgaaccagggcccttccagtccagctgagtctgtctggactactccagacttctaagtccttctcttctgaacttctacagtactgaaattctagaccagtgggctccaaagtggagtgctcaaaataatcctttgggggtgtaagaatatattggagcttatattaacatctttttccatatcttttcaaatttctattttagaatatttctataaagtatgtgatatattaatacagaagcacatgtttaacctttataaataaataacatatatggtccatgtgcaagcactacaactatggggtgagtgataaaaaatacatagagcctcaagttcagaacaatttcactggggttttagaaggtcagctaactggtccacccaagtccatttattctcttcttcaaaaattgtttactagtttcctacagtgtgccaggtaatgttgagagagagggcagtcaggcaagaggagagtaaaatgtcagctttctttctgataaaagctcactggaaaatgtgtctttagatcagggccagcatggtttgccaatacttcgcccctgcagtaaggagacccagttacaggcagagtgggacattacatccccttctctacctctgtcctccccaaccaggggcagggcctgcacccaaagcttattgcatggccaagagcaggtggaaagttaccctctttgccggcaggcagaaggatcctatcggagtggggagaggaaggggggttaccctgtttattctttcaaatgaacctaggagataagccgctcctccttgggggaggggaagcaggtggcaggtggtcagcagtgtcctcacaatatgggatttcctctaaataaataagctactgttattttggctttcatcacctcgtaataagctcttgtgttgtttcaaatgtatctacctgaaaaggagcactctttctttttttaccaaaaagactagcatggcacatgacccattgaggggatgagtagaattgtgtgcttgaagatggatctgtactgaggcctgaggcttgatgccattgtacgaccccccgcccccaccagagttcatcatctggtttcccaatggtaggatagaacagaacagagcagaacagggctgtgtgtgtgtgtgtgtgtgtgtgtgtgtgactgtgtatgtgtgtctgtgaattgcttctggatccattgtgaaactccctttctagctccaccccactattccccaccccacccccccacacacacacatccctacacagatacacacacctacatacacatacacactgttcctaccattaaattttgcaatctgtggcacattatagaatggacataggtgaaagcatgtggtcatgagaaataaagcaaagagaaacaaagtttattgcttctcatgtaagcacaaaccaacttaatgtcatgagagaaagagagagaagaaaaaggagaaagaagggaaattgactggggggagaaggaaagattggaagccctggtccctggatgagggaccttgttgagataatctccatcctcactccctccttcttgccctcgtagggcagaattctaatatgacattctagaaaattaaaatctatccaattaaaaaaatatctgcagggaaagagatttcaaaacctccctcagtaactaaaatgattaactgcacgctaagagaatacatttctccaaatcgttaaggctttcttgctgcagtttaaaatggtcttctttccattgtagaaggctcagttcattgccatcctttgtctgaaacagggatattaagttgaccgctagatttacaactgaataagccagtcctttgccatcatgcacctgtttgtatgcatgcacttttctacatcctcttcagtttttcacataccactttagttgtgggaacaaaataaaaggattatttactggtttctgtgtgcttctatgtatttatccccagtattcagcttaaaagaaaaactataatgttaattcaaaatcagttttttacctgtccattatgatttgttcagggtattaggacatttatacataagtcttttaggatattgaaaccttcttaacccaaaggtgtgaatgcagggccagatgtggtggctcatgcctgtaatcccagcacttcgggaggccaaggcaggaagatcttcgagcccgggagttcaagaccagcctgggcaacacaaccagaccctgtttctacaaaaaataaaaaaataaaaaaatagctaggcatggtggcacatgcctgtaatcccagctactcaggagatggaggcaagaggattgcttgatcctgggaagttgaggctgcaagtgagctgtgatggagccactgcactgtagcctggacaacagagacagaccttgtcttgaaaaaaaagagttgtgaatgctagagtgcaggaaatttctggattaaatattagttttgttaccaatttggctgctgagataaagacaacactggcttagaaacacaaaagtctgtttctccctcatgtcacagtctaggcatacaggctgatgagggagctgcacagtcttctggcaggttgtcctgtcatccttacattgtggcttccatttcaaattcttgtcacacttcagctggcaagaaggggacaaaagaaagtgggaagcacaccctttccttttaaaggtacaactcagaagttttgcatattacttccattcacattccattggccaggacttacctatgtgaagatacttaattgcaagggaggatggaaattatgacctttagatgggcgattgtgcacccaggtagaaggaagtaatggattttggggacaacagtttgctttgcctgtggctttgtagcgccagcctagcagcatgttttgacccggagttcagctaggggactagtaagcaaagtaaaaaaatatctaaggatataaagaaggagaaaatctcgctctgcagtagaaggttggtgttgcagctttgtggctctcaggcctccatttcaatgatgagatacacctatcctcctgctggaaaataatttgaagcctaacccccaggaatatattttgctactgtacaattgaattaaaataaattttctaggtacaattttcaggccagataggttcagtataaaaccaagatcgcatgcatgatcactgtgattttaggccacggaagccgtactgccattgcccctcgatccagatccttctattagtctcagttattgctacacgtctctgaaaggggcagtaatgtatgtttgatgcctataatgataaaaattaaacttttaaaatgctaatgaatgaaaatttaaagttttttttttaattatactactactaccacctcgttataaaatctgcattacttcagcaatatcctcgctaggaaaaaaatcataaaaagacagtttgcttattatagtgcagtgctatacatactctatcggggacttgtgtgtcttatttgtttacttgactagccaagcactttttcatgttagtgtccatattcgtcttcttcagctgtagccctggttttcctctcaacctgacaagaccaacctggattttgacagtcacactgatttttatctctttaaacagctagaagcaaaatcagattttgtttctggcttttgttattgagaaaagtaataaaaaccatggcagaattagatcaaggacattcattattttaactaggaacaagaaataaatacatagctcttcccaagaattggattaatgtaagtgtacagaagatattaaaaatgacattgaaaatatgtttcatagctggtcatttgtttgatatacaaatgttagcatttctactgtctgttgtagagatgacataataatgaaaagtctcatttcattggctgagtgctttagtgtgtaccttttctgcattaatttctgtggtcaaagcttaaagccttggatcagtctccacctgcatggctggcacataccagaggaaggaaaactgggaggttgtggtggaagatcaacaacaggcactcacttcagtgttagtattcctgtttgaataggtcatgaattctcaacaggggcaacattgcccccaagggtatgaaaattgattcttggagagtgaaaaaaaacagatattatggctgagctcagagtcagagggagatgttactgtggaataatggtcagagagatgggacgctgcaggctttgaagatgggggaaggagacataagctaaagaaggtgggtggcctctagaatctagaaagggcaaggaaacagatccttctctagagcttccaaaaaggatccttgtcagacttctgacttacaaaactgtaaggtaatgaatttttattattttaagccactaaatgtgtgctaatgtgttacagcagcactaggaaacacagtgtttcctctcctgttcggtaagaagaatagaatgagctgtgtcaccggtttgttgtaattgctaaataaaatgatttgtgagaagtacttagcatagggaacatagtgatgtatctccgccttgccagcgttcagacgggcaagatttcccactgagtgccctgttcccgtgtttaggttgccgatggacttctttcttaatgtcagtggcaactgtcaagtcttatagtggcccagtcactttaaggggactttgaagtctctcctagggttcatcatttattgattttatatatcaactctcagaagatgtttttatttcacttgttgccaagttttgggaaatttattctagtgccatccagataccacccactcataggtccttccccaaagcaattctccctgtattttctttctcctttctgcctggactgcaggaatgtctgaaggcttgttggggtctgtagagaggtaggggagggaagttcctagcagggagcagagaaggaccagttgccagtcatcccggtgagtgcagggcagtcccaggtgggttgggcattctagagtgaggcattccagttcagggatgactgggctggaagaataaactccgtgtattgttttcttatttttgctttgttttgttttgttttgttttattgattaagaaagtctctctaaagaggagaatcttcgcaatctgacattcattgatgtccttcaggtcagttaagtcagttgggtagatcctggtgtaagtgaataaagtgaaagccacaggttttcctctgtctttgctgggtcagtcagattcccagggaacagcttttgcattatcacaggacaagaaaccaacagaattgtattcctactacccaagtgctaatattttgtgggtttacttatgttatcttttaatgctcacaaaatcactgcgaaatacatattattacttccattttctgctgaggaaggggagcatcatcacaacatcactatgaaatagataaatagatggcattatgcctgtttacagccaaagatcatggggctcaaggaggatgacagctgtaccggcttggctgggacagcaatatgaccactgtggggctgctgctggctggttgcctacacaggacttctcagttgaggccatgtttcaaagcctggttttcagtcttcaaagtctatacatgggactctgtctgtgaactcagagatgatcagactctaccgtgatatactcaggctaacaaagttttaatatggataatggattagccagaaacattatggccttattcttagggtatttatttttttctaaggatcatgttcttcctttttctttcttcttcactgtgtccccattcacctagctacttcagggcccagcttaaacctgacatccacctggaagctttccttgaccctcctaatttttgttgtttgccctcatctcacccccaactcaaagtggtctaataaaactttgtgcttcccctagaatggcttgtattgtattgttttctgctcacttgtctggtcaccctcactaaaatcaaagttcctcgaggccagggattgtatttcatgtactgttcttttagctaggactcagcacaagcctatatacataggagatgctcaataaaattttcttgaatgagtaagaatggtagacctgtgtttaagtcctgaccctgccactttctactagtgtgactttcatcaagttccttctgtccatacagcctcagtttcctcatttataaaaagagaaattttgttgagatgctaaggagttcttttcaaacatgaacatattgggattctaatgcaactcattagctgtcccagcaccataaatcaacaatcatatcttgcaaagtacaagttaggtggattgcctagactacttgaacatggattaattatttcaccccatccacttacatacattaacagtcaacagattcatacctgttttgtgctgatatttctgtccttgatcccaagggtttacttatcatagaatatcctcttcatttggactgactggcacactcaaaaggaggcttttgagcctgagaaaataacaaattctgcttatgtttgctttcttattcttgtatccatctgttttttacctagggagagttaatgaaatcttttgttatactaagaatttcaagtgaatataattaaataaactatcgtataaaaacagcagtatcaaataagaaaaaagtctgcaaatattgatgattattcatggacttgagttggtaataggcataataccatgactgtgtgaaatatttgatatgaaaataaaaggaaaatgcaaactaacatcccagcaaaaatgtgcagtattaattgtaaataattgcaatagctcacatgtgatgtctgcttagctaactcctaactaatggaggaatccatgtcacactgcaagattgtattggaggcttacagattttcaagatgttgccttctacattcctaaagcttattaccatagaaatcaaaatcttaccatatctcaggtacttcttgctagtaaattaaacacatttagatgctttattaatatatagtatgtaataaaccaaagtagtaatttactaagagtttctataggtgcaattaatttttccaaaatttgctcaacatttgctggtgactgtcactaatcgaagactcaaaaatagactaaacacttttcagaaattacttcttaaccttactgcaaagtcgtaatattattgaaaagatatacctgagaggataaaacatcagtattctaagtaaactcactacaaataaattttagtctgtatttcgttaaacattttcttgccctgtacagaatttcttttatctttgggcaaaaactgtgtttagcttagcttataggctaattaacattaagttgggtttttttcccccactctctctttcttcattactttcatgccttcttgcttattttgcaatcatgatgatctctgacctgcttactcagcaaagcccacttccaggtcagggccatgacctcgtgtggacagaacacagtcttctagcaacacaccaggaaacagcaaagacaaatggatttgttgtttctgtgaacacaagttattctgtactcaaatcgtagtcagtgaaaatgatctgatgactcaaaatcttggtacagaagcctagatgaaaatctatacttttcaagaaaataagagtatgtctttatttcatatggaaaataaattatgtggtttgtttgcgtgcagcgtttgcatttgatcatagattacctaaattactttctaaaaagtagattgaaaaagttaagaaaggaatgcccatatttacatatcccagtattgaaagtgaattccaatttttatgctacatatggagtaaatgaatgtgtgaatgaaagttcagatcctaaaagttattgatcatgttgatgatcaactgaatcacattgtaaatttagctgcattctttaaaaatgttacttattttcagattcagataaatggttcctaactggtaagtgataagagttgtagtttataaacaatgtagtattttgtctcatggttctgatttttaaattactatacttaatttggtattcaaaacagcgttataagaaagtaagaaagttttcattataaaaaggttgagaaacctggttttaactaatctgccctaagaaaagaagttgatgaatggcaggatttgtaacagagcagaaacagaagggaaatgagctttttcactgtaatagttcagtgggttgtttccgtggagcaggaatcccgaacttctcagggaggcagaggtgtgagaatccaaaaacccaaaagaagatgcatacttggtgaagttaaaaggaagaagaaaaaaattcagtgtccaggagagttcctcacatgtggtggacaatacatagtttagttgactcaatgaacttagaccattcagtcatattgggcattggtataatttagttctgctataatgtacaaaaatgacacagaggtagtaagagtgatgagagacttaagctctttcggcatctgcttgaagtcttattcatgtttaaatgaaaatggggtctcagatactaatttgcctcactgccattttctctctagagaagtaaagtaaatgaaggaaactgctattttggacctaattttaaccaagaaaagattggttggtaaaatagaagtagaaggaatctttatcaatttatttgataaatacatgttgagtgtctgctgtgggccagcacttgggggattgtgaccacaatgtttaagcttttgtgctaactaaggagcagatggtggatatagcagacatgtattacagacttcagggggaaatcccaaatatttcagagaagaagaagatatagttctatagccggagactctgaaagagaagatgactgaagagatgagaagcccatctctacattcaaattagggctctttctaggtactcctaaagctcctcaaacagtcttggcacatagctgatacccagtaagttttacatatacatatataaaatatatgtgtatatgtataaaatgaaagaatcaacaatgaaatcttgataatataatcatgattatgtttccaaattaccaaagataatgtacacattctgtcttacacatacacatgtactccaagtctaacagtccataactgtttgaatgattagaattagagatttgatagttctaaaaaaaaaaaaaaagaagagagttatggctgcaaagggcatgttcaaattaactcataaaagaacattcatttattttatttatttatttattttttgagacagagactcgctttgtcacccaggctggagtgcagtggtgcgatctcagcccactgcagcctctgcctcccagattcaggcaattctcctgcctcagcctcctggatagctaggattacaggtttgcaccaccatgcccgacaaatttttgtatttttagtagaaacagggtttcatcatgttggccaagctggtcttgaactcctgaccttaagtgatccgcccaccttggcctcccaaagtgctgggattacgggcatgagccaccgtgaggcaggggccataaaagaccatttaaaaagaatgcagggagaggccaataaccaagaacaaatatcaaagagagagacagaatcccatcagaaaagtgtcaggaagcctggaatccagggtgagctggatagtaagtataataatacttaataagtattaagtactggataataagtataaattaagtataatatataaaaaaatcctaaaaacaaccaaagacataaaaagctggtaagaaacaatcctacagaaaataatggtgacagaataatccagatatggaagactggaatcctagtgatgtcgagttttgtgcattttttaataatgatgtagttatttctgtcaagactgcgatattatttttatcttttttattatacagatttgttttagtttcgtaaagaaaaaaaataagaaagagacaagatctctgatgagagaaaaacaaagtactattgctcccttcttattcttgccttttaatcaaggatactgatttctcacctgtaagggtaaaacaaaatgtgagtaagaaggaactgaggtccccagcagtgtagtgctaggcccttagtgcctcgtcatggactggggccacctggccgggattgcatcacatgccttgctcacctgtgactgttgctgcagtcagtcatctgtgagaatggcaaagaatggagaaagcccccagaagcttggtgattgacaaaaagagaaaacataaaagctcagcaaaattctggaatttattctgaaaacagaaaacactcagaaaagcaagtgataatcattaggctccaagaagtcaagcaggactaagtgattttcctgttcaatagaataaatggaatgcaaagtgaagagaatgtaatagatatggtgtatatgaatttcatcaacgcagttttcacaatatctcggggtttcattatggatttaatggagaaataagaactgaataacagaatagtttcaatggattcacaactaggtttgcataacaaacccagagagtgccaaagaatgggtcagtgtaattgcggagggtaaccagtatagactctgttctattccagatctctctttatcagtgacatgaatggtgatgattttgatgaaacaatagaaataactgacatttattgaactcttatgtgtcaaaaactgttctattattctatatatattagtttatttaatcttcacaattctgtgtagttgatattgataaccttttatctccactttatgaatgagtaaactgcaacacagagagtttaatttcctcaaggtcacacagttcctaagtggcagagctgagattcaagcccagactgtgtacttaatggcataagtgacataaatgatatccttcaatttgtgaatgaccaaagtgaaatggacagctaaagtggaaagttacagatttgctacccgaaagaaccttaataggcttgagaaatcagccagattagtacgacaaaattaatttgagccaaatgtaaacacatgcacttaaggttcaaaaagaaaaatcaactgccaaagtaaagattggggaaatgggactcaggtcatatgaggaaatcttgggggttttaattgattgtcggctcattatgatcagtgtataccgtgatgtgattatcaagaaaatgcaatcttaggctgcatttaaaaatgaataaaaccactgagtatatacatgtatatatgtatctcagggtgggaagaataaagttctcaagttctgacaagacaaaatgtcttatccacaaattaatttaggaatgtattatataaagttctttccaactctgacatcctttgattctatgaacaagtctgtactaggatagaggaaagcatacgtaagatgaatctgagaattttggaagagtgaccaggtttaaggagtgtctgaaggcagagctagcacattcatggaaggcagttgcctccgtcttagctaagggtttagtcacaagtagacttgtacagaaaaagctcttttaggatgcatggatccccattgtagaatatgtttgagcaaggtctggatggctatttaatgaggatattgactgcgggattaacttacagctcaggagtatgtatctcagggtgagaagactccagactatgtcaaatgaggaataagtgcactctcaagaataaagttctcaagatctgccaagacaaaatgtcttatctacaaattaatttgggaatggataaattcccttatacatagagtcccaggactccagaagagtaaacagttactggatgttgagttcagtgttgaagcttcaccaacttgcagattgtgggtacattaggaccaggagatgcttctcatgaaggttgggttgagttacaaaccaacccaaacatgcaaaatctgttagaagatatttgtgtcatcgaacagcttctttagattttgctttgaacggtaagtcataccgtgttttctaacaaagccgtagatttgaggcatttctggccctgcctgcaggaagaaaggctctttccatcaccatctcagactcccaggcataaaaacccaaaggaaataattgacttctgagagtgtgccttgtaggtatcagctggacttgacttggcttcaatttttgcttcaagctttcagacaacacatgactaagacagaatgagaccactctagttgcctcatgggaaactcgggaaaagactgcaaaaacaacattgtttctccctttggaattctggagttataaggcagaggtcccccatcttcccgaactgtaagtgaattccctctccattatcctcattcaatggccagccagcttctgcttgaacagattctgtgacaggagtctcactacctcccaggacagcttcacctgccctttaatgacaccaaatgtaacaggaataaagggaaaggaacataaggagatagtaagttaaggaatggataagaaagaatgtggcccaggaaagggtattccatggtggtttgtcctcactgggaagtggggagcaaaatttaacgcactgagaaaatgttgttcctcccattgataattttccttccccctttggcatttttgccaagccagctttacatctacgattctaatttttgtgaatactaagatgttgcaactggaatgaaccctctaaataatttttaagctacatattcccttaatttgtattgaaccaaaacaatggcaccagactagtggaatgaggaccagcttcggagttagtttgagaggtttcagtcccagccttgctgttgactagctctgggacctgggccttaacatataagccttagttccctcatctctaaaatggagataataatacctacatgcagatacattgtgaggtctcagtgaaatagaatcatccagtgtggtgcctaaagagggttttgtttggtttgttcactgctgtatccccagcacctaggatggtacctggcacagagcaggtgcccactaagtgctaaaatgaatactgaatgaatgaatgactgtggtcagtaaatgatagctattgctaaaggcatggcagagctgtcagacacaagaagtgtttgtaaagcaagaggctgattattcagaggcttgaaggataatgctttgtcataagctaaattaatttttccccaccatacagcatggctttaggattcttcaaaaactaactacgttggtctgatggtagtgggttaccagaacttattaacattagtgtcactaaagttggcatataatccccctgtgctaaatttgactgccttaacaaaaaaaaaaaaaaaaaaaaaagaacaaaactgactaatactgtgaccattagagtctttcctccatccttaccctatgttctgtatgaaacatctagaggggtcgcattctgtctagtcaagtatcattcgaaagcttggaacaaaaaatgaaaccaagacttaaagactggctggtagccattcagaaatagatacaaatgtagattaagttttgaagacatttttcttttctaatacctcctcgcatttttaagagaagcatttagtaaaacaaacaagagtgtcttttcagtgtctggttatctctttttccagactgagtttggtaaattatgtaatatttggtgttagtcatctcacaggatgtaaaatcaggtaaaaataaaaccaaaaggaatcttaaatataatttatgagttactttcctagaggtaagtgtaactcgcctatataattttatttttttggagtcctttaatatttgttagattaaagcatatatttttacaaaactgaaagtactgaaagtcagcttgcaccaatttgaagttattttaaaagatcctgttttcaattcagtatttcaagaataatagagaaaatgcataaggtctagattcagaaccatgtaaccaaaaatgacagtggggtgggagggagaattgggctgggataggatgagaaggaactttcccatttactaaaagaaaaatgaaacaaggatattacctctagctgcattacgaacagaacaaatgtaaaccacaccatatagacaccttctcaaatactgccttctgatgtcatctcattgcttactgcctgctaatcttatctccctgcaggagccaatcttaaatttatactgcatcataattaactaaatacattgcatctagcagagacaaatcgtggcctcccagtaaatatttattaactgacttttgtgtgctaagcaggtaggttttatttctggctttacacattagtcactgtttctgcaagcgaagtttcactttcgctcttcctcatacctgcagtgccattccgatcattgccagtattgcctcaaagtagtgcaaaagagcactccctctctgaagccctctttgattaagctcacctaaactaaagccatctcatccctccagaagccactttatgtacatggttgtagtcatttcagaatgatttgttgaccattttgttacattcttatttctcttggttttgatccccctgtgcatggcaatatacacccccaccaagaataggcattgggtctcagttgtcacagggacacacacacacaggcaccctctacatgtagtgtctggcccaggaggagcacactcaaaggacatgttccacagttagataatgaaattgttagcattagtaagataaaacagacattcctaattatttgtctctacgaatcggccaagaatgggtataaatggaaccaaagctgtgagagatggacctatttcaccaaacaagtaatcaaaacctaatatatttacacctcaaaattggtgttaggtagattgaataactatgaaagtcttccaaagggaaataatatatggtattatatttagctgagaggcctgtgcattatttgagccactgtactaaaaaagttttgtttcattcaatctttagaaaaatgatttggaagagattaaactatgtattgctaatgcttgtacaccattggaagcatctggtactttctgaacttcccccagtgtgagttgagccatagggcaggctagagctccgtgcaaagtagagaggatgtgtgtctgcactccatccttttatgctacaaactaagagtgtggccaaggcaggccatgaggtggtttatgaagcgtccgtaaagtgcatgtaggtgccaacagcaatgaaaatccctctctgtgctggagttacgtgggtatataggagtgaggctaatggttaaatgtgtttagcattgggtgaaaatgaatttttttttcatactccatagaaaaggttaacttcagtctttcttttttggacaaaagtgtaggctttgatcgagaggaactagagagctatagtctagtgactttatcctgggtataaggctctacagtaagaagaaataaaatcagtaaaagatggtaggcaagttaccaggttaaagaggggatacatgaggcccaataaggatgatatagaaggtttgggtgcttatgattagaccttgactctgataatggctaaaagatattgcaaggttggaggtatgctgggaggaagagcagagtggattggaaggtgtgtgaaatgatgtggctagaacaatattggacaatgctgggttttctgttttttgagatagggtcttactctgtcatccaggctggagtgccagtggcatgatcacagctcactgcagcctccacctcccgggctcaagtgatcctcccacttcagcttccctagtagctgggactacaggcacatgcaaccacacctggctaattttagtacttttagtagagacagggtttcaccgtgttgcccaggctgctctcgaactcctggactcgaaggatcctcccacctcagcctcccaaagtgctgggattacaggcatgagtgactgtgcccagcctgacagtgctggttttaaaagggtggcatttaaagtgataacttagtatgaggggttaaaaactggagaaaaaattattaaaaattcattgcaagcaagacaggaagaataaaatgagaggacatttattcctttctttccatgtgtcttcattgaacacttagcttgtcaaaggcattgtatttggaactttggaagagagaaaggcaaagtggaatttatcagaagcagtctttttaaaaggaaggaattctttttgtaacgtattaaatctgttaaagtcatgtatatttgaagcactttaaaactatttattaatttcccattacagcatatttcaggtgacaaatttctattttgtattacagctggaaatggaaagttcactaagatagtaaatatgaccccctagaatcctgagcatataataaatgatcaaaatgagtttttattatctgtgactgcattagaataaactaaagggaattaaaatcatatgaattctttcttttattcatgttgatacaattacctgaaatcatgtatggaaagaggtttagtaatttttagattgttcccttattagctccaaggctttatttgaactttgctctttctatgttatgactgtttgttgtcctttgaagacaagtaccttaagctgtgaatttggtcacgaaagcactgagcacatctgatagctacaaggcaggaaatcgtgacctgacattggtttccgatccattctatgcagaagtggtattgtagtaatggatttgcttctgccagtgcagctgttttaaaagcatggaacacaaatgaccctgtggacacagacagagccctgagagttcgtatttccttagcagggctgcagtcaggcccctagcttcgggccgccaccctctcctctctggagtcaccccacctctcccatcaggtgacagtatgagttggaaaagggacgggtgtagccacaccaggacaacttgtggtcagaaggtcaggtttcaagggccggctccgttactggctggatgcatgttggtaacctcataatccttagattctcacctgtaaaatgaggacagtgggaaagctaccacatgagctatgagagcatctatttatattcttttatagcacttttatagcacttgctgtgtgccaggcactgttgtaatcactttacaaacatgaactcatttcatccttcttaccacgctatgccgtagttactattattatccctattttactgatgaggaaacacggcctagatcaaagtacttgcccaaatcccaaaactagtaagaggtagagctgggattcaatcttggtgaatcgtaattgcttgttttcggtcataagaacataaggaagaatctgtattgcagaaaataggcagtgtttactctgcgagattacttaagggcccaagatcctgtgcttggtgacagaggcacagggctggtggtagcagctttctaggccaactgcttgtgtgtggtcagctagatgggctctgatggtggggcctgatctgagagggaagtgagcctttctaagaacatgtagaatgtatgtgttagatttctaaaactcaaaccagtgaacaggtaacatatataggactaatgtgtgtgtagatggagcaggtctgacaggtaagaaaaccctctccactctgccccaaatgtactctatcacatgcttctcaccctggctttttgccgttaaactgaataaagatcaggcaagaacttcacttccttgtgtgagcacatgccccttaataaaatgtatacccctagacatggtttttacattttccatttaatgcaaaattagctaacagatgttttcaattaggtgtagaaccaggaactggtttcagggtgcagtgtaagaatgtgtactaattgattgatatgcctgtcctggtgtcgcctggaagataagaagcccttagcagacaatcatgcccagaaactgacctttggaatgatgactacagtcccagcctataccttctcagcctcaggggcagtgagtgtaaaggttgcaagttcagtcttagagctataccttccctaagataagaaggatgaagagctggcattcactaacaggaccctgaaggcaaaaacactgggcagtttcacaaaaagggaacaagtagtctctctgaaggtgagtctttctgttgctcaggtgaccaaggccaccaaccccctgctgattactcagccacgcccaagatcctgctactaccctggtttctggctccacattcgtcactattgagatgacttactggtcacagtaaaagcaagttgataaaggtggccagtgggggaacagagcttatgtgcctcctgagaaagccagtcgctggaaactggactgagagccctgatttggagcacgaggaaaccttaaaaagtgagttgaggttgcatttgctgggaagccataggaagaacagtaatggggtgggaaagggggctggctgcctgggggtactctccaactggaagtccaagccctgccttcactccccagtatttctttcccaccaagtgccagtgcgtttaaggcagtacatcatatactgtttttgttccgccagtgccagtgacatttcaaggaactaggaagaaaactgactttctctgccactttgagaaaattattaaatgtttactaggagtgttctgactcaatgaactaggatactgtgagtttgttggaacagagatttttgaaaccagaatgtgctgtgaagagatgatgggttccttttccacatttttattccatgacaaccgagccagcttcccagagttagctataaacacagagcttttgtttgccaggtttagttaggggttctttttgctggttcagagttatattgcagaaccacaatccatgttttctttggacgtgaatatgcagtgttgtccttataaagatcccattaaaagtttaaaaagcatacagccccatccccagccccgctaacagcaagcgtgcctctaatacctttgcgcctgactctctgggatgggacttttgagctggacagaccacagccccagtgttgctgtgcccaaaaccttgagccagctgaattccaactctaattcttccagttcttaatctcatttccttccccacttccttgcctggcgttctcctttgtttttgtgtacatatctgtcttcatcattgatctttaagctcctttggggccaagagctctggagccaggagatataagttcgaatcttagctcaaccaggtactgaataactttgtgacttagtgagtagcttacctctctgtgctcatgtttatttttctataaaatggtgataacgaaaatagaagtacacactgcttagggcaattctgagaacaaaaggagttaatacatggaacgtgcttagagcattgctgggtatacggtaagagttcagtaagtgtagctttaaccactgccagcattccccacagaccctggtgcattgtcggtgtttaatgaatgtttgtcaaattataagaaaaaacattgccctttctgtaggaattgcccatagctaaagagatgggggaaggaaaggaagaaagggaacacatatttctttttcaacattggggagtttgtggtaaagtacttggggctctggagtataaagaactatgtttgatcttttgtccaaacccctctgggatttgggatttgccagcgggtggtgggggggatgggggaggaaagcagtgtgatctgcagggagagaaccaattacagtatgcttggagagggtgacatttattctgctgaacctcttctctgcttcacataacgttggccacttcacctttcctgagatgtctctgaggatgggcatattttaaagacttgagcttacatcatcgcatcttgaaagaaccgagtataattgagttgctgatacaagtgggtacttgcaccaggtccgggtcacccacatctctatggaaacacatgtttgctttaaagcccagcaatcagaagcagatccttataggagccagcattgggtcacttttagaaaaaggcatttatttatattctcaagccagcagagacctatgaaatgaaataatttcaaattaaatagaaaaaccatgccgtaggtgaatgctaataaagcctgccgtgcgtcctcctccccctgtgcttgcactgcctcagatccgctgcatttattttagctgtcctttgctcttttgtgcccatttgcattctgctgctgtgaggaggtggtttggcactttatgcaaaaatggttaatcttcattcataagcatttgccagtactaaaatggaaaattcaaagctgggactgccataaagtgtgttttgtgttctgctctgccgtgtacgtgcagcatatacaacagtgtgcgccacgcagatgactctgcctgccatacaagcactcagcactcggggctgttgagtgaagaggttctcccatgaaggtctcaaacttgcatgagcacatcttgccctagatctgctcaagtgatattctaagtgattggaagcttttatctgcctctgaaagcaggccttttcaaataagtattgactgttaatgacctgtttaaataaaacattcaattttctttcttccccccacaaagaacttagtaggcagtgacatttctaaaccaaaggctaaccctgcttttcaaaagaggccaagccagagcttttaaatgtgaaatttttttctgacatttgcccttaaaatgcttttcagtgaagttgttctaacagtgggttgagtacattgaaatgtctttgaatgaaaatgcaaccttgagtttttttctccaaattaaacaaaaaatgccaatctaagtatattcatatgaaattcatatttcagtcaccaccctgtttcattgtttatgtttctcagtcctaataattaaagcgactttcctctaaggaacaagaacttttattaaactatggaaattaaaccacagaaacaaagagcaaaaacacttgaaatataagagacctgagtcattaccatgccagataaggagtagcaaaggatggagggaaaaggaggaggggacaaaacggaagagaaattaggcaatttaacagttaggccacagaaaacatacctagtactaagtttagaccaaatctcagttttgaagaaggagcatttgtttccctcttcagctggcatgcaagtgcccctgattgtgcttagggccctggatggttagtctctggtttaaaagtgacctgtacagagaaatagcctactactgtacatcattggagacagcacccacgccttttataagtgtttccatcaactcccagtgcctgtacaaacctgtagtacctgagagccaaaagagaccacagagttcatttcctccaacctggagatctgaggccctcgtgccacagtgtggcctgtcaggatgaatgatgccctttatagacagatgtgaagttcttccaactctccctatcgaagggtacctgtcttgtttcccatcctgtcagagcactgctgtctgctaagggccaattgacggcagtaggagaatgaaataaattagtctgtgatagtgcgccttcttccagaggtaatatattgcatgccttcaactaagtagaaatgcatatgtctcttgagaagccatactcagagatactgttggatgctgttttgcctgagagatttttgctgcttctcaaatcacatggcataattgacttcctacgcacaaaatcagtgctgattcttcccctctgaggcagccatgagaaaatgtcttaggatctacgtgatcatagtgatgcaggatttttgaatagcattgtctaggctataccaaagtcaggtacacagacactttaattactcttagtaattaagttagtaattcagttagttatgcctttagaccccagaatgtcacagagccactgggctgcatcacagctcgcaagaaacaatttgttggctgagggcccactaactgcaactctttgcaccttcacctgaggtaggaagctgcaggaaaacagccgttttttggtggggtcggggttgtggtgaatggagtcactctgtcacccaggctggagtgcagtgacatgatcttagctcactgcaacttccgccccacctaccgggttcaagcaattctcctgtctcagccccaccccatccccctccccagtacctgggactacaaacacacgccatcatgcccagctaatttttgtatttttagtagagacgaggttttgtcatactgatcaggctggtctcgaactcctgaccttaggtgatccacccgcctcggcctcccaaaatgctgggattataggagtgagccatctcacccagccaaaaatagccatttctttgaaacaagttcatttatgcccattcctgtgtgagtggagtggtttcgcactgcagtttgtgcatcctgcaaatgcgcaaggcatatactgtgggcctgtctggcctgagaaggcaggtcccgtggaacggttttattcccctggtggagttcttactgcatttcatagacagtgagccctgtgacttgtttatgatggttttgaggtgctgttagcccaatggccgtgggcttgctgagttggactgccttaggtttgagtcctggccctgccacttaactgtgggaccttgagcagttactagatctctttgtgcttcagtttccacgtatgtaaaaatggggataatcttaatttctattcgtagggttgtgacggtaaaatgaaaaaaaatgtatgtcaagcacttagcagagtgtctggtacgttataagttctccagaagtgtgctaattattattaataatatatttttgaaaagattattccttaacgacgtaatttgtaggaaactggctttccccttatctctctaggcttccatgagaatctatttcttgtgtgtagtgtttgggattaaggaagaggctctttctttatgttccaggatggagacactagtagttctcacggttttgctagtgcacgtccgaataccctgcggggcttgttaagcactgactgctgtgctgcccctgccctccagagcttctctttctgtctggtgaggggcagagtatttgcatctttaacaagttcccaggtgatgctgaggccactcatctgggaaccacactttaagaacccctgctctaggacagtactttccagtggaaatataatgtaagccacacataaaatcatacattttctagcagtcacattaaaaaagtgaaaagaagtggatgaaattaattttaatactgtattttatttaatccaatctatcaaatgctatcatttcaacatatagtcgatataaaaagtattaatgagacagcttatattcctttttttgtactcagtctttgaaactcggcctctattaaacccttccagcacatttcactttagactagccacattcaaatctggctttgcatgaaaatgacctgggagtcactgttttccatcacaacttccccacaccaactgaccttggggcccagaaatctcagtttttcagagctccctggttaagtctgttgattagccagaaagtcaagtcgatccagtctctaccaacttggtcattttccctctctaagtcatacgtcatgacatttggcatttacccactccagcttacattatgataatttatgaaataccctattaacggccccaaatatgcagtatgatttctatgtttttacaaatcatgggaaattttgcattaataaccttgaaaattttgttaaaatcattacttaaaatgttttcttatatatttcctatggtttcttaaatccagttcaagcaaagtgatgtaatacccaagaacaggaaagtaaacctaagagcattaatgggtttcagagaaacgaaagtgaaactttattactgcctacacaatcaaacaggagggagaaaggagacaagcaagtcagaaagcgatttgataggtcagtacattgatagaactttgcatgttttatgtgattgcattagaaacataaatatatatttttaaaactttacagataactcatacatattaaaatttgttgaattatatcaattggaaatacagagacagacatatttgccagaatgtctattatttgggtttatttttcataaaacatgtttatctttgttctaagctaatagattttctggctactgttaatgcatattctgtaagatttttgctcagtgatcagttcaatataattttgtgtttgaagtgattggtggtaaccatatttgtggttcataaattttatttatttatttatttatttatttatttatttgagatggagtcttgctctgtcgcccaggctggagtgcagtggcgcaatctcagctcactgcaagctctgcctcccggattcatgccattctcctgcctcagcctccccagcagctgggactacaggcgcatgccgccatgccggctaattttctgtatttttagtagagacagggtttcaccgtgttagccaggatggtcttgatctcctgacctcgtgatccacccacctcggcctcccaaagtgctgggattacagacgtgagccaccgcgcccagctgtggttcataaattttatactagaaaagtatatatagatgatgtattaaaatggtgaaaatctttcctttatgactaatatgtttccctaataagttttaacagtttccttgatctctatttttctttaggacatatgtaaaaattagatgattatatctacatatgtttataatggtattactgaaatctaaattgcaatttttaggaaaaaagttttaaaaaatgtctaagctattgaaatgttgcaccaatatcaggacttatatttctgagtatcttaattttgtgttgattgattggtatgtatggaacatgtattcgtggacttgaatagttagcccgcagtaattggtctgttccaataacaattttaaatgataataacaaggagaaaccaggttcttctcaagaagtcaaagatccctgtacctttcttatagatttaaaagctcctgtggtcgatacatattaaggtatgagtattcagtcatgtttggcagtgatacactaccaagcatgatgaccaagatgtcagggagaaggtctgttgtccccagacatctgttactcactgtaggtcctaaaaatcacagcattagaggcttcttgggcttacctagaagtctgcaccttagagggctgaggcttcacgttgctaaaccctgggcctgtcatgtgaaatcaggtgaaaatatattgaaaagttccttgactactttaaacaattaagatttagatgaaattgagctgactgggcagatatagttcatagcagaaaagagaatctcaaaatagggacacagcactgtttcattttcatagcagggagggtcagctcaggaaaggtaatgagtacatgatgttatgcaggggcaaggtgggcttccggacattctggagggactagtgctgattggagggtgcagacactcaacgaggaccttcaggacacaccgaaaataacctcacctgtcccacagtttccccagtgtttgtccttagcagtagaacccaatttgactatctagtcacttaaacttaaaattttttttttttttagatggagtctcgctctgtcgcccaggctggagtgcagtggtgcgatcttggctcactgcaagctctgcctcctgggttcacgccattctcctgcctcagcctcccgagtagctgggactacaggcgcccgccaccacacccagctaatttttttgtatttttagtggagacagggtttcactgtgttagccaggatggtctcgatctcctgacctcgtgatccgcccaccttggcctcccaaagtgctggaccacaggcgtgagccaccgcacccggccaacttacaattctttaaggcaaaccaaatttatggtctgtttaaattagaaccttttaactagttccccattgcctctgttatgcaccagctagcagaaagctgtgatattagaaacagtaagattttattttactgtgatgtggagagggtattggaacccacctggaagatggagcctgtagaggcagccttccagagcctgtagaggcagccttccacctgggaaaaataattgagagtaaaatgggcaaggaatgggtccctgtaattatttttatcttattttcccatctgagaaaatagccccattctaccctcacagccagcatttttcttccacaaaaaaataaaattatgatttgaataaaattgtaattaattttactagcatcagtcccaaagaagagtcttccttgagttagacttgaggtcaaagagaaaaagaattgccaaggagatgtgagcgtgtgtgcgtgtatgttttcttacgaatatagcttaccatccattgtcaccacgtcttcagatctcataaattttctctcttcaatggaattcctccctgattcctctgtggattataacatttcagctttagagaatgctgcacatccaaatcctagacatcaaagcccaaatgcaaaaacaaaacaaaagctttttctgttagatttcacatatctgtaatggcaaaattagatgtgtccagaagaatcagctgatctggtctaatgaaagtcattgtggctcacagattcattcttaatggcaccaaattcagctgtcaccattcagttcttcatagttcttaggtatacctctctctctcctccccctccatccccctctcatacacacattcatatactatcacacactgaaaaattcatgtatatacaatgtatgtttacatgatgccgaaactttcatttgaataagaaaatcagccatccagaagtcttccaatataatgattgcagactgtcttgcaggcttgtaatgaccgaccaaaggctttactttccacccctggcttgtaaacaaaaacacctaattatttgttcttgtacttcacacatcattcatgttcactattagaaataatcagaaaagaatcctcttctttacaaacgagtaactttcagggtcaggaataagtgaaaataaaattcgagtgttatttgccagctattaggttggtacaaaagtatttggggccttagccttactttcaatggcaaaaatcacaattacttttgcaccaactgactctcctatatgccaagtccagggatatagaacttaccatttggagggtgttttcaatagatggggcacttttatggagcatttgggaaagcgctgctttactggaagcaagtatgcagggtctctcctgctagcatgtccaaatgcttgtgtcagtggcagtattatttgggaacttataaaaataaaatgttactgtttctaatatttgataatttgtctctctggattcctagttgagaataatttgagtagtaatagagttaacattgcgtattaccaagctttcatcctaaaatcagcaatagataatggatctgaatttatgctttatttaagacgtaagtgtaaaagaaaatagtggggaagaatcagagaatttttgcaagttatccctagcatgtgtctactctggaggtgggtacactctttataagaaaagaaaaggaatataagaaagtgtttcagtggttcttgattgacaaaaagcattcaacatgcaaataggtggtatatgttgatatcttggcctgactggctgctaatttctgaatcaatctgtttgtgcatttaagtcatttattctctatttcaaaaagattgaatctattaaagtcttaagatctgtcttccattataatggtgaaagattttgaccagataagggaaaagaaaacacaacagcttgattttgggaacacagatcttctcagagggggccactttacaaagagattggacaccaaaggcagaaaacctaaagattttgaagaaacagaaggattatgggcagttttaagggtccatttgaaaatggagattatgaaattatggacaataaaaattacaatgaagatacatatgtatcaatctggaatgttgctcatgatatgttggtaagtgaaaaaacaaatttaaaactgttatattctgttggagagtaaggcaggagaggtggcagctttagatatggtggtcacctcctcttggaggaggtgataactcaagctaagataaagactgcagaggacaggtgcatggctcacacctataatcccagtgctttgggaggccgaagtggtaggatcgcttgagcccaggagtttgagaccagcctgggcaacaaagtgagacccttgtctctacaaaaaatacaaaaattagctgagtgtggtggtgcatacctgcagttccacctacttgggaggctgaggtggcaggatcgcttgagttgaggagatggaggctgcagtgaactgcgatcacgccactgcattccagcctgggcaacaggtaggttttcctttaggtttgttttgagacaagctcaaaaaaaaaggttttgagatgccccccccccacccagaaaaagactacaggaaaggaacaaccctgcaaagatctgaaattagagcattccagatagaaaagttgaaaaaaaaaaaagaaaagaagttgtggggtggattcttatgtttaaacctgggatagttttctcctgtttttttccatagtgcttggtattgttatgtacatataggagagatatattcaataaatgtttgttagattaccaaggagctgataaaagctttgagacagtgaggactgtgatgacaatacttagttaaaataggtacggtttcccttctctctatttttgaccacctttcttttacataataggaagaaacacaatttagataaattcccatctgtctttgtcgtttttcatgtcaatacagtatgaataaaagattttactttgttttctagagttattgtaacatgcttttagaacatgtctaagtcagatgcttagcttgaaagtatttttacattctaaaatgatatttatgattatgaccgaatgaagttgtttactgtgttggaagagagtgtaaaaataacacattgagaaatcaattttaaaacttaatcttgttttccttctttatagggcctattccactagaagcaagatggctgaactcaatactcatgtgaatgtcaaggaaaaggtaagatcaagttatacgttggctcacagaaactccaaactaggtaatgcagttcctagcaggtaaaaactcaattacagtggagaaagggaaagtggttttgggggatacgtagtaagtttgccacaacagtaaactgttcagcagaaagaatcataagtaacatttactgaaagcatgttaagcatatgacactcattttttcatttactcttgaccataaccccataaagaagatactgttgttatttccattttacagaggtggaaattgagaaacagagaagtaatttggctaagttaacgtagctggtaaacagcagagctgggatttgaacccatgcagtgtgccattccaccgttcatactcttcacccccaggctgggttacatctaagagcaagggtattatattacctcttcagaaatggactcagagagagacatccagtctatcacctggtggtcacgctgggcagcctttgaagtttctttcaacgctgagagttcatgactctgaaaatccccacttctcatgatttgttggagactgattccacttcagagctctttccaagtctatgctgcgtcctccactgagggtcagaatccctcacttgccacatatgctgccttgtaatgttagctcttaaggatcataaaccatagaccatgaagataaatttgtccaacccatttgtctgacaccataggaactgaggccctagcactggtttgctagtggttgtataggcaagtgggagagcctggacaggagcccaagccaccacagtgctggtgcaccttccacagcatcaccccacagccttctctggactgtaaaccatgtgaaggcaggagtttgtctttcatctctttgtatcctcaccataccaaaaatagagtgaaggatgagagaagtgacatttgtgaagccattactattttttctttcacttagcaacagggtaatagacccaaacaccactctagatgcctggggtatggccctgaacatgtagatgaagttcctgctcccatggagctcacattttagggcagggaagcagagaataaacacaagaatatctaaatgaacacagttgttccaggcggtgataacaactgtggagaaaacagcagggcggtgtgatgaaggcaaggggaggtggctcctctgtgtggagtggtcagggaagccctttggaggaggtgacatttgattgagataaagatggggaaagaaacaaccatacaaagatctgaggacagagaattccagacagagagaaaagcaaagcagatgcctaaggttgactaagttgaatgtgtttgatgagcaggtggtcagtgtggtccaggtgtggtagacaaaggtgattggtgatgggagatgaagtccaagaataccacttagaatcctggctgtctacccaggtccgtggatctccaagggatcgcggttagaatccatgggtccatgaatgtagatgagaacaaatacatttttatcttcactaacatctaaatgaaatttaccgtttcctccagtcatgaatgtaggcaaaggcaaaaaaaaaaaaaaggccagagtagggccaggtgtggtggctcacacctgtaatcccagcactttaggaggctgaggcgggcagatcgcctgaggtcgggagttcaagacagcctgaccaacctggagaaaccctgtctctactaaaaatacaaaattatctaggtatggtgccagacacacgtaatcccagctactcaggaggctgaggcaggagattcgcttatacctgggaggcagaggttggggtgagccaagatcgcgccactgcactccaggctgggtgacagagcaagactttgtctcaaaaaacaaacaaacaaaaaacccacagtagagcagcagtacccgtgactttcacaattaaaaatcacagatattttcatatccaattacatttgttgcagatatcctgaaatggttgtccgtcattacttcaaacttactgtagttgaagaaccttgttactatataatgttatttgatgtgttaatagagaagtacatatattactgcagcatgtttgttttttattaatattctaagtatatttcaatataagtagtttcctttgtaatcacatgtagtttatttcataaattttaaaacattattttgagaaagaccccaaaggcttcaccagactgccaaaggaggtccatgtactgaaaggtttggaacccataatactgccatgtagggcattattcagagagcaaaaagaagctgttggaaggttttaagctggaatatgacttgatcttacatgttttaaaaatatcacctggctccattagcgactgtgctacatattttataaatcttcatgttaaataacctttctgtttgatgaggacactgaggcttgaggtcagacttgtcttggtcaaagtcaaactctcaagaaatgtggaggaacagggcttcaaactcagctgtgtttggttctaaagcctgtaccctttccacatattactgcttctcagggttttccatcaaaatgaccccaagacacagaaggactaatgtgttaccccaagtctctgggcacatggtcaaaactaacttctgacaacatacaatttccttggggtattattacatgttgtcttaaaaatcgatgcaaaatttttatccattgtatttaataatatattccacacattatttcagtataaaaccactgtaactttgtgatacttattatgaaatatatataccattcctaaaatccttggtatcttcaaaatgataagtgtctttttgtatgctgatgagctgatctttggctgagggctcttggatatcgtccaataggggctggttgcccagggaaccaaccaggtgattagagggttggaattttcagtcctacccaccaaactggcaggaggagagaggagctgacgtttaagttgatcaccagtggccaatgatgtaagcagtcatgcctatgtaacgaagcctctggaaaaacccaaaaggactgagctaaatacttggaggtttggggtggtgaacccagagagggcatgttagctttgaacccctttccacataccttgccctgtgtatctcttctctcttgtgttcatcagtaaccttaataatatcctttgtaataaacgagtaaatgtgttccctgagttctgtgagccactctagcaaattatagaccgtcccttatttatggtggtttgatttaagattttttgattttatgatgttccaaaagccataggtactcagtacactcctgatattttttactgtttttttcccaaatattttggttctgtggttggttgaatccacagatatggaacctgtggatatggagggccaattgtacttgtgctggtatctgaagtggggggtggtcttgtggaactgagctctcaatctgtgggatctgatgctatctccaggtagacagtgtcagaattaacactgggagaactaagtgggagaacacccagctgatgtctgctgaagaatccactgctgaacgattacttggtggagagaagtcccccacacatttgggtgaccagaggtccccagaagtattctgcattgtgagagcatagtaggagaagcggagtttgttttttcctatatctttacaaacttattggccattgagtaaaaaatagcagcaagatgtcccttttatgtcatggcttcttcatataatgtctgaactcacagtcatatattcaagtgagaatatgtattccccaatttgagaatctgggttgggcgccatggtgctgatcgaggattggcagcccctttcctaatatctgttgagatagaacagctcctaaagttggaccatggaaaggaaaagcactttaaagaatcagactcatagcaattgatccctgcaaaacatggctggtggacagaccaatatggtaggcagagcagccgacattagagtgtcttattcaaaacagaggtggcatcatgccaatgagggaaaataggctgatctgttagcacacagatcacagaggttcagtgtaaatgctccatgcataggcttaagagccacagtcatcccactcctcatgagcagtgtcagatgtctacctgacaattaacagtagtgttttcccactgcatttccgtaacttataaaaatgttggcactattttgaaagagggtgatgacaatggaagtagtgcttctctaacttatttagtgaattccatcttcccatgtcaaaaggttaatagatttctcaactcaatgaaataaatcataataaacaactgaaaattctgaacgtttataatttgacattgatttattttagtatacttactgtctttagttattagcttttatggcctaaaaatttttatgattagtttgtttctcaatctgtcacacagagcaatgacattttaattctcaaaattaagaataacaactgttatgtcttagattacaagcttgtagagatcagataaaacatctatttagtgttggtgatgcagtatctagtcgagcactgtgggaaattaattacttcataagaagtgttggaatccaatgagttcatcagctgtctctagtgggtcctctattggatgaattcgagtaggtgctttggtgaggaaatgattcctgccttcatgcagcttttagtccaaagaagcaggtagctaatgatttcaggtttaatattcaagacaactgaaacttaaaattgacaatcattttaactgtttcattttaaaatatctctaccttgttggattataacgataaggatttaaattgaaaatatggttgcaatcagagtctggtctcttcggcataacatacatcccctgcatgagtggaccccgtccaccttttacacccttatccactgccgcatctccacgcatctctcattcgccaccctgaccttgaatgtgtctgcctcctttgcaaaggctgtttcctctgtctgggatgtcctcctcagggactcaactctcttctttctcctaccctgcctgaatgattcgcccttcctctgtcattcaccttgtacttctgtgggcttctctgcattctccactgcagctgttattccacggagtgtaattgttagttgtggctctgtctccccatgtgagactgtgcttcttggaggcagagaatgggtcttactattactattcttgggtttgatacatagttgacccccagatagagttagataaatgaatgaataatgaatgaatggacacgcctgcttgaattgttaagttctttagagacttcatttcccatttacgatgttttgcaaaatctcaagtcttcttgaaaaatgaaatgtaggttaatggaaatgtcatctcattttagtactctttttgctattaaataaagcatattttaaattgcttctaaaaacagaaacttgggttacttacgttgaccacctgtggttcttcagaaaagtagtatgtttacataatcatcaaatacaggtggtctcaggtaggcttcacaataccaaatgaggtcctttgctgagtaaccggtcatatcctgctgcatgaaataaaaaaataaagggagaaaaaaattccccaaatgtcactctgtgaaggtgagctatcagaacaaaatctttgggctaatctgatcttatatttagggcatactcattttttaatagcttcttttctaaataatgtatttttaaagaaattgaatactagaaatttatagatgatttcagtgtacagcttaatagtcactgttagattatttctgtgtaaaatatgtgggtaccaaggtaaattagatttataaatgtttaaataattttaactgaataagaaaggattattagaactggtatagacaaaatagaaattttagtcagatatttttaatgcattcccataaatcagtttaaatagaatacaattcagcagtaaaacttggtgatggaaagtaaagaagatctttgtaaatggggttaatagttgcaaagtgtccaattatgcactgataactaattccaatgagtgacctctaagccactttagaggacccagtacacttgggaagtgatctccaacaaggtaaggctgtggaaagagtgtggagtttggagacagaagtcagagattattagttgagcaccctgaaataagccacttaacttttctgggcctcaatttcctaatctgtaaattggacatgataataaaatctgcctcacaaagtcatcaagtacaataataaatgtagagctgctttatgagctcttaacgatataaactagaaagaatctgggggagcttatctgtttatttcacaattaaaaaatggaaaaagagctctagttaattaacatttttgtttgaggcctggcatggtggctcacacctgcactttgggaggccaaggcaggcagatcacctgaggttaggagatcgagaccagcctggccaacatggcgaaaccccgtctctactaaaaatacaaaaattagctgggagtggtggtggacacctataatcccaactccttgggaggctgaggcaggagaatctcttgaacccagggagcagatgttgcagtgagtggagagcatgctacttcactccagcctgggcaaaagagtgagactcgatctggaaaaaaaaaaaaaaaaaaaaaaatatatatatatatatatatatatatatatatattttcccatagaaccaagattggaaagaaaaagtaaaaagaccaaatgagaaaaagaacataaaagcgaacttgactttttcaaacgtttatagctattgctgagcctacaaaaaataagtgagactagacaatacgatgatatggaaatggggaacagctcagtctataatgtcatcgctgagctgcgccactcactgtgaatagcttttagaactgttacagttatagaggtaaattggtttataaacaataattgtgtagaatcattcaaataaaaaacaaggaatagtaaaaaggagaaaagtctcttgtccagagaggtgacatattcaatgtctctgcagatgatggagatagaaggtgttcatgtctgtgtgtcgtggtgtctgtccccaacggatgagcagatttttaattatttttgaataaatatgtactattttattattttttcttgtaactctcttgatctgcattttacagagtagtgacatatagttcaaatctttatgtggggtggagtatggtcagaaaaatccaagcatttgattagagagagtacagaagaaacccatcattatgcatctttaaaacattaactccatttaatagataactcgcttcatgggatttgacacaagttttaatgctaagtagttgttttgaaagtgcaaaccatggaagctttggggaaaaatttgcaggagtgtagaagtcaatttagtccaacccttggattcaaacaagaacacaagccacacagctttcagatttcaccatgaaacaggttcttgtcatcattttctcataggaaagggtcattaaatttcccattaacagaaaggagaaacattgacaatagttgttgcctaatgcttatgtacagaactgctgttactgttgcttggcaactagaagagatttgacaaggagtctaaaggaactgaatgaataaatggaaatgtcagcctcagtttcaggggataagaagaaatttactattgtaggattagcatcgcattgctttttccaggctacatgatcggaattcacagtgtttctctcctgcttctcctgcctctccacccccactccttccagtctttcctggtagcccctgtgcactgcagctgagaggtatatataagatagatggttaatgctaaagaatacaagagcatgtcgaaaatgaaaccctgtggcagcaggaagaagtaacttctattcacaatcccttgggatttataggtagtttaccaacattctagttatttctcaccatgatccttcgtattaaattattcagtttttacggagaagaaaatgacaatgttggaaggctgtaacaatggttccttctctcctaaccttgtacactggaaatctgttcggatagattagacagacaggtagacagacaaacagatagatgcataaactcagaccttaaaattgttattgtttgtattattattaaaaccacattttctctgtaaatcattgctccttaacttgattataagctcctagtggacttttgatttatttgtgtacttatcctatagtaatatattattatataataataatatcatagactttgtgccccccaaatattggctaattaatcagtgttaaataatttagccactattgtctaatggtaattctcaactcatagggaggaagaaggaagtgggacatgcttcctgggtctagggcaagtattagaatgtcagtgggggaaaagataggtataattagaaaaaaaaacccacatatttgttttcttttgagtcatccaagagacagatgccaagatgagatgggattaaaagagatggggaagagggtaggcagccagagcaggcagggagaggctttagacttccatgcaaatctgatagcttgaaagaagagggagaagaaaggaaaatcgagcagagaatgtctcaaacttacaatgcagtattgaatttcggcaggctgatgaggagtgtttaggccaacgttgcccactgggggaatgttcagaaatgagctttcacgagtccccagcctcctcagctgttaactagcaacctcctggggggagtgtggctggggtgcaaatgcactgggggacccaagaggagtggcagctaggctgtcagtcaactgtgttgatttccgtagctgccacaatacctcagagtgtaacaaaatacatatgtatatatttaaaaaggaaattggaatacctattttggaattcaactatatgagaaaagcttgagatttttatgtttattgaaaagaataaattaaaagtttgggagccatcattctaaagtaaatagtaaattaaaatgcaaactctagaatttcccatcctttagcaaaccaagtcatactgtcactagtatgggaagtcttctcaacttctagggtgaacaatgattcagtaatcttattctccattaaaagtatactttgtttcaaaccacattataaagtaacaaagggacatcattatactgaaaaactgtcctttgtgtacaatgtgtatacattgtatttattcacttggcttcaatgttttaatctgccaaacgatgggagttcatgtagatgaactccaaaatcctttgcagctctatcattggatgaacctgtggtctttcccacctcctacgcactggcactgtgaaagaccaaaagggagactgtgctgcggatcagagaacatgggcaccaacctgagtcctgatacaaactggatgcctcaggttgaacttagcacgtaacctctcagtatgtcagtttcttataaaataacggaacctgatcgaaccatcttaaaggtccatgtgtggttcactggcataacatttctgatgccctcctgtcttagggatgcttcggaactctgcttctcaatccttgaaggtaattatcaaaaatatattgaaatgatgatttaggatcaattatataacttaatgtttttctttctttttaaaaacattatgctaagcacatttaacatgaaatttaccctcttattgtgtttttaaatgtacaatacaatgttgttagtcatagggacagtgcctctagagcttactcatcttgcataactgaaatttcatacccattgaacagcagttctccatttcctcctccttccaggccctggaaaccaccatcctactccctgcttctatgagtttgactattttacatgcttcatatgaggggagtcgtgtagtatttgtcctgtgctgggctgattccacttagcatagcatcctcaagattcatcagtgttgtcatgttgttgcacattgcagggtttccttttgtaaggctaaataatattccactgtgtatatataccacattctttatccactcatcttccgatggacaattgtagtttttaaaatttttagtggctcaaattgtaatttcaggaatttggcaaatgctgactagttttaattcttttttactgcctttagaggaaaagcaaacaaataaactcataaaatcattgggaaaacaagatctggccaatcagatgataattttgactggtgttcaaatcatcatgctcttttttaattgatcaaacctgttaaaatgaaaaatgatatgtaggtgaacaaataaactcccctcaaagagagagagtgtgcttctagtttccatggtgtttaaatcatcggcttcctctacaccacagtgaagaaatatccaaggttaatataatttagagattaacccaactcccttattctggtattgactaaaaaataattaactcctttattctggtattggttaaagggtaatagtgacttatacctttatggtactctttatctgaaaagttctgtgaatgagcaggaaaaaaaaatccctcagggagagtgaatgtcaataattaccatttcccccctccaagtggagactttaaattgcaaagaaaatgagaagaaagattttactgaatattctaagttagaagcagaagattaaagtgtcttagtattctactctgattaaaataccaaaaacaaaatgccaaaaacaaaatgccttgaatgaagataacatttttttgtcctcagtaataaattaaagtatagaattcatcagtgatagtggctagacagaatatttacctaagtcctaataccatgtaggtataaccagctggctgaaaacagacctccagtggactcaaggactcagtgtaccctaaaattatgtgcaagtctaactggtagttctgggaaaatatgagaagaatcaagagcaattatagaaaacatgtaggtatatactgaatatatgctaactaaatggatgaaatgagatatgtattaagctcattgcttgtttaaacgtagatcaaagagactgttgctaacaatgatttgagagttatatgtatatatttaaacttcccagtgtcagattaaaaatcaaaattctgatataaaaagttgatcatggactaaatttaaagatttaaaatactttagttcattttaattttacttttttgtgtgtgggagactgaagttttattattactcaaatcagtctccaattttactattttttttagataggagagaagtccatttgaatatctcttactctataagtcatcagctcatttctaggaattaaagaagttgtatttaacagaaactatcaattttcatttagtattattgtaactgttaaataaatttgctttttttccaaatgttcagtgacttgacaaagtatagacgaagaattggtaaaaagaaatctgggttgttgatttcattatctttaactatttgaagccaactgtatttttcaaagagacaacaatagtatcttcccccattaaaagatggagcctgcctctccccttaaaactgggcagacttttgtagctggttgatcagtatagtaggaaggaaaagacttccaaagccaggtgattctgctacttcttcaccaggtgggatattgcagtggctctctgggctgccatgtaaacagtctgactgttccaccatgcttcaaggaagcccagactagcccatcaacacagaccacttggagaaaccttgagactgcacaaggagagagaggctcagacacaccccatctgcagcagcatccctccccacccaccatccatctccatgagagaccctgaggcagactgctccaccaaattcctccctaattcctaagccacagaaatagtgaaaaatagattgttgttctgagccacaaaattttggacacttgttatgcagcagtggatacctgggatggataccctcttacagagagagagcgtgccctctcgaagagttttgctttacagaaagtaaaactgttctaaactagaactggtatttttgaaattataatattacataaataatggaaaggggtgggtgcgtagtgagtacactcaggtaaatgagttgacaggtgagcagttacacttaaaaagagatctgtcctgtgccaccttctctcctttgcctcatccactgtcccttacctatctatgactttcatgatttctcactcacggttctcaattctggatggatattagagtccctgggaaattttttttttaaggaatgccaagtcccagatttgatatctggagtggggctcaggtttagctatgttttgaaaattcaccaagtaattccagtttgcagccagggttgagactcagtttgatgctgatggtgccaaaatctctatccctggctcagttcttttctggagctccagatttacagattcagctgcctcttagatatctggacatggatgtctcacaggctcccaaaagagtaaagctaccaccactggtcccttctcaggaaatgaccccaccagccacatagacaatcaagccagaaaccaaggaatcacccatgtgccttcatcttccccattccctgcatctagttaaatgcaaatcaattgcttcctcccaagaaatttgtgagtctttttctacactgccccatcttggtccattttctctcccctggacagtattagaatcctaacaggaatccatttgatctcctccaacacattcacaaagaaactggaatgacctttaatatacaagcatcatgttcctcccctgagtaaagctcttcaatggcttgcccttagaataagcctcaaaattataagtcttccagggccttgcccacttttgctttgtgcctttcttctccagcatcacccacagtccccctccttttcatacttaatgctccagcaatctttgaccttcattcctttgagcatgttcttccagtcactcagtcctatctcttcatagacgttgtgccctcttcctggaatgttccaccttccctcccattcccctggcctaactatagtgctactaacccatcattctcggtttaagctaacttcagtccttggagggggcttcccttactctctagactaggacaggtcccctgttatagatgccagagcatccttactgcttcttctataacattcatcaaacatttgccttcctagactataaaccccaatgcatctgtcactgctgcagtccagcttctgagtctgtgcattgtgactgactgaagaaatgaatgaaccaggtattaaaagattaatttcaactttgagggaagtttttatggtaatactctagcctctgtacttggccatggcctacacaaaattcaaataacaaatctaagatatagaggatgtcaactgatttttaaaatgatacaaaattggaaggaatggctgaaacattcctgtttatcatggggcaaaatgcaaggttctaaaacataacagttggctggagtgatatgtcagaacttacatattgaaatttaagaaagatgaatataaaatcctacctttgtgttctagtcattgcacaagtaaaggcccggggacacttgtctcaaactcaacggaaggagagtcagtagcaagtaacctgcatttgacctagtgattaattaatgtggctcctaaaattgctgatgccaccttagactcccttaatggataaacggggcccaaccaaggcaggtgcaggtctcacagtcctctgctctaatccaaccacttctggagcaatgtgcttctcttatagcaacatattttaacaggatatgctcaggtgagcttgatcagatagtaaaaacttaggaggcacagcttatgaaaaattgcagaagagcacgtttactctataaagatggaattgtggagaacactttagttctttttaaaaagcaaagggctggactgcagaaaaggggttatacttacacaccagcaagcagcactgggaccacatactggcaatgtctaacatcccttctctgagcatgtccttatcattgacctctctcatcttctaattctctttaacatctgttctttcttgtcccttagcctttctctagtgttccaattcatcctcccccttcatagaccacagatgccttcatcagacaccttagtgatactcagcccctatgtttctgagccctaaaatctaccactacatttcttacagttcagtttgtaactatggatgattgctttgctcctgcttctggcttgttgagaattgctggggaaagccatgccgatcggcaccgtaacagatctgtgcagtccagcaccatggacccacaggcctgctcagcattccatcattcatcaaggtcatttcctatctcatttccataagggcagctctaaacctttctccactttttaagccccaaagcgaattctaaaactctcacgcagaggaatggtttccataaattttccccttcacaatctgaaatttttattatgtcttcactctcacttctccttttctcctttctctgaattcttagaaaaacagaagaacctcccttccattccacatgggttttgatgacgtttctcttatttccagtggaagcttgtttcataatttatctcctctcttcccctcttctaattctttctcactgccatctccttccctctatcagtgaacacgctcagcactttggggagattaattgtgcaatgactgttttaagacagattggagagaggagaaaccaagccagagaatcccattaggaggccttttccagagtccaggtgaaagataggggaacctgtctgggttaatgaaagaaagaatagggagcaggtaagattcagagagaacgttgttaccagaatgatgtgctagttatttatgactttgccttattttccttactcttttgtcagctcgttggatgcaaagattgtgtgagattcatttcactttccctcacaaaatgtggcttgaatgagtgaatggctagaattcccccaaacctttgtggagagggttgccatctggaaggtatatttttttaaaaggtaatagttggtgggatagggaaagacatctccttataaggagggaggaagagaagtgtaggcctttgtttctcaaagtgtggtccattgcattcatttccagttgctgctgtaacaaactgccacaacttcagcagcttaaaacaacacacattgattatcttctagttctggaggtcagaagtccgaatgggtctcattgggctgaactcaaggtactggttctggagccctggggagaatactcttccttgcattttctagctgttagaagctgcctgcattccttggttcgtggccccctttcatcttcaaacccggagaggctggccaagcctttctctcattgcatcactgtcccattgactctcttccatctccatcaaattataaggacccttgtgattatactggacccactgagataatccgggatgatctccccatttgaaggtcagctaattagcaacctcaattccatctgcaaattcagtttgccatgtaacctaacatgttaacaggttccaggggataaggccatggacgtctttgaggggccattattctgcccaccacatccctggacaagcagcatttacatcagctgggagctgattagaaatgtagaattcaggacccaccccaagcctctgaatcagaatcttcatcccaatcagatccccaggtgatcagaatatattttaaagtttgagaagccacaactagaatgtttctaagatcctctccacttttacttcccataattctataaaaactgcatttttttccatcttcaaatctgcattattctttctcttcctggtttcctgccaaaaaaaaaaaaagttagttttgatttgtacccctggtgttaattccccaaaagtcagccaagtagaacatgacagcacctcatgcatattttttgctggcaggaagtagatgttagaaaaggcaattaaattatggaattatccatgatgtgaaggtactggtctgcaaagagtattttcttccccaagaaaattcataggaaaactacctccattactgtgtagataatattagtggcccagcaagtgaagcaaagcatacacagatgagctgtttttaaggcatctctgaatggctcagcatttgagaaatgtgaccaaagctgattataaaactcctttcaaagttgcaggaacggcaaacccataaataactccagttcccattggtgtgaggaggaggttgctggctgcttgattgctgtccttatcataggggataaggttaagctcacctccaagattgcaagcttctcaaggaaagagccagccatatgctctgcctggcacccaggaggcactccatacattttgggcttgaatccattaagctttttaatagtgtgtaatacttaattcttaattagagatgcacttaaaaatggataaataaaactagaatatgtcagtaaccatcttactagactccctgcttccttttactcattcagtgagtcatcccttttacaaacatttatgaatcatctactgaatgccacccattgttctagaccctgtggatataaagatatgctccctgtcagtagagcaggaagtcacataagtaaataatggtggcaatgtcaatgctggaagaagtgtgtgagcaaaggtctcaggcctctcttctcccagctgtcatgtacattctaatgggacttatatttaaaatcttccttttctcacctttgccaatcgggattatttagctttattatttttatttccagccccggctattaatgttgcctccaggcacaccatacttgctctagaaaatgaaaccctctcaaactagcacaagtttaaaaaaaaaaaaaaaaaagaggttattattataaaggtctggcagcgtctcatgagacttcaggaaaagttaaaggagcaggaaggagagaaagtgaggcagttgcaagtccagcctctcttcatctgcactccagcttctctccctttgtgttgaatagctcagaccttcaaggcagagggtctaattgtttcactttgtcttttctagccaggccacttcctgaccactgtaattcattgtcactgtgttctgattgcttccttcatagcactcacttagcacaagttgcagtgatatattttaatttctgtgtttatatccgtttccctctctagttttggcagtgaccatatctgttttgttactgctgtatccagcctctagtgcagtgcctgatcatagtagacatttagtaaataattaaatgaaagaagaagagggggtaaaaccatgttaaccaccctaaagatagactttctcattgtaccagttacaccatagagaagggaaaagtggggacagagtcttgggtccactgaccccttagcaagtctgtggaggtaggaggttctctaagaagaagggtagacaaggtagtctcccccaaatacgtcttgaccaacattcaagccacatggtctttccacttcaaagccacacctggaaggaccccttaatgcaaatgctcccacttttttctttttaaaatctattgagtagctaatatatgccaaattctatatgaaacactttacaggcatcatccctttccatttttacataggctctagaagataatatcctcattttacagctacagaaccaagtttcaaaaatttaagtggttcacccaaggtcatagagctagcatgtagcagaagcaagattagaacataggtctgtctaactccagcgctccttccatgacatttggctctctataaagtactcacccttactcagcaaagttaattccttctctgtagcaccacagtaccctgttcataaggacagtacaacacttactacctacttttattgtagacatttctggctccactgctaaactgtgcctccttacagcagaactgtatctagtttttctttgtatcctcagctcctgtcatttaatgggggctcaaccaatgtctgtctgctaagctgagccttggaaggatagacaggcagttactgtgctttttcatatttttaaaactccacaaaataccatgagtaccttattctacagaattaaaattgtaagaatgtaaaaatctcataaatattcctccagtctctgttattgaaatttaaagaacatatatatgttctccctacccatattatgcttaatgacatcaatcaagtgagacctgcccactgttatcatgagtggtagatgcagagtgctgggatggtccacacaagatggtggagtcttcctttgactcagagcagccgcctggtgtagctataagttggcattctctcactcaacaaatatgtattaaatacctactacatgcaccgtattagtcgcttgtgaatgggcatggtgattatccaaaaatggccaagatgaggattctgccctcacgttgcctaccatctgggagacacgacacacacacaaatactggagctataaaggaaaaggggctaagacacttgctgaccaagggctgcaggagttgaggcaaaggtgacctctggcagggggtatggagaaggatttcatggaacacatggcatttcacctggaatgtgcaattcagacatatcttggaaaagcccggcctgggggtgggggttcaaaactgggcatggggagcttgtctgtgaaggggtaaagtcagagacatttagaaagcaagttggagcccaattgttgctggcgttgaatgccaggttgcagataatgaactttattcttaagttcttaaggaagagggtaaaatggtcacgaatatactccaggaagagcagctgcctgggactgaattgcaggggagagactggaagcagagagaacagttattttatgtttatttgataatgccgggtctttgctgatcacacagctgtgtgggtggattgaaaactttggtcagagccactttggaaactcagacatagtttaagtgactcatcaggaagccaagaagaatttctaagggtcatcacagacaggctcaaaagatgcacagtatgaatgaggaaatctgttaacggctcttaaccagacagctcaggtgcagagaaggcaagttagtttgggaaactgaaaccaaacaacgtccatgaaagtcacactgcctcactgcccagttagtgcaagcaaaaggccagcagggcgggcctgaggcgccatggggcagagcctgcggagtcagatagggaagccccagagagaggagaggatcatgactaaaacactcaagagggggcatcaaaacatcatgctgtttctagatagcacatggactttgccaaaccagagtgaaattagcagaagcaaaatacgggaacataattttgggaaggtaaagcagttgctaaatgaaccgctaactagccatcttgactgtcacccaacagcggccgcctggtgggaccactttgtttatggcatgagagtcctttagcggggcagtcaagtgcagcttcaaacggtggcttaggtgttagcctgggctgtggcaatgaagtaaaaggctgtgtgaagctgcgccagaaacagcctctgcaaaacagccgctgcgggcgtgaattttatgagttctccgtatgcaaactactattagtcacgcattgattgatccattccttccaggagcatccgtcctcagaagcttggtttccaactgcaaaggcaagcctttcagcacaacctcactataactcttccttggtcatccatgccttatatttaaagctctgcataatgagggcttttttttttagattaagatgcttaaaccctttttgataccactgaattatgaggagtgacacagtgaggttcctttatttttatgtgcacatgtgagttcacacaatttctccatctttctcaaagacatttccataggaaaataaacatagtgaatttataaataacaggctgagaaacaatgccgctgtctccacattcgccaagccaagtgattaaagcagaaacagaggttggcccagaaatttactagaattcaacattactatgtaatatccaagtataagcagaaactatttttttcccctttttctgtaaaacttggaatacctgtcctaattaaatgtcttcctccaggaattgtatctgatattcagttagatttgatatcaaaactcagttattgacaattttctaaggatacagtcagtgctaggatatacaaaatgacaaggatagaaaatgttttctgtgcacatcttaccatgtgtttttttcttttgaagaaggataggcaagagtagtataaacatctaaaaaggaagtatctccacaagtagtggtttattttgtgttttgccttaacataatacaacattgtgttttgcaggggagagactggaggcagagaaagccattattttatgtttattccataattctgggtctttgcagttcacacagctgtgtaggtggattgaaaacctttgtctaatataactataatgtacttagtataattaatattatattaattatattatttaggtgtgcctgatgtggtaataatgatggtgatgattaagaaattttatgtaatatgaacccatagtggcttgaaataaatgctagatttaaaagagctatattggaagggtaacataatctttaggtataattccagtgcactggtaacaatgaggcaaataatgtgtattgttgaacacattctgttaatgaccttcctgggctggatggagggatttttttgtgtttttcttcctccccatcttaacctctctcaaaaacaaaacaaaacaaaacaacaaaaaaaaacccagctcatcaaaaggatagttgagggttgctcacaggatcaaaatcctttgcacagccttgtaggccctgtacgatctggtccctgcccagttctggcttcctcttgtactctagaagcctaccctctgcctccctccctaatcatgtccaactcctcccttctcatccatgccttgcccctcactcatgctgttctctatgcccaaaatgcttttccccttcccctcccacccatctcttctcactcatcctccatccaggtctcagtggataaagtcatataagtcaagtctccctgtcatatgattttataccacttaagtggaatgtataagcatatatttgtgcaatcatttggtcaatgtgtaaatcctcctctggtctctaagttccaggaagtttgattgcttgtcagataataggtattcaaaaaatattcacagaattggatttttaaagatgacacagagaagtaagaaagaacttagatttgaagacgttaatttgttttaatggatgccagaaaaactaagaacaatgaaatgtgagaatagaaaatcaatttgtatgtgtgtgactcacacacatacatatatatatatatatacatatatatataatattagagtcctcagtaaaactcaaatatttagcacttataaaatgtcaagattcaaaaccacctttctaatctatagtgtcagcacctttacaagtcatatacccacccatggcttgtgctgggtgggtacatgacagtagcttgtgctgttgtctcattacaacctaaatactcttacatgcagatctgtatggaataggtgatctgttttctaacataatcaggaaataggccatcttgttcaatgaaatgttctggtcaatagcatcacattacacataccatacccatttaatccatattctgtgaatccaattatactaaactgcatttaactctaaaacccactgatcataatttaaatgctgatgaaaacatttgaagaccgtacagtgctttaatgatcacttacctttgcaccatgcagtactctagtattctcagtagcagctgcagtaatccctgtgatagaaaactgggtgaaccaggttttactaaaatcaatagaacattctgtagttattgcaagtactgtgagataaaggtcaattaattctaatagtcaagaagaaagaatatatgctaaatttgactaggaaatgcatatatgtcattaaacgttgaatataagctttaacctattgaaatccttagtggatatatgtatttactattttcaatgtttgattttcagaagtgtgttcacaaacattttttggactatagctaagattaccatttcaaaaatacaatgctccacatttttgtatctttaaacattaatggaatttcacagcacacttctgttgaccctcaagatgactgtttccactgtgcagatagagaagctgaggcatgaggctatttctgtacattttctaaagataccccctgagccagtggaaaggaagcctgagacagaaaaagacttggtgtcctcactgagaacacatcttgtatgcatctgtagtcttgggggagggtagattgcaaaaccagagttggcttttcacacatgctcctacactcctacaaggaggtctttgtaaaaatgtgtacacaaataaagtgggtgtcaaggtgattaccaggatgaattttcactggtctggaatgccttgagtatgcttgatgacaagaaggtagattagttggcttttcaaggcctttctaatagttgtaattctatccagtgggcaattcatagatgaaaaatatttaaagtgttcacatttctatttctttttttttttttcctttacagatctatgcagttagatcagttgttcccaacaaaagcaataatgaaatagtcctggtgctccaacagtttgattttaatgtggataaagccgtgcaagcctttgtggatggtaggtatacctgtaccctgcagctgaagatgttagacttaaatattccagatattccatattttttccttaaatgaactgaatatcaattcattatgtgtactttaggtctcatagaaatgtgcgaggtttcacatgattgcgctactgcactctagcctaggtgacagagtgagaccccatctcaaaaaaaaaaaaaaaaatagacacactcaataagaatagaatttggaagttctttatctctcatttaaggaaaaaaagactctagatagttttcaaaggatattgataatagtgctactaatttccttgcctaccagtcattccaatttaatattaaatgtgtccttggccagcagtgactcacgcctgtagtcccagcacttcggaaggcgaaggtgggcagatcacttgaggccaggagttcgagaccagcctgggaaacatggtgaaaccccgtctctataaaaaaatatatatataaattagccaggcatagtaatgcacgcctgtagtcccagcttcttggaggctgaggtgggaggatggcttgagcccctgaggcagaggttgcactgagctgagatcgcaccattgcactccagcctagatgacagactgagaccctgtctcaatagataaataaataaatgtgtcctttatttgataccattcttatgaatggaggataatgtattttggtccttatctggaaagtcttctcacttctccaaccagcataatcctacttggctttatgactggaattcttaaacctgatgcttatgtagtctaagaggactggtttattctttaatatctttagtttatgatttttagattgccaaattaatcagaatatcagtttatcttatctatctctaaaatctttttgctttattttaaaaattttgttgtttaggtagtccattgccagagatgttataaaatctaaagtctcaggaatacgtttatcctataatttacaacgtaatgctttggatttcctgtaaattttgggaaattatcctcttctaatcaaattaaacaagttccagttttgaacaaagatctcttacttgtcctcagttatcatatgtcttctgtcctggcattagtttctattttgtaaatatgggcaagctacacataatctgtcaaataaggtcaaggaagacctgccagcacatttctcagttgtatcctatttacagtttgtcaaggacagtttgatttacttattttcctaggagtagaataaccttcttgagtttctaaaagtataattgcatttcagggcaaggtcttggaactaagcaatatgctcacattctgatatcagcagtcaaggtttagggtcctaattgaattagcaaatgattatcattcagtagacctataagcaaatccatggtgcataacttttctcactgttttttcctgcttcatatactaagagatacataatttttagtcacaagaagcaaatagtagagaatgcagtattaatctaactttgcagcattaggtgcagtttgtctcaaaaaatatttggaaataagcatatcctggatcagatacagtctcttttcaggttttacttgccaacatcacctgcatggaaaaaaagctttaggaaagggtaaaggctattatccccattcctccctacccccacttggattgaggccccccacgttcctcatcatgaaagtttttattgcagagtgatcttgatcagatgcacagtaactgatggactgtcatcaaatctgtttgtacttaaacagagcaccttgcttgtccttcttgaaattttcaccttgtcagtgttgagatctcattaataaagctcattgattgctgagaagcctcatgagaagtcattttggttggggagcagtaggaaaacttgatttaaaaatactgggtgccaggcaggttcctcatacctgtaaccccagcatactgggaggtcaaggcagaaggattgccaggagtttgagaccagcctggacaacatggcgagacactgtctctacaattttttgtttttaattagtctagagtggtgacacatgcctgtagtcccagctactctggaggctgaggcaggaggattgattggacccaggaagtcgaggctgcagtgagccatgtttgcaccactgcactccagcctgggcaacagtgtgagaccccgtctccaaaaagaaaaaaaaaccaaaaccataaaaaaagccaaacaactgacagtcaaaaatatttgttaggagtcatttatgaggcatacagaaagcgctctgagtggctgaaaaactccaagccgtttcagtataattaaaatttaataataacagtttcaaaatcctctgtaaatatgggtatttcttcttcaaaattagtccctaaagctcattgtccaaattacaaatagaatgtatatcaaaacatgaaaattagaggactaattgaatatggcagttgtgaaagcaataagcaactcaccaccactttctgattaaaatgaacagtatttagcatttttaagttttagttttatttagaaaactgaagcgtagctataagtaagtactgccctaattattattaaccaagacttaccaagaaacttaacaaaagggactttctaaatttcttctaaaggaaaatgctgtgaaacattaattctctggacaaattagagaaagaccaacccagttaataaaaagtctgaattatagcttacttttaggtgcagtcttattatttcaagtacatgcaactcagacaagtctaagaggggcgttgagttggaaactttaaatagataggaattattagcctgtctaaacattagtcaaagccatatggccttctgcttatctaacagtgacagtagactcaataattaggaccctactaatttgaaatttattataaagaccagcctgaaatttatctttgtttggccaacatactccttttagagagctattagtatatttagattgtatgagaatttttaaaattgttaaaagaatatacttaaaagagctactctcttttagaaatactgtgcctatttatttgaaaacaactgatatcctcattaccaataacttgttattgaaaccaccttcagcacagtgggaatgaatgaatgaactttgttagactatggagaaacatggattgcagctggccagcgataaaacatttttttaatgtcttgtaatttaattaggcatttaatttatatataatttaatataatttgaatataatttaattaggtatcttctctgagtcagtgcagttctaccgatatatgtgaatgggatggacagaacctggggcccaacttttcacttaatgaactttttttggtttcaaggtagaagccttgtagaccacatcccatctctatccatgctaactctagagaaactaatatcattgtaatatgtcttcctcatccccctgcaagatgtgaacatatgaatagggacagagaaagagaaagaatggccaaacagaaagctgtgattcacattgttaataatattcagaatcccatatttggttcagaagattataggtatttttattcatatatcaaacagaataattttaattctacttatggcaacaaagctgctagaaaattctcaagatatatttcattttccgtacgacaatataatgataaaaaagtaagcttcatgtagtgaggcttaatattttgataaaaccaagatcatacagtgaattaaatgaaaatctgggaaataaaaaatgaaactggcatttttattaagataggatgtatcaaaacaaatgaaaaagccaaaaaaaaaaaaaaaaagctgctaccaagatggaaagacagagatgaattttgtgtggtgttttatgatgtgaatatttgttgaagattctttgtctttatctaggcagtgcaattcaagttctaaaagaatggaatatgacaggaaaaaagaaggtaagattaatattgattgtaaattggtaacatcttcaatcaaaaccttcatggttgttatcattttaacaaggctgccaattttttgcttctttcaagtatgttaatatatacacccagaaagcttccaaattcatgactctcggaaattagcagatactctcagatactctcactagtaatgcccttattttctactcagtgtttttaacaaccaggtgtgcttaagaagtcccagagttgttctcttttttaagtataaaggggagcccagctggagaattcaaaggattcaaaacattaacttgcctgaacgtatcctgtagcacaaagaaaaaaattaaggagtattttaaagatacttgaaaacttctaaatatattttcacatgtttttccacctgaaagaatctgtccaaggctgccctgagatgctttttggccgaattctaaggtagatcattaataaaagaagaagaaaagaaaatgccttagaaccatagtaagtaaggggctttcttgaacactggcgtactgctctttgagaacaaagggaaggggattttactgtgtcccattcaaactggtttgctttcttgtcgagtcacaaagggcctgggatttctgggagctcgtgagatgcgtctgtgcatacacactagcaaaagtgtgccgctcctttcaaagtaactgttccactcattcctgctatgacacagcaaggccttgtgtttcggatttcccaggatatagtacgccagtctacccttcccagtgggggaagatcacaggcctgcaaaacaggttctgaacaaacaataacacagtattactttcataaaacccgaagattactgaaattacaggaatcatcctttccgtttttctcctcctagtttcatgtagagtaggaaaattatgagttttttttttaacctttgtatgccaccatctttgacaatctctgcttgtctttaatcatagcttcccaggcctctgtgtgagatgaacatgatttgcaagtgattgaaaggcagtatttagacttacatagaaaaatttcaaatgtgtggtttgggtattagatttttctgatgtgaaaaaaagagcagacagcagctgcagacccaactcattactgagtcttcctcctggaggttgaaaaggaaaatggtctcccagccaagtagatgtgaggcttgagagccagaagctgctgtgggtgttttgtgggaataagtgccactggccttgccttcaacctgggacacacacctctcacctaggaaagcacttactggggcatgattgtggttccaaaggaaaaaagcagggaggagaattgagaagaaaaaactgtttatttttacttcttttgtaaatgtgttgaagaacgaagccacgctgatgttcagctggcacgcactcattcagcaggtgggacagggtctttcttatgggtcggcgtctgttctgattggccggggctggtaccatactgcttgttgagtacactgagtatcaactgggtacaaagcaacatcaagtcaaacatataacataattaggaacaacagcttcttaattttcttgatattctcatgtattcaccattagagcattttaagagagatatagtaaaactccgcattttagactcttgtgatattggggggtctaaacaatttcaattgtataaaatgcagggtggttttatttcaaaggaaataaaatgaagccttgtaatgctgttcagctagcagccgagaggtccaggggctttctcaccggaaaagggggacttatatcactttggcattaccttgaagctgttgtctgctccagctgaaatattcatgggatggcagggcgcagtggcttgtgcctgtaatctcagcactttgggaggcagaggcaagagaatcacttgagcccagaagtttgagaccagcttgagcaacatagggagaccctgtatctacaaaacattttaaaaaatagctgcatgtggtggtgcatgcctgtagtaacagctactcagaaggctgaggtgggaggatcgcttatgcccagggggttgaagctgcagtgagctgtgatcacacaactgcattccagcctgggcgacagagccagagtgagaccttattaaataataaataaataaataaataaataaataaataaataatcatggggatgattatggatcctgtggctacctgggacttcctagacaatgacagcaattccaggaatctccttgttgactggtttctatttcagagacccaacctgaattttaaggacctaccttctgtgtcctcattttacaagaagaagttgcctgccttttccctagtagtcctcccctttacctctccttctgccgagcagatgggaaccttagtggcctccttgcctccccagcattcaccactttgagatgagagctactccccagtggcaggataactgaaatcaaattttttcaggatggttatcaccagattttactatagaacctcaagttgctcaaataatatgtcagctatttaagccattccttgttgtttttttcttccttttattggaaccttttttattgtgtttatgaggtgaaagtttatacaacttactataagaaagaagatacttaaattaacttgggtggttaataaagatgtaaatattcttcatccagtctataagaagagccaggaaccaaaaaagatagcatatcttattttcatctctcagattcaccttatatttcaagagtctgagttgaatattatgttctcatttgtttctcattctagaacaataaaagaaaaagaagcaagtccaagcagcatcaaggcaacaaagatgctaaagacaaggtggagaggcctgaggcagggcccctgcagccgcagccaccacagattcaaaacggccccatgaatggctgcgagaaggacagctcgtccacagattctgctaacgaaaaaccagcccttatccctcgtgagaaaaagatctcgatacttgaggaaccttcaaaggcacttcgtggggtcacaggtcagtaatgcttaagtaaaattgcttaggaaggcatagatgaaaagagcacaaagggagctcattggggctgctgttgatgttgttgaaaatggaaggttgtttttctgcagtgtgtacgattcagccttcctgaagccaggattgggggtgaaggggaatgtaacagggcagagaataaatgctcaatctagctctacaccaagtcagaggatttttttttttttttttttgagtctgggtcttgctgtgcaaggctagagtgcagtggtgtggtcatagctcactgcagctgcagtcttgaactcctggactcaagcaatcctgccttggcatcccaaagtgctgggattacagacatgagccaccacacttagccagtcagaggtcttttttaatggaaattccagtttaaagaaatattctatatagacacatttgctagaattcacctggggtaatgaaggaatagttgatgacaaaaagaaatgttattcaatgttttctttagaaagggcagaccaaattattttaactgctggtattttttatatgatgtgacagaacataatcttccagggtgttagaatctggaacattaattatttgtgctatagctatatatttattactcttcaaaaggccacttcctaatccactgtttgactttgggcacatcatctactctagggtcccatttcctttctgaaaaataaggaaactgcattggaatctactagatcagtgcttctcaatactatctgacccaatgccccatttttagaacaaatgttaaaataaatctcatgcataatataacctacctagaaacagaatttcaataaataaaaatataagacattcaggaaaaactaaaatagaaggctcaataaagaggccagatttttacacccacttataatgaatcactttgcaattaaatgaagtaaggcagtagtcagctggatattgtggatactgttttacatttgacatgtacagtaagagctcaatacgtatatttgtatataacatggaatcactgtgaatgcacctgctacaaatgcagtccaatttagggtaatgggtgtcagctctaatatcatggctgctgatgtggttttccacatggccaaaaattcttagtcaagttctaaacatcataaagtaccatcttcctttaatttatgcaatagttgaatcttggaaatccaaacaaatgttgtaaatccgtagtaaaactgtctagactcacataattatatatatatttttttaaaatcatgaatgtccaggggaacatgagaaagttcaggacacagattaattctttgttgtgtatgacattcccaggattgcaagtcatctagcatcctgccccccaaccccaccgccaacacacacacacacaatcattttgctaatttttaaaaatgcccgctcagtttttcagaatgcctcctaaaaggtggtagatcctttgatgagaatcactacactagttgacccccaaagtccttctagttataaaatcatgagtttgtagaatcagtggcgttttaaactcccgttatattcagagcactgtgctagatgccacagtagattcagagaaggatatgatatggtctaggccctgatggaatcacattctgatatccttgaagagaaggctataggttcactggtgagtttaaggtttggggaagagaggtgcagtatccgactgagtgctcctgggagatttcctgggagcattgggtattgaaggaccaatagaactgaggtggtaaaaaggatttggagggttagagagaagtaaagagaactttactgagtgccctcaggtattgcacacctgctatatatgacacactgctattctctgacaaaccaaagatgagtaagacacatccatgcctaagaaaagtttagactaccagaagagatggaggtgcaaacagaaaagcaaatggtgacatgtaccaaatcagggtggcagtgagaaggcattaaataactggcacactctgtaatacactagtaagttcttaaattgctcacaaagcacaaattttcttccagaaacacatttcctaacaactccactaatagtgctgaaactcatgtcatccttactcacttcatgatggtttcctaaaaccgaacaatgacaacaacaaaaataacctatttcattttgaatctgaattctccagaaatttttttaattcaattttcactgtgcctacaattttgagactgttttgatttatagtcagagcaagagaaagaaattaaataatcgagtggcagattcccaacttgttattgctttcacatgaattactttcaaaatccaattactcaagttgccattttgatatcaatcatagactaaaagcttagcatatatattttttcatttacttataatttataccttctttataaaacaatgtcagtaactctgtcaagtatatgacattaaagcaaatgcaatatagaagtgcctcccttcccagtggacagctgccttgaaagttaagtacccaccaggggaatgggtacaagggggcttttggaaaccctcacatgaaactttctgtgaagaattatttcttgcacagtgatcccattctcccttctgttttttaagtatagcatgaaggcattgaggtgtgttggtattatttgttaatgttactgattcattacaaatgtctgtgcaataaatttttctgttaaagagtaaatgagccaggcttggtgactcacacttgtcatcccagcgctttgggaggctgaggcgggaggattgtttgagcccagcagtccaagaccagcctgggcaacatggcaaaaccccatctctacaaataatacaaaaattagctgggcctggtggtgcatgcctgtactcccagctacctgggaggctgaggtgggagaatcacctgagcccaggaggttgaggcttcagtgaactgtgatcgtgccactgcactccagcctggacagcagagtgagtaagactcctcaaaaaaaaaaaaaaagggggaggaagaagaaatgatggtaatggaaggttagtagatgttcttgcaaaaggaagcaaattctccttattggcccttaatttcgttagcagcccatttgttatgattataaattttaaaatgagtttttagctatagtaatctgcccttttccttggaagataggttccaggacccctagtggatgcctgaaatcacgtacactgtttttttcctgtactatactatactatgctaaagtttaatttataaattaggcacaataagagattaaaaataaccaataataaatagaacaattatagcaatatactggcctctttcttgctctctctctctcaaaatatcttattgcactataaacatccttactgtgatgatgtgagatgataaaatgcctgcatgatgagatgcgatgacactcactctgatcaccaagacagccactaaagtgacgagtgggcaggtatcgtatatggcatggatactctggacgaaggcatgaccacatcctgggtaggacagagtgagatggcacaagatttcatcacattactcagaacagtatgaaactgaaaacttaatgagttgtttatttctggaattttctgtttgctatgtttggaccgcagttgaccatgggttactgaaactgtgaatatgggaggactattgtagttagattttcctgccttcaaattatgaaggttcatcagaaagttgatggcaaaactatctaatggctttaaaatgcttgctcaatctactggcaatcgcaagagctctaacaggtattctgcagatgagtgttaagctgtagacactctgtaccccattttgagtagaatgttggaactagagaggatgagagtgaaactttaatcctggctccccactttataactgaagaaaccaaggctcctggattgagaagttcagaggataaccctcttgaactctctgtagtttgcaaaaggctgactcaaatccatgtaattttatcaggtaatggagagttactgctaaaaccatgggttacctaactcctaaaaaaaaatgtgtaattgaaaaattagaaaaaagtcacaataacaaagccacataatgatattctgtgcttgagtgagttcacagcataagcctaaaagaaatcgccaggctactatagtggagcatttatcaagccctccaataatgaaactagctcaacaaagcctgccctgaatgccccactgggcaggaggctgtgaacatgtgggatgcgtgttttatctttttataacaccttgacattcaggatctctctttttaaaagtcttaaacagaatcattttttggtaggggaaaagttagctttaagatatatgcaggtggctcaggggtgttagtgtgacttcctacatgaaaaatcaccaccaaaagcatcatcatttcaggctgtaaatatagcactgtcaagtgggacaatgctgtgtgtcagcagatcgtttagaagtttaggagtatgttttaagcctgagagtagtttttttctgtatctcagaatttttaataacagctcaaattggatcttttacataatccaatcaaaatcatcctgggctcaaatacaaaatcaggcaaagagtagatcaagatttatttttgccgagcgggcacagtggctcacacctgtaatcccagcactttcagaggctgaggtgggaagattacttgaggccaggagtttgagaccagcctgggcaacatagcgagctcttatctctttaaaaaaaaaagaaaaattagcttggtacggtggctcatacctgtagtcccagctgcttgggaggttgaggtgggaaaatcctttgagcccaggagtttgaggctgcagtgagctatgattgtgccactgcactctagcctggggtacagggcaaatccctatcacaaaaacaaaaacaaacaaacaaaattattttactaaaagtagtgccaaggataatacttttttctaagaccctatctaaatgtctaaagcacatgttgaccttagggtctaattttcccaaatgttcctcctgccctatgcttcctgaggctcataagctaaaatgtatagcatttacttgtctccacttaggccagaataggaattcagattcctctcttgtctttaccccactggacacaattcccattgaataggaattccaggagcaggactgtgggccatcagcagcttcccagagataaactggggcagggctttccctctcttgagctcctgttgctgacccagcagccggcctttatgttgcctcctcgtgtaaagcatcctgggaaaccaagtcttcggtccctgttccttggaacagaaggctccatgccatgcttgctgaccttcacgagctggactgtacagcctgccctgtaccacaaagcaggaacagccctgtcgtttttaccttagcaatgcagattctgtgcttgggcgcagcacctgcgcagagctgctttctcatcctcaagtgaactgaaccaaatgtgagagaaaggctcctgtgcctttagaatgttagttccccccgcccccccccccccccgccatttgtgcttcctgtaacaaacaacaacaaaaacacctcaccaccatttcacagtatcattgtggtaggcggttccccacaggttgttcaagcagatttttttatgttgctgttggtcctggcctcaagattacctcccctgcttctctaagccctatattggacagaggattagcaaagatcaacaaaaagaaagcagccagcttagaactttaatagtaaaagtcaaatgtgtgtatctaggatttcagcggtgccagctctcaaatggaagcaatacaatatcacagctaagaacccgggctttagcgttagacatgtttggtttcaaatcttggcctcatcacttatgaggtgtgtgaccctggacaggttaaccactctgcatctcactttcctcatctgcaaaataaagaacattcgtccactttacaatattgtggtgagcagtaaatgagatatataaagtgattagctcagcatctggaatcgggtaaaccctcttatcattcatttatccattgagtaaatatttttaatcatccaacatgtgtcaggaattcttctacaggaagcggacaagacaacaaaggttttgctcttggggagtttacgttctttggggtcgcgggggatggggagaagaggtagataataaaccagaatacaactgagttaccaacataattctagagtgtaataaatgttataaaggcagcatgtagaagggcagctggagagtgcgtgtatgcagcaattccatagaaggtcccactgtgacgtaagtgtctggagacattgaagctaagatcccagtgcttcaattcaggctctctcatgccaacttacagtggtctgaacagccagtgttttatctaaacttttattaagtaccttagctgaagcccttatagaattataaccataggtttttacttttttttttttttttttttttttttgagatggagtctcactgtgttacccaggctggagtgcagtggcgcgatctcagctcactgcaacctccatctcctgggttcaagcgattctcctgcctcagcctcccaagtagctgggactacaggcgcatgccaccatacccagctaatattttgtgctttgagtagagatggggtttcactgtgttagccaggatggtctcaatctcctgaccttgtgatctgcccacctcggcctttactattttttgttattaaagatctaatactctattaacatatatataactgatgttaagtactatcatatgagcatgcatttttgaagtttatattttggtcaggcacagtggctcatgcctataatcccagcactttgggaggccaaggcaggaggatcacttgagcccaggaattcaagaccaggctgggcaacattgtgagagttggctctaaaaaaacttaaaaattagcagggtgtggtggcccatgcctatactcccagctacttgtggggctgaggtgagaggatcacttgagcccaggaggtcaaggctgcagtaagccatgatcacaccactgtaccccagcctgcgcaatgaagcaagaccccgcctcaaaaaataaaaataaagtttatattttaaagcacataattactattctcattcatctttaatttaaatacttggtattaattcccatttacagttgtgtttttctcagtctcaacctcagcttcaagtaacttggtatcttagattgcatttgcagtgacttagagctctgcttcctttctttatgtatgataaagcagaaagagacagacacaggatgtagtgataggagggcacaggaaacataaaacccctcaggtatttttcggtcacctgggctctcttctctttctcattcaagagtgtttttgctgcaactgtacagcaaaaacacaaaactactcatctctgaatagctgatacctttataacttcccacccactccttgttatggtgatttcagttacaaatggacttaattaaatggaatgtaccacttacaaagatcaaaaggctttcaaaaatttttcttaagatttttgaacaaagatttaactgtttctattaaaatgcaataagatggaaactctgtttcctctgatgtgattattatgcattgtatacctatatcaaaatatctcaagcaccccataaatatataaacctactatgtacccacaaaaattaaaaattaaaaacttttttttaatgcaataagaattaaacctgttttgcagagaaataagacagtggaaaaaatcaagttatacatatacatatatattacatacatatacatatataacatgcatatacatatataaaatatacatgtattattatatataataatatacatatatattaaacctattaaggtattaatgacatataagatcttgtaaagacagtgaatgtaaataaaactaaagatgttattccagtcagaaagttaccacctttatgccctctgagctcatcaagcttcataggatttgaatgaaataataaagtatatctgtatttgataaagacattatgagaaggcagaactgacattgtgtctgctgcataaacctgtctattttggtctctgttccaaagttattgtttccccaaatttttgtttattaccctgtcatgtaaagatagaagaatgatgaaacttgcaaatcaaagtatataataattatgagagaatggttttcttagcctgggcaacatggcaaaccccatctctacaaaaaatacaaaaattagctgagcagggtagcaaatgcctgtagtcccagctgcttgggaggctgaggtgggaggatcacttgagctgggggtcgaggccacagtgagccgtgatcacaccattgcactccagcctgggtgacagcgagaccgtgtctcaaaaacaaaaaaaaaaaggagttttcttgaggcttcatcactagaccattattctgtaacatcttcagagagttacctttactccctgtctccactcttcacctccctctcactcatcacctcattgttacggctttcagccccatctctccaaataaactgctctaggtaagctgttataggtaagtttagcaatggcctccatattattgaatctagccattgttttttaatctttattttttccctttagcagtattcagcattgttaaccaccctatccttaactctatcgtttccctgtggtttctatgacatgacactctcctgattgtgtccctctgtctttactgcttcctctctgttccctttggaggtcattcttccttacctggctgttaaattgctgaagctccctagggcttgtttgatctcaggtccttcatcatataaagctacacactgtccttagattatttcagccatactctagctttaattatgtaagatgactcacaaactcatcttcctagttctggctacactctgaactccagactcttctttgactttttcaccttgatatttcaaagcacttcaacaacatgctcaaaacaaactcatcatctcccttcccagtcgtggctctcttttagtgttcccgatcctagtgcaccacctatccaattgtgcaaaccagaaatctagtcatcagtcatgacatctccctctttctcactccccatttccagtctatccccatttcctgttggttttcatttccatgtatttctagaattcattcattgctgtctcttcccctgccttcccaccaaaactaccatcctcacttgcctgcactgcagcaatagtccactcattaatctcctagcacttacccttgttcctttgtaaatcattctctatcctgtaatcttttcaaaacacaaatctgacctcttacgataaagacaagaagacttaccctgtcctgcaagcccagcatagtctggcccctgtgtcccactccaccctccttgcatggcacattcgttcttgccctctctactttagctatgctggtctctgtttgggccctcatactggccatgtgtatcagtcaagatcaagtcaggagataagaaccatactggttatttgaataggagaaatgtaatgtaaagcattgttaattaaaacagtaggaggttactaactactagaaggggtaaaagaggaccataaggtgtccacatttagcatgagagcagttactatatctgtactgaagaaaatgagacaataaaggaactaaggcctaggggaggcccccaagccaagactgagattctgacctgatcgaagaaggtgtgtggctaccagaggaacgtgcagccttgtggtggtgaagaaacttgtcaaagggcacagactgagctcttctgttaagaggctgccattgccagagggtgtagatggattggagctgctcaaagccactgacagtggcgggaggtggggaatggcacgaggatgtaggttggagctcctctgaatggctgctgggttcctgtgaataataataattaataataatagagatccagaaccccaaagagagatatactcctgttcttatggccttgcagggtcactttattgccatctgctgacatcaaaagttaacattctactagctggcaaaagagaattgcttacagggtccagctccagtatcacaaagtagggcaagaagagtagatctggagccaagagacactataacttgataactggcacacaatgctttctcccctacaaatgtagtcactgcttggagtacaatttcccactcttttcaactagttatttcatgtgatttcagatgagatcattcagatctcaccttaggtttacttccttggggaattctttcttgatatccccaggtcaaatatgccagttacagatttcagaacactatatgcttttctttcttaacaccacagttgcaatctttcatttgtttgtatggtggtttgatttacacaccttcctattaaagtgcaagttctgtgacgacagagaccacatctgtctttcattaccattgtatttctggggcctggaacaaagatgggcactcacacaatcctttctcattatctctattgaattattaatgataaaatacatggagaagtgtaggttaattaaatttttgtaagttgctatgttgctttttaaagataattaaatttttgtaagttgctatgttgctttttaaagataatcatggattttgtgtttctgggtttaaaaagactttacactaattgaggaaatttgaaaattcagtaaggtttgaggaaaaaaaaaaggaaacaatcctgccccccagaaacaaccaccgttaaattttatttcagaatttttaaaatgcacagatatgtagattttttttaaatgatattaaacggcctgtgaacctttgtattctgttttttacttaacgtgagattatgaacattacttcatatcattaaatgttctttaaaaacgtgatttaaatatctgcattgcatgtttatgaatgtgccatatttcttttaattgttcccaaactgttgtccgtgtgaattgtttccttttttttttttttttttttgagacagagtcttgctctgtcacccaggctagagtgcagtgacatgatcttggctcaccacaacctctgcctcacaggttcaagtgattctcgtgcctcagcttcccaagtagctgggattacaggcgcctgccaccacttccagccaatttttgtatttttagtagagatggagtttcgccattttggccaggctggtctggaactcctgacctcaggtgatctgcccaccttggcttcccaaagtgctgggattacaggcatgaaccatcgcacccggcctccattgtttggttttataaagaatattatagtgaacatctcttgtatatagatttgtgtgaacaaccatgattatttccttagcatatattcttagaagtagaattattgggttcaaagggtatgaatagtttttaagttattaatatattactgtccggaaaggttgtactaatctcattgtttttacttttaaaactgattggtagagggatggaactttttaagaagtttcttttccatttgtattttttcttttgtaaatatttaagaacacaaagatcaattaccaaagaactaccaattgtattatcaggtatcaagtatcataaaacaccatcacattcacataagtactttttaaagaatggtaacttgctttaagtaacatagacattagcaattttagacataattttacaacaacaaagttatgctttgtttctttatcagtttcttccaaatacaactactttacaatacttactcaagatcagatgatgtgctttgctgcaattacctgtgtatagaagacaatgaaaccatcttaactcaaagggttaaaataattattttagaactattctatgtttaatacattccttacagttagatttgaattcttaaagttagatttgaattctttcttcagtctacttataagtatatcaagctttcactaaaaagtaaaaactaaagagaaaacaatctttttcagaaactttcaaatttgaatacacacatggctgtacatacataatgaaaacttttgaatccaagtttatatatttcccccaagaggagggtttgttttctttggcactgctaacaaaaacaaccagcacaattcatttattgtataaaataaattaagcacaagtaaagtatataagttgatactaagatttagtaaccagtaagttgatagttttcactgttggcaagagttaaatatgaaaacaattgcaggcactgcagctgagtgtaaatggtacaacttgactgaaaaataatttggcaaagcatatcaagaacttttcaagagaaagaaaggcatgaatttgtattgacttcataacaaattcccttaaattatagtaaagaaatttttaaatgtagaaatccacaatactgaaaaaaatgagaaaagggtatcagtttctacaagaaaggaagtagatggaaggggctttattgatgaatcagatgctgcagcatagaatacagagggaggagctttggtggggaggaagatgattgccctgcagaaactgggggagccctgggttcagagtcagcacatgggatggaaggcaagctcaagaagaggagtataaagcagaggaattaaatgaaggtattttaaggaacagtgcactatccccttatcatctcttccatcccccaacttgttcttttagctgcctaacatttatcctcaaggcaaaaagggaggaagagagtgggcagtgatctgcaagtacattagtcacccgttagaacaaaagtcaaaaccctttaaaggaaaagaagaagatctagagtttctcaatgcatcatccaaaatggtcagtgtccaattttaaaaattactagacatgggaaggagcaggaaaatgtgacctataatgaagagaaagattagtcattaaaaacagacccattaacaacacagaagttggaattagcagacaaggattgctaattaaaaatatgttaagaattttatggaaaaagaagatggatatataatggatgaagaaaaagaaaatttaagtcatcaggtgtgcttagcaacagttcagacgatgaagaagaaaggatgagtgaacttaaagacaagtcaaaagaaactatgccaactgaagaacagagagaaaaaaagtaaaagaataaaacaaagccagagcctcagtgacttaaggaacagtatcaggcagtctcacataggtgtaattagagtctcagaaggagagcaaagaggaaatttggcagggagaaggaggaagctatgaagaaataatggacacagtttatccaaatttgatgaaaaacaacaagcctcatatccaagggtcatttcatagtaatatgttgtttgattgatcaaaaagatataacacctctaaatgtatgtgcatctaatgattccagatccatgaagcagcaatatatagaactaaagaaagcgacaaatccaaatccacagcagtgtagatcttaatatcaggttcttagtaactgatagaacatatagattaaaaatcagtaagaacatagacgatttgaacaatactatcaaccaacttgagccaattgatatttaaaggacaacacacccaacaatttcaagagaacatggcatttacattaaaataggccagttgctggaccataaaattagtttcaaattttaaaacaccatcttaagagtatggtgtctgaacacagtagaattgaattaacaatagcaataagataactagaaaatctctgaacatttaaaaattaatcaatcttctaaacaatccattagccaaaaagaaaatttcacaagagatatgagaaaaattttgaactgaatcataatgaaaatataataaaccaatttccaatatcagggataaaattaaccctgacttcatttatttaaaagctaacaggatgttataaacaactttatgccaataaatccaacaacttaaatgaaatggacaaattctttaaaaacacaacttaccaaaacagacaagaagaaatagaaaatctgaataacactatgcttaccaaggaaattcataattaaaatttccaggcccagatgacttccttagtgaattcccatgaacatttgaggaataaatgtaattgcaatcttaaacagtttcagaaaatagaaagaaggaatacttcctaactcattttatgaggccagcataactcgtatcaaaacctgacaaagtcattacaagaaaagaaaattacagaacaatattgttaatgaataaagaagcaaaaatcctcaacaaaacattaacaagtgaagtaaacaatatataaaaggataatactgcatgaccaagtgggtgtggttaataatttcaggaactcaacatcagtttaacatttaaaaaaatcaacataatattattaataaaataaaggagaacaataatatgatcatctcagtgtgtaaaataaaaaattcacttgacaaaaactgtcagcaaagaaggaatacaagagaatttttagagtctaataaatacatggaaactctacagctgtgtaatacttgataaaatactgaatgcagtttccctaagacccagaacaatgcagggatgctcattctgctttgtagctaggattaataagacaaggaacgattggaaaagaagaagttagacttcattaccactgtcatcattgtgtttgtagaaagaaaatcttaagaaatctacaaaaaaaaataaagctgccagaactaataaggacattagccaggtcgctagatataagttcaatatattaaaaagcatttgtattcctgacattttggaattgaaatttttaaaaatgctataaacaataacataaaaattctaaaacacctaggaataaatttgactgtagatgcacaagactctaagaactataaaatgatgctaaagcaaattagaattgaaataaatggcatagtatgtcatgtcgagggtcaaaagactcagtattgttaagataccgcatatccccaaattgctttatagattcaacacaagtccaatgaaaatctcatcatattttttgttgaaataggcaaattgattcttaaatttatattaaaatgcaaaggacctaagatagtcaaaacaatcttgaaaaagaggagtaaagcagttacagtaactaggacagtgtaatggtggtgtgagaactggcagctagatcggtggaatagaatacagtccagaaatagtcacgcatatagtcagttaatgtttatcagaggtaccaagacaattcaatgggaaagttcaattcagatttactctggtatcctcttccattattttttcacattttacatactagttattaaggtcagtctatttctcatttattgcctattaataaaccagagctgatacactgtgcactctccatatgtgtctgttgaatccttgaatcagaaaccaacgtgatactcaggacattatataccatttgtgtgtatatacaaaattgggatttggtaagtgttttcaataaaaggaatgctcacgtaatagttaaattcaaagacacaaacttctaggagccatttttagatacatggacaaggattaaattaaaatgtatacaatttttattgaaatctaggcagatggtgtgtttccagagataacttttctttccaagatacggctactgtggaatctaatatttgatgaatattagataaagacacagccagagactcatatcaaacgaggctccctacaactggaagggccgtaggcatgcatagcactgaagtaacactgattcattcattcagtatttattatgtatctacgagataccaagcacatacagtaatgatgaacaagacatacatcaccctgtcaccacttttctcatgtagaaattgcagaggatattttaaggcttcactaaaacaaatacccttttctagaatataaattagtagtgattacacactgaagatcaaaactctcacactccttgtgtatcctattagtgttatccaacagaaatttaacacatagtatgtatataattttatattttctggtagccacatttaaaaagtgtaaacaggtgaattaaattgggtaatatattttatttaacttaatgtatcaaaaatatcatttcaacatgtagtcaatcttttttaaattattaaagtaatattttaaattttttattttgtactaaaccttcacatttcagcatatacattacacttatagcacatctcaatttggacaagccacatttccagtgttcaacagccacatgtggccagtggctaccttactggacactggaggcttatgtgtgaatcagcccccattgagctacaacctgttgaagtttacaagtggactcccgataaatggagagctgatggtatttctggactataatgttagaggaaagtcactggatacagtgactttctgttatagctctataacgctccaccagttttcatctgcaagagtcccagagttttactatatttgaagacagatctatactaaagtaacactgatacattcattatttattatgtatctgcaagatatcaaacacatgcagtaatgatgaacaagacatacatgcatgtcagacatacatgcatatatgcaaatatgtacaagtggtcttgaagattttaatgttcagtgatttcactagtaatgagacagcttttgaggacctaaaaaaaatctctactcacatttctcaattgatatctgatggggaatgttgaaacgaaccagtagaccatatatcagttctctgatacacaaataaaatgttttcagctctaggttaatgagcctatgctcatttgcatgcttggcttccatttaaaattcttttgcatttcattacaataattttttccctctgctctaaggtcattgtttccattaagttatagtataaatccccttattttcaagaatatgatctctttacgacactatacacgaagatctgtgttttaaatttgatatggtttgaatgtttgtcccctccagatctcatgttgaaatgtgattcccaatgtcaaaggtaaggcccagtgggaggtgattggatcatgggggcagatccctcatgaatggtttaacaccatccccttggtgataagcgagttcttgctcagttacttcatgtgagatctgcttgtttaaaagtatgtggcacctctcccctcactctcttgctcccattctcaccatgtggtatgctggctcccagtcatcttctgccatgattgtaagcttcctgaggccctcaccagaagctgagcagatgttggcatcatgcttcttgtacagcgtacagaaccatgaaccaaataaacttcttttctttaaaaattacccaggctcaagtattcccttacagcaatgcaaaaacagcctaacccagaattctcaatttatagtatctcatccagactgcctctcaactggaatttagagaggtagtgacttggaaccagtttggacgtgtcattgttttaacacaaatgtttatagactcaacataaaattagttttttaatcttttacagtagggtttctctgggtggctggtaccacccatctccactccaacagaatcacctggggaggagaagcctgggcccacagctgaactggaatctctagaaatggtgttcgggaagttgcatgtgtaataagtaccaagggaaactcatttcacactgaagtttgacagccagtgccttatagtgaagttctaccttaatatcactaaggataaaattgcatactaccatttgaatctgttttattactggaggaaatgctgttttcagtacttatgtactttgtttactacctttgctgaacattttgtgtactgtgagtaaatttttaagggtattcattcagctcatagaaagtatgttgtgctttcttgatatgtaagttatgaatgatggattcaactgaagtctaattatattgatcatgaatggactaatgtctaaaatcaaattgactaggacctagatcatattcctttgtattttttcaagtgtagtctctgactgtgtcaggtaagatattcattgttttttatttttttctatgaaattgtttcaaatgtactttaattagatcataattctacagaaagccatcgagccagacacaagtactagggcttcaaaacagaattgaactcagtgtttgcccttgggaagattgcagcctctgcaaggcaggggtgaggggcagatatggaagccttgtgttaaaatataaaaccgtggtaccatggttttaagtaaagcaaggtaccatgggagtagagagaagcagggcaagggtgactatctgaaaaggctgggttttacaaagatgactgtgttctgtttgagtgcaagccagtcagccagacaagtgaagacattcccacaaggtcacccaggacataaggaataccagaacttggttctcctagatcaaaactgcactcatcaagctttctacaagaacctggccttcaagagcacactggcttcccttttctcacacccaaaactttctctggtagtaagatgttaagagtgatacatttccgtttcaggccactaacatgctatttaattcattccagcaataactaaatgggaacctacctttaaaagatgccaaaagcaacatcctgctaattgattgccacatctattaaatctccagagagaatctgactccctagattttaaatatagttgagatattatgatgatgttttctgatttaagccctccataaattagatgcaatgattatagtatctgttgtcacttcatttttgctctatctccagtcacgcttctgccttcattaattcggaatgaaatatcacaagacattaatgtagcacttggagataggagggctacatttttatagcctcaatatgaaattgtacttaaaagactcataagcctttactggaatagcaggggggaaaaggcactgctcatcttctataagcctcttaataaccttcctggatagttatggatgaggaaactagggctcagagatgcccagggtcactctgcaagtaattaccagagccaaaacatgcccaggtctttctactcaaaatacaaggctcttctagtacaccctctaatcttctggggattcttttaaaacagtttcttgactgtttgcaatgaaaggcattattgccaatatgtaaacaaaaacaaaaatcttggcatcctccatcactttatcgtcagtgtttttagtttatcacttcacagtcattatttggtgttttcttacagaaggcaacagactactgcaacagaaactatccttagatgggaaccccaaacctatacatggaacaacagagaggtcagatggcctacagtggtcagctgagcagccttgtaacccaagcaagcctaaggcaaaaacatctcctgttaagtccaatacccctgcagctcatcttgaaataaagccagatgagttggcaaagaaaagaggtaaagtgatttcttttgcacaaatgattcaacatattttgcacatacagaaaagtgccagagtgacagaactttccaaaagatgctgcttagtgaagagagatgcacatgaaattgcatttttttttctgtgacccacatagatggaaaggcagaggtgattcctcccatgtaatcaaaggtcttgaatatttaaatagaattacatctcctttctctgcccctctgagaccattcttgttgtaggcatggataaacttacaccacaagtaccttctatcctaatatcttataaagcaagtgctcattcaggagctcttttaaaaatgtaactgctaaaagggactcatgtttccctgatacacaattgcttgacttgcattgaacaaagatgagtctggaggctggtatatgttcttcagatatggtcttcccaatgtaaattcagttctgtgttagaatttacacacaatgtaacattgaaagagggttttatatttgacacgctggatttttatgatttttctgagcttggatatacttgatacgtaactggtattaaaaatgaaaatcacttcctttctgattcccagaagattaaatactattcttttcattcagcctcagttgtatctgatttccttggctttggtttgatctactttctcatttttcttgagggggatttctttcttctaccaaacatggcctgattgtgataagtacaatctgcctgtttgtgatgtactatctgtagaccctggtgacagttgcaggaaatcaggcgagatgggcacccatagagctgctttcaatgctgctgctctaattacaggcctggcttcggatgatggggccagtgccagcgtacctggcattgatgccccatcctctctctatctcatttgtacctctcccagtctctgtgtcattttcctcttccaaaagccctgctggcttttaaccacgcaaagtggtgtttatagagagagccagcagcacaaatggtctttagacgtatcagattctaaggcactgcagtttgtgatagaatataatgatgacagcctccttccaaagagtgcaggagacaagcgtaccccagatggcccagtcagagaccccactggtgaaatcataacagcctcaggtgccacacaagccacccacactgggttacaaacattctcctgatggaacttttactagacaaaagatgagtccctttttctggtgggctaattgctttgttttgttgtttagcttacaaacaaaggattaaatgctcaagttaataatattttttgacatcaattttaggcccaaatattgagaaatcagtgaaggatttgcaacgctgcaccgtttctctaactagatatcgcgtcatgattaaggaagaagtggatagttccgtgaagaagatcaaagctgcctttgctgaattacacaactggtgagtgattcaacgtaggaaccataaatttgtgatgcttgagctgttccaacaggtaaaagtatcagatggaaaacgttgtttatttaatacataaacatcacagaataactctccagcaaattttgttaagccctgcaggcagtagcatgtatcttgggaataaaaaagaagataaagtatttgaataaaaagaaacctgatagacataattcactggagtttgaagttggcccaaaactatgaatgatgtaaaacaaaacctcaacaaagaataaaacctcaaaaaatagtatttttgacaaatccctggaaggctaatatcatgaatactactaggaaaacaaaatattttccagcactataattataaaataagaagaattcccttaacgaaattcagaaacatctcacataagcttagcaacagagtcccattcttgggtatctttaagactagaatttaaacatggtgcatcaatatggttttggtcctgccttgcccttccctgctactgattttgatggaaaatgtttgaaccctgtatatttgctcatgtctacaattgaaatgatatatctgttaataaaggtttagttattaacagtagaaaaatgttctcagcgtatcagttaggtctctttcagtttggagtggcagaaatcaagtcacagaagttaaagacaaaagagaatttattggctgatatacatgaaaattacagaagtttccttcagacaaatttgactgtaaatcctcattatgttatcaggactcagtctgtctcaccctctctccttcctctctcctggtgtctcccacagtctcctagctctgtccattcttggcttttttcttaggcaccatctctctttgtggtagcaaagatgaccccctcacagctgccagattacataatccttagccctctgatgatctgagagagggcttcatctgaaatagcaaaagtccaaaggctggcacatatccaccatgcccaagctcattaacatattctctatatctcattggcctcccgtgattctagaatttgatcacttcttctgcatgcttttcctattccaggtccttgctttgacattgatgtgctttttagcagaaactgtgtgtaaaactaagaattaagcttaacactaatctaaaatgcatgaattttaaaccatctgctatgtatcatataagatcctaagggtgcagaagacactaggaacttaaaagaaaactttctccttcagttatcattcagcctctcagaggccctctgaggggaggattcatctacctccccccaaccccagtcatggcatctggatgtcaacgaaagtcttctctgtttgatcatattataacctaaccaattgttgaaagcaactccaagaatatgtttgagtacctagagaaattaaagatgctatacaaatgaaaattgttattactattattttatagttttataactttccaatctgtctttaggtaagttaccttaacacttagaagtacacccagcttccagggctgttctctagagccagggtctgcagactttatggggccaactagtaactatcctaagcattatggccttaaggtctctatgcagctacccagctctgctgttgctgctcaaaggcagccctagataatcaaaaaggctgtgggccagatttggctcatgagggtcattgtttgtcaacccctgtctagaggcattagttagctgttcagagaagaccactctgtcttactctttagtgtggccttttagaataaactcttcctctgagccctctgtgtgataccttccatctgagtgactcatatactaattgacaaagtgtagcaatgccctcaaattacctctctcttctccagctgctctgagtacttcttattttattttatttcttagtaaaatgaacatcacatgggtcatgagacatcttgagatttataacagattctgtgagagttttactcctcaagagctgaaagcgtggggccaggaaagtcaacacccaaggaaatagtatattttttctctgcttgtaattcatgttgtgttttaaactgatggaaagaatcacttctgaatgagcgctgccaagtagtactgctgtttaaaagccacctacttaacaaaatggcactttttctgcaaaccaaagaagacatttagatcaaccattttggtatgccattgctataaaatgagtaaacagcaccacttattttctgatctaatccttaataaaagtgatcccacaataattgcataaatgttaacttaaaaataaaaccaaagtgctctttaaaatcaactatgcatgcctgccaaacagaaaaaccttgcctctgttccaaatgagcttgcagcccagcaaacatggtgacatacttgaataaagcctccctcttgttttctaagaggaagaaaatgaattttagggattatggtgctcttgaaatatcaggtcacaaaattgaagatggcagcttggaaatttttgttaatgaaattttcctattgatggtgaaatcctgcattctaagcattagagaaaactttgagtgaactataggtgtgttagaatgtactcattttaatgcagttgtagcctcaggattacatcatgaggcatatctagatttggaggacatgggataagtcctgtggagatttccagaaagaatgccagttctgagagagatgtcaccgcatgtggtgcacaagcgacatagatgtataccttccgtttccagttcctcttctcctctccttgctttgggccacccagttatcctaaccacaaagtactcaacaagcatttcgtgtagttgagaactagaaactcaggtcagaaattctaaatattcactttgctaccaaaaagtgccagcataaggacctgagtcctgcttgactaaactccctgaaaagtactgctggaattcacgagaatgatgattttgagaggctgggagcaagctgttgtttgcatatcctcaataccaagcaagcacacatcaaggtaaaatgaacgaaatgatctctcttccaaccgggctgtgaagaatactttgttcagtacagttattgaagaaaaccactaagtagctaaaatgtaaaatcaaagttggcatttaagcaggatacagttacgtaggctgcatgaccataacagagcattctcattttcccagaaagaattagggatttgcgaggggaataaagatgatacaatgctctcacaatgcatcttaacagaaaataaattttgcgacatgagcatctgtgtgaaaagtcacatcaggaactaacatgaaacagctggtttcttttctgtatgattggcctcctaccacaactggaaaatattcatcctttggaatcatagctgccagatttaattgctttatatgcagactagtctagcttctcatcacaaatctgtgtctgtgtgtccaagttgattgtgaagacttaaaatgagcaataaaacattaaattcaaaaaaacattgaggaaggagaataatacttgatagttccgccatatgctggggggaaaagtattccaaaatagagctgtaaaaattctgttaggtgctattgtcaatttaacatctaattaaaagcaccctaagaaaatggaagacggtaatgagccaatggggtagcgtgtgtgctgggcatggggaggcataaagaggctctagagaatgggggctggagggagcagtccttttaggcagctttgttttccaagaggaaagggaaatctgtgaaagcatgtattctgtaccagtgggccagaaatgttcctatactttgtgtttcttttttcccgaagcaatgccaagtctggcccaagcagaatttgaaagtaggtcaggagtctcagctccccgcaccctgagccctggcccacttccccttcctctgccaattttcctgcgtcttagagtttcctccttcccaacagacagggtgaacctcctgctgccccatacaggctagggctcctcacctcaatcaagataggtgtttatagtggtgtctccatatcccttttctctttttttttaactatggaaactcagttatcttatgtaacttactaaactcatccctatgataaccatgtatcctccctctcaaagtgacatatttgcatactaacaaatgctctgttgagactctctcccccagccaaaagactactctaaaagtgagaatgtggcagggcaaggtggaacacacctgtaatcctagcactttgggaggctgaggcaggagtttgaaaccaatctgggcaacacagcgagaccttgtctctacaaaaagaaaaaaaaaatcagctaggtgtgatggttcgtctgtagttccagctactcgggaggctgagagtggggaggatcactggagtctaggaagtcgaggctgtggtgagccgaggtcgtgccactgcactccagcttgggcagcagagtgagaccctgcctcaaaaaataattaataataaaataaaagtgggacttttaggcagaagaaaaagctattttgaaataagttttatctttctcatccctcaaatccttctcatctgctactgaagccctgttgatagccaaggaaaatcacacacagattatcaatgtggtcaacaggtggccccacatacaaaccagatgtcaccattgacactttaaatattgtgcacttttcctaggatgtgatcttgaggtctcccatatgggaagttgccagtggcactgctgagcatcagaaccacgtatatgtaactgtatgtcccatattcccagtttgctctccttggatatccagataattttaaattgttgaaacatatatccttgaagcccctttagtttgagtccaagtaagaccatcacttttgcagatttttcagagctgattcttgccatgttgattggttttttttttccctacccatattctccaaattttagctgctttcgtgtgattcctggctttccaaacaatgataaaccctggcttttctgtgtgtcctttgggttttttatgtgttctctttgtgaacaacttcacattaaaagatgatgcctatatattaatatctacttctttccataccaaagtatatgtgtgtacactataaataaaaactcttagagctttatagtcctcccttgcctaagtgccgcccccagagatactgattgtaccacgcttttaaaaacaacaggccaggcacagtggctcacgcctgtaatcccaacaccttggaaggccgaggcaggaggattgcttgagcccaggagttcgagaccagcctagacaacatggagagaccccatctctacaattttttgattagctgggcatagtggtgtgtgcctgtggtcccagccactcaggaggctgaggtgggaggatcgcttaagcccaggaattcaagactgctgtgagccatgttcgtgtcactgcactccagcctaggtgacagagtgagaccctgtctcaataagaaccaaaaacagataattctcttgacatctgtggttgaaaactgctggttgagagtcttgcaaagggagtgatatgtctagggccacagcagtggttctcaatgggacaattttgcccccaggagaccattgatttggaaatatttttggttgtcacagccacagggagagagtgccgctggcatccgttaggtagaggctagggatgctgctaaccgtctctcccacctctcctgtaagaatgaattacctggcccaaaatgtctgtagtgctgggaaagcctgggtgagaggaaaatgagagaagagtgcctcatttgtcctgccacctcggttctgctggagcaccttgagggaaggatggagactcttccctttgaaacatccctgatcatcttgcccccagttgccctcctaagccaccactggagatatgaaagagggactttccaatcacatacccaaagaaacactatatttgtcttctcatttcataacagtgcagcaggaaatattttttccatagtgcctgaaacgtaaaccctctcactacacattttaaaggtcaaattacatttttgtctcattgagatcagaaaaacaattatactgaagtgtagaaaattgaaggctttgctttatcgtctgtttttcatcatagaattctactcagtccttagaagaaaatggaaaaattaagaaccaaaggttgtagctaatgataggcagtcactttcattagccattctgtttctacctgagtctttttctcattttgcaataaaaccaaatatcacagtggggaccaggattaggatgaagatctgagacatgtaaagataaatacagtaaggacttgttccattaaatgtctgcttgggggttattctttttctttgacttcagccagggagcaatattacttggtgtttctggcatatctggcatatatccaactactctgatgccagtgacatacccaggtatgccagccattatgctctttaagccaaatgaacagaaggtcttttacatatcttacggtgccgtagtggttgaacaaatacttattggccattttattactctgtcttaattaggagatcactggaattgtggcattatatatactttaacaggtaagcataggaaaaatacatattaggcgaaacaggtcctagaatcagatctgtgtcacagaatagatgctgtgacaacaagcaaatttgggttttgagttcagtcacatggaagatgttgatataaacatgaggaatgagtcaagattccattgttaaagcaacgtggctgaaatttgatagtaaacactcctagtgtacactgagagtatctggggtagtatagtgtagttgtacagtaataagatgatgcttttctctgtgccattcaacaaggcatgtttataataggattaccagtaggaaagttgcctttaggagccttttcagccacttagcattgttatataataatttttaaaagctttcaattccctgtttaattatcaggaatgtgttaaacaattactaaattttgttaattccttagattaaacaagtagtgaagacaaaaatcaagagtttggccagctggagcaacacagggagacctcatctctacaaaaaattttaaaattagccagatgtggtggtacagtcctttagtcccagctactcaggaggctgaggtgggaggatcatttgagcccccaggttgaggctgtgagataagccgtgatcatgccattatactccaggctgggcaacagagaaagaccctgtctcaaaaacaaacaaacgggtgggcacagtggcccacacctgtaatcccagcactttgggaggctgaggtgggtagatcacttgaggtcaggagttagagaccagcctggccaacatggctaaaccctgtctctactaaaaatacaaaaataagcccggtgtggtggtgcatgcctgcaatcccagctactcaggaagctgaggcaggagaatcacttgaacctgggaggcagaggtggcagtgagctgagatcacaccaccgcactccagcctgggtgacagaacaagacactgtctaaacaacaaaaacaaaacaacaacaacaacaacaaaatcataagagttcagtgtgtttttggttttgtttttaataaaatcaagtgtttgaattgtgttttttaatgttttgttttaaaagacatttaataaaagggctctatctctttctgctctggaaatgaatacaatccttgcaatgatcaaaatctatacaaaccagactttctgactaatccctttccttctcatcaagtagtttttctaagtgttcacctgcttgtgacttggacaaagcaccatagaaagagaattaaacttttttctccccacccccaacattcaatattatgccagaagttaaagaaacagagagtatggggatgaacatttacttgcaagggacaccaagagacaataatggaagaggctaataaatacatttatgcctcaagagagccatatgtatggtttccattgctgtctagctgacaaattgcccaaaatgactccttttcctcactctgcaccagtccaataaaccgaaataagctccgggatctattctgaaattgtgaaaagggcaaatacacatataacatggagaaactcaaggttcccataactttgtgactaaggcaagtccctgtagtgcagtatatttcaaatcttgcctcatttgtgaatatgtgtctttctaaataggtgtagctcactctttggaggtgaaagcttctcttttcctattttctttcttccctgaggttttcctctgcaatagatgtttccccagggcctttgcaaggactgaatgaatcagttgacatgaaggaagagcaggttgataaatacaaaaagtactgaactggccttttcagtttaggtatagtccccaggaaaccagcataaatagcacctcttattaatagccttcctgagctacacgtgtggattacctccatacgttatgtcagtcacacacttggcactggcagtcagctccgctggcactgcagccttctttgcagaataaaggcccacaataagagctggaagacaagaaattggttctaatttcagcctgaaatcggaaaagatttctgaatcttctcagcagatgaaagcttaccaatcaaccagcccgggaatgtacttctgaaaaggaattgttttcatcataaaatagaaaaataaagaggaaataagcaaattgttctatctacacattcccataggatactagagtatggtcttttaaaaaatatatatgcaatatagtctattttcactagaaaaaagaagatgaatttgttcttatatcttagtataaatataaaatacattataatactaaaaagtgagtcctaaattacaatttcagaatgcatcttggagcttatttctgtttttttggactggtacagtgagactaaggagttattttgggcagtttgtcagctaagtcagcaacaaatcatatagaaaggctgtacgtgaagccaataaaatagaactccttatatgtatactacatgctgcttctagtgactctaaactcttgattcttaccaggccatattctaatgaaagacgcattttccaaggtttattaaccacttaattaggaggcacgggatgtggagttagatagattaaggtttaaatctcatctctacatattctagctctgaacctggttgagttttttaactccttctcagctacaaagcaggaatactgttatcactttctaggggttttgtgaaaattcatatataagtaatgtatctgtcacatcattctagaaaatcactagcctggcccataagagatgttcagttaaggttgattctcttccagagtagcatttgggaaatttcttttcctctacaccaagacactggcaataagttatcccttccaactttctgtttatttagcatgcagtggagtccagctatgggataggaatggttcatcaccacttctactttttattacttgatgaagagagaagtaaggcaaagggacacccacttctgaatgtcacagttgccaccaaaacagctccccttcccctttcttgtcttgccatgccttcgctacctctctcttcccctttcttcattcatccacttaatagatagatgaatgtgtgtcaagccactacttttcaaacatttgagtgcacgaggagcatcagggccccatttccagatattctgattctgtggatgttaggtggcacccaagaatcttccactcagtgagtctagtgagtacaaatgtaggtggtctgcagaccacacttgaaggagcacttctagaaagactgagggataaagacagtcttcctcctaaaaaagcccatgcactagtggctgcagatgtaaacaagctggaatggagctggggggaggaaaaatcaactctacctggctcattaggaaaggttccattgcagaggtgacctttgagcaggatcttgaaggaagactagaaatttgccagatggagaaggaagaaagaagattccatgcagaagaagcaacacaaagaaccagaggcaagaaagaacatatgtgctcagggagaagtacccttcttccatcaataatgatgggcacggtggctcacacctgttattccagcactttgggaggccaaggtaggaggattgcttgaggccaggagttcaagaccaacctggacaacatggaaaaaccctgtctctaccaaaaaaatataaaaattagctgggtatggtggtgtagatctccagtcccagctactctggaggctgaggtggaaggatcgcctgagcccaggaggcggagtttgcagggagccaacatcacacccacaccgctgcaccccaacctgggcaacagagccagaccctgtctcaaaaagaaagttaatataactaatgatgatggtctcactccatcaataaatgaattttaagcacatccctctcaaatcagaaagttcatttataaattatacatgtgtactactgttaatctgtatactaaagatgaggaaagcctacttagaataacaagtgagtacataaaatttaatattgtattcctgctccattttggaagcctggactagggtacggccttaccatgggcaataacaacacctgtgattgtggggaagagccttctaggccaaaaacaagaagagcccctcccctccccttttcacatgagagcctgcctggaggccaggagcagaggaggctaggcctggctgccttgggttgaatgtgggccagcatttctggcacttcttgtactatatcagtttcttccagtttctgttcctgttatttatgttcagcaaccatgatggcatctacataaatgcccttccccttgcccccaccgttttcttttttcttttctttttttggaaggaaatacaacagtgatcagagtgattggctctattttgtgcttgagacaaaggggcattttgctttattttgttttattttgaaatttgtttcattttatcctgctttctaatattttccagttttttagtagagatggggtttcaccatgttggccaggctggtcttgaactcctgacctgaggtgatctgcctgcctcgccctcccaaagtgctgggattataggcatgagccaccacgcccggcagatgtaactttaaaaggggaagcgggggagtcagcatttttatagtcaaagacactgaaatacagtcaagttactttccctgaatagtgacctccatgaaaagaaactgaactaataagtaattagcaaagataaaaatttctattgttcatcaaagtcatatgtacaatttctaaacagaggaatatagatttttcagttgaacatttaatgttgtgggatttccatactatgggattatgctattctgtcatttaaaaaattccaataagaaaaagaaatccctgtatattttttaattaattatgtcctttttgaagaactccaaaatattactaatgttgagagttagtccttatactaaatctgtgtgtctcatcccagaaatgcacctcagacagtatgatgaacaatttattaaccatgatttcaaatcattgtatgattccaacataaaatatgcagactaaacaatattaacacattgtattgcctctcataaaagtagtagaaataaaatgtcagcctgattggcaattgagtgtagtcattgatgttcattgacagtcagatggattttgactttgctttgtatgttgagtgtggttcatgcttgaggcacccccactctatttcccggatgagcgtgattagtaggcagcctttcaaagggttatgtgctaaccccagtctacatgctgtggacatgtatgcagggttttatatgtttaccaaataacactgttaaacccaataaatctttagaaggaccaatttgtcaccagtgctgcatttaaaaaaaaaaaaatctattattatttttcagttttgaaaagaattcaggttgttataaaacctaaatgcaaatatatacagagtggaaggtgacagacccgggaattccagcagtgtaacaataaacaacaacaaatagccaaggactgggtaatgtgctcagggttaaataagagtcagtggaagtggagaggtgcatgggacagacagacatttctggggtagacttccaaggatgtaaccatgtgggaagtgaaggaagaggagccatggacactgggtgagagatgacaccagtaaccagcatagagggtgcaggagagaggacaggatggggagcagaacagcaaggaagagccgggaattggcagtgtgcaagaacgtgagtgccctttacagttagggctgccaggcctcctgaccctgggaataaagaaccgtacggtctttctgcatttgtggctgtcaagccagggaagcatctttgttgacagctgcaacaaagaaattgagaaattgcaattgagaaattggtgagctgaaacccctgactagctttgccctgggcccaataattgctggtaatacttggggagttggaccagaaatggtactcatgggaacagtacattaggccttaaatgtataaaggaagttttcctgccttgcaactagtgggcaaaatttaagggaagggacacagatgctcagtgctagctagtacggggcaactgtagcttgccagctcaaggcccacgtggtggtcagtgggcactactaggctatcagcccagctgacatccctctcaggggatgttagaaccgttggtcacagttcttattcctttgcattaagaagcggcagagcccacagtggagggagatgtttttataccactcttttctttttagtgaaagaaatggaaattctttatgcagggaagcctggctgtagggcttatcagtctttggcatgctttatgctatttggtagaggccaggaaggctgaaatattcattagcattcatagcatcctttctctccagcagttcccaccttctctttctactgcatgcgcctcctgctgggcctgcctccctccccatgctcccattctgcaattgttggcttggcgaatgatgagttaagctccagctgaagtactttccccacaagaaggttctgcagcaaaattgtctgggatcagatggtccccggcaattcctctcactctagtctccctgaggcaaatgcatggaagatggaatgtggcctggttttaaatctttaacatctaactctggctgttgttacagattgagttcttcacctcccctttgaaattctgctttcattcctcggtatctaccagcaggttctgctctccagcttatcaactacattgatggtcctgtggctgcctctctatggtggcatctttgtatttgaagaacactaggcctgacatgactcacccaagcttccaaatgaatcaattttgtcactcaatgcctccatctccaaatttaaagagcctttcacaggggagaaaatgataaatctattactactaacgaggctttctgattcttttcattattgttattatcagtgctctatagaaaggaatcaagacagtggaaacatttttataaaatgacactttatctctgtgattaactatataataaactgtaaagtctttgccatggtaatctcctccttacaccttattgctttgataataaaagcttttttatggcaacaaaataaaattttactatccaggcagtttggctaaaatgagaagatgtgtttttagaaggagaaagggcacatctgaaacatgtgaggtccgcgtggattttacgggaactctgtttatgtagaacacgtttgacgtgcctggtgccctccagagggctttacccaaccatttagaaaacttttagtggccagtggaaagccaattaaagagttatgtatttctgtcaagtactcaggatcactgttgaaaagcaaaaacattcagaacttagcatttcagatgatcagtggtgggagaacaaatttcagtaattaaaccaccatagtttgcaaactgcctgttttgactcagccaaaccttgtgtgtttggtgagtatcatgacacctttactcataagcttatgtctccaatgattaaattctgtcagtgaccaaaagttttgcataaatgtgatgtatatgcaagcaccacaatgtactagtaagtttcattattgttatgccacagaaaaatgaatatgttgtcttcccttatattcatcactatcaagaaatttttattgagcaacccataataagtctaagatcatgaaattgaacagaagtttttaaaaacttagtcagagctctctaaggaagtgacgattaagcaaagacctgaaggaggactcagagctgattagatgaagagaagcaaggttaagcagaagagttgtcttcaaggtagagggaagggcttgtttcaagcccctgtggcaaggagaaagccaggcttgctcctcctgggatgtcaggaagcttagatgagatcattccaggaaggcactggcactctacctaatgtgcctggcccaccatctgcactcagaaagtgatcagctcacatttcgaggcaactgagggctgatatgtgtctgcagaggtgtacctcgaaagcaagtgtgtgaccttgcagcttccacagtaggaatgtggttgatgatactgtctctgattcttctgtgactcatcaactccctaatgtcattcctctccaagggactcgctcctccctccatatctggtaactccataccagggctttgccaagtgccctctgtcctatccagcctgcagagttgtcaagccacacttgaccacccatacgtgtctgtctctgtcctggtacctctaagaagattccacagaacatggaaatggcaccgatgaaattactcccaaaactggatgtgacacacccagacaccccaggctttgtgggcatttagaaggatttaggcatggtctttcctctctgaccttcttttagtctggcactcgcttgatgtaaggctggctcctcactgtctgacagcctgccaaaggacaggctggctttactacttcctccacatccacttcccaccattattcttcccttgacaagcctactgcctggaaagcaaaactcaaggaactctcaggtctacacattgagattctcaagggcaggccgggtttatctgccctgggctggcccctgatcttggtttgcatcagttcatcagctccaagctgggtcctgagtcagcagagatcactgacttgcctttgtgcacatgagttttgaaagcagccacccatagatagcagagcttgaattactacgatgcttgcagacaatcttctatggaaatacccagagaaacggaagcctggtttgatgccaacttcacaggctctttcacatcctcaagggtgtgcattaagcagattaacaatttattgtgtaaaccctcttccctcctgttgctagcccagaaggtctgaactaaccattgtatataaatgcccagctttgtttaatatgtgttagacccggggacaagtattgtaccccaaatgtccatcttgtaaattctctgggcacaaaattatgttaacaaatttgatcaacaaaagtgttacgatggtcttgtagctgataaagaaattagcaaaggcccttgcacacaccaccattccaccaaccccacacacaagtgggaggattcccaagcctccaggacctctgctttgcctgcagtctgctcctctcccctccactgggcatctgaggacatgccagtcttgtgtcacatgcagcagtatttcccttagtgtgtgctgggcatgctctctaaacccagggactctatttataaagccttctagttgattcagggaagggaatcctaattgcttcttcttgccatcgtcattttctttcctctctatctgcttttcactatttccccaatgagtcctggcaggtcctctcacatccttctcagctctcccacaaagaatgtcgtcgtgctgagttttctgtcttctctcttccctttctgtaagggataaaaattcaaaacatgtcctcaagcagagtagcttaaccatatatttgtagtttgggcttctggctccacatctgtagattctccccatatctccccaacagcttgtctcgaacagtctttgtttccctaaagtaaggtagcagtgcccctctctaagaaggttgtaaataatgaaaacatacatacacacacacacacacacacacacacacacacacacagatgcctctgtcatggctatgtttgtgaacttggcagagaagctcataatcacaggagcacaaagcctattgactcaacccggcatttcatacaattactgaatatatgctggttgattacatagacagtctctggaaatgcaagaacttgtcacattggagacctccaaggaggggaactgagtaagttggggcagagatgggataaagagttccttctcactgtacacctttctgtatcatgcatttcctatatttaaaacacactgacatacctatgtaatgtcaataggtaagggacaggcgtcctgatatgttggttacaccaaagtgatcatatccagtgaccgtaagccatgtgtgtcatggggctggctgatgttgtctgcagttgagggactaggcttagagcccagttctggagaacatgccatgcactgtgcaattagtcctttccactaggatttcctggttgggaagagctgagttcctcagcacacagtcctttactcttcaagtatttaggttgcacagtctacttgaggagcccctaaactgctatggatatattccagaagtcacttcttactttgacaaatactgcaaaatttttcagaggaagtaaattttcaacacactttaaattgcaaaagtacatctgatggagaagaaaaagtccatgtgatggaacaatctgagagtaataaagatgataacagtgttttgaagcacattaaatatgagtttataattaatgtgtataattaaaatatacaaacaagcaaaaaaatcttcttgattacctttgaaggatgctaaggaaccaactatcattttgaaaacaaaaggggagaatcaagcattcatcctaccttacctatgcaaactatacttcatgataaccaaatcattgataaagtttctctttatggaagaattccaggaaataagaaagagttatagaatgtgaatatctcaattttgcaaaccctataaaatctaggcaatgatcatcaatggctgctaagatcataaaaaagagagatgtcttttgtatttcctataaatttgccattttagatgtagaaatttgattaaattcagtctcattttttttcaggtggagtagttcatatcgtatacttccatcagcacacacataatgacacaatacacttatcaagtgttcctcctaagaaaataaaacctgaatctaatcagatttctacatctaataacaaatttataggaaatacaaaagaacaggctaaataacaccatggagatgtaatcagcaaaattcaggctttgcacaactcttcaggacaaacaacctaatttcttcaacaaataaattgcaaaggggatgagaaaacagatgagagggaacctctggattaaaacagatttaagagtcaatcaaccaattggaatgaacagggcttgtttagatcctggttttaacacactgttaaaaaaaaaaaagatttatgggacagttggggaaatttgaatactaagtagatatctgataccattaaattattgtgaatgttttatagatgctatagtaaattattgtggtccccagaagtccttatgttttaaagatatatatttaaatattatgactaaactaaaaatataaagataatctgacatctgtgctcacccaccctggggattttccccaggctcttcaccctgcacagctccctgcctttttgctgaaacctctcttcactccttcctacataaaaatctgtaaaaggacatataaggaatttgtcatgatgcattacttctgggaggggaactagagaactgggggttgggatgggataggagagaagcaaactttgggacagatcattgttagctttatgcaggtaataccttttcgaaggactaaccaaaaaataaatgaaatacgagaaaaagttcattagaaccttgaaatgcttactcgggagaatgaaaaaggcagagacttatgttgttgagcatgtggatggattggcccagaccatatttctcaaagtatggtcccaggaccatctgcagcagaattgggcccatctccttccttcccagccagaatctctcagggtagagcacagagacactgggaactacagtccttaaggacctaagtgccagcttttcaaatacttattatattgttttggaactttggaatgtataggacaaaaatattcccaaatttaaattcaaagcagcacaattctgaaagtctaaaagacttttttttaggtttgttgacaatgatttaatcagcagatgtcactatgtaatccttgggaacatcccttcgatgttgcctcattttttggagaggcagagtgtactgctggcattgtagcatagaaatatttatggtaattttgtattttgtttaatgaaaataattttactttcagtgcttattaaaagtttatctttgattaagcattctttgcttttgtttttgtttttgtttttccccagcatcattgacaaagaagtttcattaatggcagaaatggataaagttaaagaagaagccagtaagtagacaacacatggttatttgattaggagcttcccaatcagaagcaatccataggtcagactgacaatgataccggcttctgaacagggtcctaaaatttatattgaaattttggctcatgaactctgtaaccttagtcatgtcacttagcccctggaagcctcatttacatcatctggcaaaaagatacagttgtaacactcacctcgtacaggtgagtacatggcaggatggacactcagtacataataggtgtcagttgagttttctaaagtccaaagggatgtttgtgcacataaagaacttatagttaattggatttaaaatgacactgaatttagtattagattttaagacaattttaactctttaaaacttacaaatctcatcatcatttttactagttcttttttaggttcaattaagtttatcatattaaattttcctagaaaagtagtcccatttgaaacttaattacttaaattcccctcaacatttttaattacatatataaatttaatatatctgatttgtcttaagcacttcagatgtcagacaaggcaaactcacaaacctaacaagcaaagtgttcctaagcttttaagcaactcttataaaattaataattcaaggctgggcgcggtggcttacgcctgtaatcccagcactttaggaggccgaggcaggcagatcacaaggtcaggagatcgagaccatcctggctaacacggtgaaaccccatctctactaaagatacaaaaataaaaaattagccgggcgtagtggtgggcacctgtagtcccagctactcaggaggctgaggcaggagaatggtgtgaacccgggaggcagagcttgcagtgagccaagattgcaccactgcactccagcctaggcgacagagcaagactccatctcaaaaaaaataataataataagattaataattcaaaattaaagatacactaaacagtttttttttgtttttgtttttgttttttacagagtctcaccctgtcacccaggctggagtgcagtggcacaatctctgctcactgcaagctccacctcccaggttcacaccattctcctgcctcagcctcctgagtagctgggattacaggcgcccaccaccacgcccagctaattttttgggtttttagtagagatggggtttcaccatgttagccaggatggtctcaatctcctgaccttgtgatccgcccagctcagcctcccaaagtgctgggattataggcttgagccaccgcgcccggcctaaacagttttcttaaaatactccagttctgttcatgaacttcgtcaaatacactgacacctgccaacttaaaaccgcaaaagaaaatcaattccatatattaaattgaaaatcacaaatcagattgcttaatgtaccaaattctctgtttaaataatgaacacgctcaaattatcttgatcattgcaaaacttaatcctaaatttaacataaaatattaacattctgggtttgacttgttttattttctttatgctgatttctaaacctttccactgtggtaaagttacttgagtagtagagaagaattaccatcttaaatagactgaggctcatgagttggaaatttcaacaaagacaagattactttgtcagattcaacatcaaaccacaagtgaatgtgtgaggccctcccttattattgaatttagtttgctgtgttaatggggcccctaagaccctattttccagctgggattcagttttacaatccttgtctcctgggcattttaaattcctcatctttacccaaagatgaattggataaatggcagtctgtgcccctaaccagatttcagtgaaatccctttacctttgatgtgatgtctttcttttgccagaatgaaagatcagaccagattcttcattcttttttatttttcttgtctggacctaggccataattcaagtgtcattttatggaaaatagctatcgttatttttgttacacagttttctaaattattttgttattcatttcagacctcctttagtcaggcatctaaataattgtaagcaacattttagaatcctgaaatacagcaagctttgttaaatgaaactaatgtgatccagggtgaagctatggactatttaggtagttaaacaatctctttgattgtgaaattattttattcttatgaaatttgttgacatcttcagtaacagtagattatatacacaacttgggattttccctacttctcaagtatagcttacttcagtttcatgtcctaatgataaaaatgctaacaaccaacacagacacaaatgatcctcttgaaccaaaatggaaagtcactagcacatcatcactttcttagaggtcaagaaaagacctcaggtttcatgtacttatttttccttcttgagacatgatagtctttgatgccaagacctgtggaatttggagcatctctggagagcatcccattttaaaaacttactcaatcagtaaacacacgcgcttccttgtgtccaggataaacagcaaacagacaaatgtagagcctgcactcaccaagctttcaggctagctgaaactgctagattggttgacagagttcacctaacttgagtaattggtatggcaggtcctggtttttgaactaacctcagccctggggaagcccatttgcatgcttttgaggcaggcagaactgagttcaagtccaacctccatctctaactggctgtgtgtccctgaaccatgttgttgacttctcaaagtctaatattccttaggccctggcaatggctcacacatataatctcagaccttttggaagaccaaggcaggaggattgcttgaggccaagagttcgagaccaagcctgggcaacatagtaagaccccatctctaaaaaaataaaaataaaaaataaattagccacgtgtggtggcatgtgcccatagttctagctattctagaggatgagaggggagaatcacttgaactcaggagtttaaggatgcagcaagccatgatcatgccattacaatccagcctatataacggagagagaccctgtattaaaaataataataacaataataataataataatatccatctcaagtagttattgtaaagataaaatgaaaaaatacacgtcaggcacttagcacagagcctgatacaatatgtgtgcaaaaagggaagagttcttattagtaaattaccccaacccgctcatattacagtcaaaaaatggaagtcaggggttctattgcatctctcaaatgacaagcctgtatcaacactatgtcttctccacagatagaaagaaccatggaatttctccccactaactacagaactgtctttacaaccaccatctttaatttggttctctgtggtctcaagagtatttttcacactttacatttcctgtagacattataaatcatatttcctcaattataacagaagctcctaaatccctcatggcacctaacccagtgctgagaagactgcaggtacttcataaatatttgttaaatgagttattgtaaataagtcagtatctgtagactgtgggaacgaatattagtgaacattcctgtaattgcacaaaagaggaagtatattctagatgaagagatctcactttatcaataatatttagagttagcattttgagtatactatacgaaacacctcatgtatgttattccatttatttccacaatacccctacaacatgtgatcagttcctacacagattttacagaagaagaaaccaagtgtgttgtagtgctagggtctcaaacttcctgtttatacccacataagcacaggtgtcaagttcactagagatacgggaagaaaacattactttgtaaattcatagtaacacaaacaaattatgaagtagaatgcaaaattcactagaatttttaaggaataaaaagtattccaaagaatctttgtgcttaaagagccacttctccagctcctggcccctggcccccaccttgggattttaagtatattttctgctgagggttattgttttgagaagccttcagattttctatggttcagataatatgagcaagcttccaatgtgtttcaaaagcttgaaggagtttataaatcctattgagaaagtggatttcagcttaccagatactgtttatacatacataatattaattaagtcttgaatgcagtgataacctaagctgtacagaattgtcttcctctacagatttctgaaagcatggtgcttccaaaacatacttattattctattgtaaattacaggatcagtgaagcttaagatctgatctgtttttgtttgtttgtgtgattgatgtttttgaggtgaaaatgttcatcccttcagccaaagaatattggctttagatctcaagttttaaggcttttttcataatgaaagcctttgaaatgttaatgagactatatgtaaaatgcattttaacacttgctgatccaaagtatttgtttccatgcacattggcatgagggtaaactcagaatttattggtgatcttgcacctgcattcctattttagggcccatttatatctatttctacaaaatcttttgtttggtatgaatgcccaagttctgcttaatcaaaaagaacaatggcccttaattgtcaccagtctcacaaatgatccatgaagaaaagttagatctgttggactgtgtcatcactgagggcctaatgacccctttactagctgcttttcaagtctgggccttcagactttttttattattattattatcagtttgatgagacagggtcttacattgttgtccaggcaggtcttgaactcctgagtcaagcaatcctcctgcctcagcctccgaaagtgctaagataacatgtgtgagccactgcgcctggcaacagaattaatttttttaattttagtttgcaagaagaacatacctcatttcatcttcctacttgaattgttttctcatgctgcagatgttagtcccatccatatattgaattataatggcaaacaaataacataaccaatcaaaggtgtggatcctaaacagtcttaagtgacccctgtagaaaaggaacttccatccttctttagatattccctttaagtaatagattaattcattcattgaattcttcactcagcaggcatattgcataccccttgtgtaccaagcaggcactaggtgccatggacacaaagaactacatagtgcagttcacaccgtagtcccgagaatgactggagatgctcgcaggaaacagataggtaacattaatgtgccaaatggggcagggggaaaccatggcacactgggcacctgactccatctaaagagggcagtggcttcttggcttcagccgtttgtcaccatgtaggaaggttgaccaactgtgaccagaaattccagtactttaagagatgccagagagccagctttcaaatggaatcttctaatttttaaatgtgggcaattaatttgtaaacgtaatgtgtggaccaaacaagacatatgtactctggctgaaaatgagagtgagccacctttttgtgacctttggtcccactgggtgtcctgagacatccttcagcaatctgttgtctacattgagatgaaacttcccttcactttcaccatccagacaagtttttcactagctcctctgtattcagaaagactattaggcacagatctgtctgcccagccacatggtattgtaaatgggggctagggggagccccagttaaagaatcaaagcatgattagcatagtttggcagatgataaagctgtatgagttatagactaattattttattaacatctcaacattgatatcagcataaaaagatgatgtcttagggccaggtgatggctcacacctgtaatcccaacactttgggaggccgaggcaggcagatcacgaggtcaggagatcaagaccaccatggctaacatggtgaaaccccgtctctactaagtatacaaaaaattagccaggcatggtggcgggcgcctgtagtcccagctacccaggaggctgacgcaggagaatggtgtgaacccgggaggcggagcttgcagtgagccgagatcatgccacggcactccagcctggacgaaagagcgagactctgtctcaaaacaaaagaagataatgcctttcagtctgtctaaagaatggtttatgatttgcagggaatcttaactcttgatggattctgtacttctttttgggcttttgcagtgactatcttttgatattttgagtaataagaactcttaaaatcagaaatcatattgtttggacctgcacgtatgctgtgaatctggtctaataaagcagttgatccttgttcagccaagcatagaatgtgagtccgacatgcatgtcatcttagatgaataccttttttcttacacctcaaaatgcttgtcctaaagaaatgaaggcaattcatatgagtcgaattagagagccagaagtctatctattgaaagatccagctgcatatttaaatctcatcctgtgtgtctgtattgattgctactgagcgccataatcttttgggaaacacgtgtatacacacacagacacaaaccaactgataggctactacatctatttgaacctttagttcatctgaagatgtgtgaaaatgttggagccagagtactccccagtgtcttctctacgtgtgcaggtgctaaaaaattcacacgaatctagttctagctggcctcactcactcttgaaatttttccactggggacacttatagaaagacctaagacactctggggtagaacttctgtttttttgctgaatggaaacatatctgcagagtatcaaaagcagagacatttttggctcacaaaaaaactaataaagttagatttttatgtcagattccagtaacacagctagtcaccctaagtgagtatgtgttaaagttcaagagggctgctgctgttaaagttgaatagtgcagcacatatagaatgatttctgcttagtagacttcctgtcttggcggtatcactcagagaggattttaataagtgttgtttttcagagatcgttgttcggagtaacaaatttcaaaagtctaaattccgtaagtgaggtcagacaccagtggagaaaatgtagagtgggagtgtacagtgaatcagaagggactgtgtttggcttggggattggtggaggaggacaggaggaactgggttgttggtaataggcacagagggtgaacccgcctccatgaccaactcagaaaacacagtcgtggtccaacaaagcaatcagtctgtggagtgagaactgattccaagaaattaggttatttaatatgtttcaatctctggccctaatgtatgactcctccttatttggcagtggaaatcctgactgctcgtcagaagaaagcagaagaactaaagagactcactgaccttgccagtcagatggcagagatgcagctggccgaactcagggcagaaattaaggtcagttctaaaatatcacagcctgaaccctgagccagagagctgatcccaattatgtttgttttgcatccacagagttctgctctctgaggatctaacatgtacacccagctctcttccacagggtggaaatagagaacacagaagggggaagacccacataatcactgtgtttaagtgtaatgtgctttgaaggaatgtgttactccaaaggagaggtacaagctattttgtcagtcagtagagactgaaccaaataaagtaacttggccaggccatgaattatagctgggatgggggatattattttcacacactgtgatttgtatgtatgcatataaacacatccacaggtatatatacacacacgaagcatgaacgtagtgtaatggtgaagattagaaagcatgcggtctgtggagatttctttcctgtattattttctagtttagttgcatttttattaagaatactacccataaatacgtatttattagattccttcattgacaagcaacagaaactgaccctggctaacctcaaggacaagtagaatttgacaggatgtgagtatagctcagcaaagcagagccctgtctgaaggctcagctcaacaattaggtaggaactggggtggctctggtgaaataagaagcaataatcactagacactctcatgggaccatcagccctgtaccaccccacttggctcggatccctaagagagaggctctgattggcctccacttgggtcacgtccatcatttggcccagagagggtgtgacatcttgatcgccagacccaccaagactgtggatctttgaaactgcatcagggtacagttaccagaaggggaaatagttaccaggaaggcaagtataagtatttacaacaaaataggaagaaattttaaaattccccttatccactttttcacccagtatactacacacacacacacacacacacacacacacacgccttccagcttcttacccacttccaggaaactagagtggttgcaagacacagctgctgctagctttgaaagtaagattgcaaattggggcataaaactgcttggcaatgattgacagtggcaagtgacttttcaactccctccctcctggttgggcatgaaagcgggccccatggggaagaggacctcacctgagggtgctgagggcgtcagtggcctttccctcctcagcttctctgctctggcctttgtggcctcccacccagccaattgcagtggcctccacactagtctctctgcctacactgtctcccttcagcctcgtactccactaagaccagacgtaaactcccaaagcagatctggtttccccagtatatctccttcccctcagaaagaaattcacagctggacttcaatatatgttccaacttccatctctctctacaaaaatcccagcttgttagaacatcaagtaagaaatataaaattgctagcttcctgatctattgaaatcacctcatcttccgagtttcatttctgcctatcaaaacgccacccatcataaaatagttagtagcacaggctttggagtgaaacagtccagctgcaaaattttctacttctgtgaccttggataagttacacattctcttagactcgtagaaccccaattcccccatctgtaaaacagaggtaataatactgacttcataatactgtgatcagatgaaatgagattatctgctaagaatttgaccagtgcctcgtaagtgttcaatgattttttcaatgttccctcttaaataactctttccccattgccctcagtaggaaataatttcttcctcttttatattcctaaagcaccaaccacattccaccttgtattgtagttaatggtatctgttttccttgccattgctaaactccctggtaaactcaagaagggactgagtcgcagttatttctgtatttctcaccatgtcttctacacacagatcttaattttaaatgaatggaaaaataatctctttctcacttcttttcacagcacttgaaattctgccatttaaaataatattttccagacactaaaggctttgtggacgtcccggttccctgttaaaataggaatgggggtctaggaaggacgacatgttttctcttgatggttaataccttagaaggcacttggccaaactcagaagaccctgccagaatgcaattcagaaaagtactaggagggcgaggggtgctaaaaggttaaatagatgagtcagacacacatttcatgtaggcccaaacaagagaaacacaggcccctcacatattccccaggcaggaagatgctcattccctagccaggtcagcactaagactgagcgtggagcctcccagcaacagggctggaaagatccccaccaggtcagcactgcagtggacaccggaagagcagagtgaacgcatccacgggggtgccttggtcatttctgtaatcatggggttcctgcttttcatctctttcctccagcactttgtcagcgagcgtaaatatgacgaggagctcgggaaagctgcccggttttcctgtgacatcgaacagctgaaggcccaaatcatgctctgcggagaaagtgagttttgcatatttgctgaataattctgtgtgagtaaccttggtgctatttggagttgctattggaaatgtcaggtgtgcagtccccccagggggctaacgtgaggtctaaagagatttaatgatctaagctcatgacacaagtcaccagaaatgtcgagatttgaacctagagtcttcaaatgccactgcccatcagtaattccccaggatttattaagtggaacagaacaggtcaactagttgataccttttgcaaacttttattaagcactgccagttaaactgcttctctgatttcaaacagccctggttctacagaaactcgttaggcagagagagtgagtcttcctaacatgtctgggaacaatcagttattgttgtgcagggcccagctgttatgcgagcccctcagcagtgccctgagcctccaccctcggttctctgtgctgagtgaggctgcagataatgaaagacttcactcagccattagctttagtcttgttccctattaagccttaattagagcagctaatgtgcaacaaaattggctgctatattttccccctacaccagcccacccacaaggggaggtgggaatgagcactgaagcggctttaaggacggccacaaggaggaaaggactagtcaatgacgtggaaacccacagcctcgcagtcagctgaaaaattaagatttggctgcacttcctattatgatagaattaactatactgtactacactgcatacatatatagtaacacaatttgcttttatcacttcacaatctatggtagacattttttcatatcaatatatttaaccagtcatttctctaaatataatagatgtcaccggtcttctggttgctgcatttagattgcttgcagtttttcaccattaaaataacactctgatcacctgaggccaggagttcgaggccagcctagccaatatggtaaaacccccatctctactaaaagtgcaaaaattagctgggcgtggtggcaggtgcctgtaagcccagctacttgggaggctgaggcaggagaatcacttgaacctggacccgggaggcagagattgcagtcagtggagatcgcaccactgcactccagcctgggcgacagagcgagactccatctcaaaaaattaattaattaattaattaacactgctgcgagcatccttgtccacacatccttgccaattatttgattttctgactgcatttttaaaaattattgttcccccctgtactcttccttatgaaagaatctacctatttgccattctctatccccagcttttgccccacctctaaaaaagggaactgcccaccctcttttccacttcagccctcaatgagcaagacagtgatgctgagcgatgccctgtcaccaccgatctcggggcgatggagaggtgccccttcacctcctttcctcctgagcacttcaagtgccatctagtgggagaaatggtcccttactaaattccaggtgtccattctgaaagacagacaccgtaatcatccaaaggcccttccttctcagctttgttgagagcacattgagaacccacaggtactgaaccggaaatagtggtccctgatctgcagacaataatgaccccatgaaactgaatctggtgagcataggagccacggaaatcccctggtcacatttggacagccccagcttgctgtcacaccttcccagtacactgaagggactggggatgtgtccctggcctttccatttctcctgtattgtgattcttactggtcccgcctagtcctctagcagaaccctgggattaaatctgatccaacaaagagagcagacaaagttgctttcaaaaattggtgacagttttaagcctcaaagaaaggtctagctggcagtcagattctggtgaactgtgagagggaagtcagggctttatccttgaattgattccctccagttctgattcagtgtaatcacatagaaatcatcccagcagaaaccaccactttcaaaaccagggggaatggtcataataaacgctgagcagacctgcctgagccctgagccctgagccctgagctctgacgggtgtccgcctgatcagcctgccttgcctgtaaccttggaagtggtgcacatctgcagtgaggctgcagaaaacggggctgattaaaggtgtgatgatggagcactaatgaaatatacaagatgccttaggggctggcgggcctggccctgtgtttgggggatatgcatgacccagagtaacagaattcctaacatccaacatcaccccattcccaagctctcagaacatcgtggatctgacaggccagagtgtccgcatagctcccaatctttctgtgtctgcagtaccagttggtccagggaactgatcagggaagtgagaacaggtttggtaatggggactctacgaggcagagtacatttgcagacagggccagagagggaaccttgaggtttcattatctcttttcccttggtggttcttgacctaaagaataatatttaagttggtcagatatgtcttatttcctacaaatgtctcccaacttggatgattatgctgtaatcacagttcagtgattcccacaaaagaaatttggttgttctcttaagcaccaagatgccctttcaaataacatctttcaaaagaaaactttttaatgtttttgtggagctcctggccagtttcttcatcttctagcgcttcctaatgggttactgaggcagcagtgttggaggtgcagctcgtaacactgagcactttattattgcagttacacatccaaagaacaactattcctcaagaactccctgcagctccctgctgcctctgctgaatgcgcacgcagcaacctctgggaaacagagtaacttttcccgaaaatcatccactcacaataagccctctgaaggcaaagcggcaaaccccaaaatggtgagcagtctccccagcaccgccgacccctctcaccagaccatgccggccaacaagcaggtaagccgacactggtgcagggtgccagaggaaaaaaaaaaaaaaacctgtttccagaggaagaaaacagcaactactagattctgggcctcctggggtcacactcaggctcccgccacctgccctcacccactccccacccagcagcactgcccagctggcctcttgggaactcccctggtcgctctcatccatgcctgccaggtgctttcccatgtggaggaagtggcctgcatgcactcttgaccacgtgagcagagtccaccccagtgacacagttcttctcatggctaggactgccaccatccctggggccccgaaaccagcccacacgtggaagggacccacagagactctggaacaagactcggaacctactaaactactaatgagaggaaatctggcatttgttttttaagatattttaatccccatttatgtttagctgatcaataagaggctaaagttagtgcagtcttctcttctcttgggatttcagtaaggagaatacatttcaaaatggcattcttcattcttatctattatgatgtctaaagacacaagtgtccaaagaaccatcttccttctctccttctgcttctccactatatcttttggaggtgatttcccccttatccttagagaattaacaaaaaattgggatctgccggatgcaatggctcactcctataatcccagcactttgggaggccaaggtgggcagatcacttgaggtcaggagtttgagaccagcctgaccaacatggtgaaaccctgtctctactaaaaacacaaaatttagccaggcatggtggcgggtgcctgtaatcccagttactcgggaggctgaggcaggagaattgcttgaacccgggaggcggaggtttcagtgagccaagatcgcaccactgcccttcagcctgggcaacagagtgagactccatctcaaaaaaaaataaaaataaaaataaaggatctgatgatatagaagttgggcatgctataaagatacctaagataccttttatcatctccaagaaaaagtcttttcttttttttttttgtaagactttaaaaatggtggttttctaacaggtgtcttgttgggttttgctgtctcagcctttgagaattcttattaatgatattgacaggtgttttctcaggccctgaagtcttcatgagctttaagatagcactttgacaaggagcatgttataatctcattagttaaagatcataatcaaatctgtttttacttgtagtctaaatatatcttcacagtttttgttcttttttttttcttttttttggcacaatctcggcccactgcagcctcaacctcctgggctcaaacaatccaccaggctcagcctgcagggtagctgggactacaggcacgtgccaccacgcctgactaaatttttttgtataatttttgtagagatggggttttgtcatgttgctgtcaaattcctgggctcaagcgatccacctgcttcagcctcccaaagtgctgagattacaggcatgagccaccatgcctggcctctctgttcattattaaataccatgctgataattaagtctaaaatttagtctaagagtttccctttttcataatttctttaaaaacaaaggaggccagattaagtactatctatgtagatacttcttcagttctctggtttagcagtttaggtaatggctcatttaagttgaaatccactcaaatatctaagtcagaacactgtagacccaggcaagaatggcccttggaccgggccctgtgttttcaagtaacttcttgaccctcccgcagccatggccctctctacagagtaaggaatcagagagaccaaggagacagggccactggaatctacactctttgttctgaagcatgctgccagtcagtactcgagatcctgggttactcttcccaagtgggcccaagcctgctcacaggatctgcctggaccactttcctgtatacatcatcttgaagatgaacaacactgccagttttcacacccatccgctggaagggtgggagtggaggcgatgcttaggtgtgcaggctggaatgtccacatttgtgtgtgcaaggccccttacaatgtgggatggagccagagataggaaaagacagtattcagacatatggtgtgtgaaccccaaaaatctgagacaggtctcagataacttagaaagtttattttgccaaggttgaggacgtgcacccgtgacacagcctcagaaggtctgatgacatgtgcccaaggtggtggggcacagcttggttttgtacattttagggagacatgagacatcaatccatttgtgtaaggtgaatatcagttcagtccagaaaggtgggactactggaggcaaaggcggacaactgggagcgaggagggggcttccaggtcttaggcagataaaagacagatggttgtattcttttgagtttctgattagcctctccaaatgagacagtcagatatgcatttatctcagtgagcagaggggtgactttgaatagaatgggagccaggtttgccctaagcagttcccagcttgacttttcccttcagcttagtgatttgggggccccaagatttattttcctttaacagatgtatggacctacatttgtactcttgctctaggctctgaattattgggggttggtctgccctaaacctataccatccagtcacagtgcacaaatgaagaaccttatatatttgtaactcataaaatttcatgttttcttaagaggtttgattttcaaaaaaggtttatgtttatgttacaacttaagagtcttgtcaggagatagtatataaagcgggaatagctccaccatttcccaactgtagatagaccttgggcaagtccctgaaactccttatcctcatctataaaacgaagcacataatagcaactaacttaaagggtgattctgatgttaaatgaggtagtgcatggtgagaaaccccattcagtgcatggtaagcactcaatgagtgttggctattactgaccttgaggagttcagaaatctttcccttgtaaaggagcttaatccattgcgtccttactgctcatccatttacgttcctggtcagtgatgtgttgaaggaatgattttttaatagaggcttcaaattttctttgcttataactgcagaaagtttagaaaaacaatgaattacctctgtgaaaatacaccttatttctgcatgccaccaagacctgccagatacacttcacccctatatttgtccaagataatatttctgaactataaagatatttgttttggaataaattagaaaagctactttagagaagaaaagttacagaattttactttttcttcacttacgtaattagaattcctatgcatggttttgaacaggaaattttccttgaccccttcacaggccttgcaacaggggtgcctcactttctcagcctgaagctctgaacccctcgggggagggagagcatgcaggtgagcaggtgcaggagctagagcaagcacttttggccaccggcaggatcaaaactccatgcagtcccacagcagtgcctagggtagtacccatgacccctggagccccagagggcatgcgttacaatgctcttttagctttgcagtccaaggacggcttaagtatttaacagctcaatagaccttctactttttcatgaaggcagagggtcaatgtgacacttttctgtatcctgagctcttgtccagcatccatgaaaaatcaggtcatatgaacaaattgaaggatagtaaacgcgggggattttattgccattgaaagtggctctcagcaggagggagagagctggaaaatggggatggagtgggaacgtattcttcccctgaagtactgccatcaagcagtcccgctaaagtcaagctgctgctctccgactcagactgcagtctccgacgtgcagctgcttctcctcttctctgctctgtgccagtggagcctgggatttttatgggtacaggatacggggtggggtaggccaggggtggttttggaaaaggcaatatttgagcaggaaaacaggaatgtaaagttctcactttgggcttgagagtgggtcttggccagggaccctgccctttttctgtgtacaatttctgtgcctcctgtccctctcagtctctacagaatgtctcagaaatctccatagtagaggatcatcattactctgcccctggcttctgttttattctgctatagtttaagcatctttatgaattttatttgacccagtttttgaattgtctgtcttacacttctgtaacctctctttcaatatcattttcttccagttccatttacaaaacagtccactattcttttaggattaataattttatctgcctgacctcatcttcatgttttctgattcttctggtgtataaaaaaaaaaaaaaaaaaaaaaagcttacctgtggcttagagatttggttttcctgatgtctactggtgtcatcagtggcttgctggcatctgatacttatctcttttcttttttggtagaatggatcttctaaccaaagacggagatttaatccacagtatcataacaacaggctaaatgggcctgccaagtcgcagggcagtgggaatgaagccgagccactgggaaagggcaacagccgccacgaacacagaagacagccgcacaacggcttccggcccaaaaacaaaggcggtgccaaaaatcaagaggcttccttggggatgaagacccccgaggccccggcccattctgaaaagccccggcgaaggcagcacgctgcagacacctcggaggccaggcccttccggggtagtgtcggtagggtttcacagtgcaatctctgccccacgagaatagaagtttccacagatgcagcagttctctcagtcccggctgtgacgttggtggcctgagctaggaggaaaaagagcagttttcactcagttttggttccctgcccgaggtgctgacccaattcgctgccaaaagagtgtcaatcagaatatacaaatcccgtatggttgtgtcatcctctcttaatcatttttactaattctaataatcagctctagcttgcttcataattttcatggctttgcttgatctgttgatgctttctctcatcaagactttgcagcattttagccaggcagtatttactcattattaggaaaatcaagatgtggctgaagatcagaggctcagttagcaacctgtgttgtagcagtgatgtcagtccattgattgtctttagagagttaatgttacaaaaaagaattcttaataatcagacaaacatgatctgctgaggacacatgcgcttttgtagaatttaacatctggtgtttttctgaaaaaatatatatacatatattgctttatttgaaacaaattaaaatatgctgcatttgacacctggctagtttcttttattgatacccacctagttattgaatgtactgtttagtgctttcaaaaaaaactttagagactagaggttgtggtgcaaagctgtgtacaataaatactgtttctgttgagacaagtactctttcaggaaaatatatatatgccctttcaattagattacacaaatagatggatatgcaccctgatcatcttagacacaccatgtggcagttgggcagttggaaacattggttgcaagtactacaaacctcagctgagcctagcttcaacaataagaatttattggttcagtgagtgaaaagtccagttggtccaatttgatcaggatttcagctcccatctcttttttttttttcttttttctttttctttttttgagacagtcttgctttgtcacccaggtggagtgcaatggcatgatctcggctcactgcaacctccgcctcctgggttcaagccattctcctgcccggccttccgagtagctgggattacaggcatgtgccaccacgccctgctaatttttatattattagtacagacaggatttcaccatgttgtccaggctggtctcaaacccctgacctcaggtgatccacctgctttggcctccgaaactgccggaattacaggcatgagccaccgtacccggccagctcccatctcttaattatcttagctctcctttcctccttgggttgacattgcattcagaattgtggcaaagggccaccatgctcttaagactcaagtctattttccacactgtccagaggagagaagttatcctagtagcttctacacagagcaagtgtctttctcagaaatcccagcaaaggtcttgcataccattgctggtaggcctgtctcttaaaccaatcatgaaaggggggagagaagtgaatgggatgaactaatttgcatagactaattagagcccacccctggagcctgggtgtggccatcttcccagagttcctgagctagatggagaaggggtacttctcagaaagggaaaatggatacccaatggcccaaacccaaaatagccccagttcccctaactttgactacagggcagtccagtttgggtgccgcttccgttgcactcacatgtcctacatatctgttgactactcacaagtgcaaatgcttattctcaactcaacattaacattttttctggcaacccaggttcactggttctcttccacagagcggccctgagcagctgagcctgcaagccacgcaagcatctgtttcttcttttgccaagtacaggaggatgtttgctctctctgtagagagctttctgaggtctctgggtgtacccagagatttaatagaaattcttaacgttaagtcacattccaggaaggaaggaagagttgttcgttcaaataagaaagataaatgttcggcactgtaggccctgtttaccccatctgaggccctgaattcatatattacaagacggaaggattttgcacagttttttatgtagcaagattttgctcaccactgaaaaatgtcagtgtaaatgtgaccgctttaaagatgagtcaagtaattcttggaacagggaaaaaaatgaatttgccaggtcaggagttcacctgcctttgtcagagttgaacccaaccactcttgacctcgactcactcccttagggttaagaaagcccaaacacattcctgagcacagagcaaacactcccatgtcactgaaaagaaacaaaagaatgctaaaaagtgctcagacctgatcacattttttccaatattttttcctttttttttttttttttgagacagggtcttgctctatcacctaggctggagtgcatgtttttgagacagggtcttgctctatcacctaggctggagtgcatgatcatggctcactatagccttgaactcctgggctcaagccatcctcagcctcccaagttgcgaggactacaggtgtgcaccacaacgtcccagctactttttaaatttttagtagaaacgaggtctcactatggtgcccagactggtctcgaactccggagctcaagtgatcttcctgctttggcctcccaaagtgttagaattacaggcatgagccacctcgcctggctggtttttgcctttcttatagaccctgggcatgtaagcatttattagtttgcatttttgaaacagtaatttcaatattttagtgccaatgtcaggccgcttaaacactgtattacatatcttcatctgtctggtggaactattggtgtgatcctagagaactgagtcctattctgccattcatttaaagtgttttaaactctaatctctctacttaatgcacagtagtcagattattctcttaaacatttgcctagtagaggttaaaatagtttaatccttatgaagatggaataacttcaaactcacattgtggcacttagatcttccaccaagacttcatccgtgaaatccacacctccctgttgggttcccaattacattccaaatttacatttcttttgagaatctctgcatactccagctctgtcctgttgatcctattctagaagtgcttaatgcagcaagacacagaaagttaaacgcaaattgctgcaaaattcaccctcagtggaggactagaaacacaacatgtccaatttaaagctcagttcacaagcagttcaattctgctggcatcagaaaaggagattctaattaaacattcttagggaaggacatcaaatgaggttaatgggaaacgttaccagattaaaagcagttttttgacaaagtaacagatttggaaattctgactctctgaaagccttgatttgaacctcaaacttgatttcaccatgagaagtggggatcaagggcctgcgcagttcttttcctaaatcgattcggtgctccccaccccgacgcaggcacaggtccgcaaccagatagggagatgcctgaatttcaggctacctttgacaaagctttcttcctccctccctccctttgcacgctgcatcccacgctgcctgcttaaagcgccctcatgtgtctacagatggtaaaacgtttatttctcaacagacattccagtgatagcatccaatgacctatgtaacggcacccttttttgctgtacgcgttttttgagatggagtctcgctctgtcgcccaggctggagtgcagtggcgcggtctcggctcactgcaagctccgcctcccgggttcacgccattctcctgcctcagcctcccgagtagctgggactacaggcacccgccaccacacctggctaattttttgtatttttagtagatacagggtttcaccgtgttagccaggatggttttgatctcctgacctcgtgatccacccccctcggcctcccaaagtgctgggattacaggggtgagccactgcgcccggccccagtcacttgttcttaagtttcttaagcaaactataaaatagcaaaagaccaaaaaaaaaggaaaaaaagcagttcgcctaatacattgttccagcatttccttgaaagtactgagccatctcaattgctctgattttgtgagaaaattatgaagagttgcaaagtcccagtgattctcttgttacttagctaagaatttgaaatgtaatttaaatactattctttacaatccattataaggattttaaaatctttttgcttctttaataaattctaacaaagttttgtgtttattcttagtttcaaagaaccaggtccccagtcctgggaggctgctcagctggccaagccagtgtttaatctcattatagcagccctgcaggcaaaggcactctggtctgaatctagtctatctgagaaatacacaatgctgctctcatcattcaaggttcttacacattaatgattaattatcagaagtccctttgtctgagaactctgttttttcccacagctcagaggagcttctggggctgccactaagttccagtttcataggaagaattgccacaaacaacttttgcagaataatgagtatattccaaagcaaatttgtctgagaaattatgtagacttctggcaaaaaaaaaaaaaaaaaaaaaaaaatggttcagaagcatgactgtgacaatggccaaagaacttctacagaaaatagcagtgtaaaaagtgctccctgtcaaaaaaaaaaaaaagtatccttttttttttcttttttttttttttgtgtgtgtgtgtgtgagataggattttattctgtaacccaggctggagtgcagtggtgcaatcacagctcactgcagcctccagctcctgggctcaagcgattctccagcctcagcctcccaagtagccgggactagagatgcataccaccgcacctgactaatttttgtattttcagtagagatggggtttcgccatggtgtccaggctggtcttgaactgctgagctcaggcaatctgcccaccttggcctcccaaagtgctgggattacaggcttgaaccaccacgcccagctgtcctgtttttaacttcagatacttagatttgaatttgatttaattgttcctagtcctttgaaagaacccaccttctgtaaattaccatcattgtgtaacaagtcagccaataacatcattactcctctgccaacacctgacgtatagtaggcacttgatgaacactgattgaaagagagagaagatatgaataggtgaccaactccaatatctccagaaaattctggagtctaaatgacttgtgcaaagtaacccagtaaaacaatcctagagaaaataggaggagagagcagagcagctgaagtaacccaccctcaaagccacctgtctggattcaagcgctagctccaccacctcctgtctgtgtaaaccagggtacatttctcaacatctccttaccttggttttctccatgggtgaatggggcaggtaactggagctacttcacagagttgttacgaggattgaatagttaatatttgcaaagcatttggaataatgcctggcactttatatagattccaggcaggagacagtaaccacagagtaatttgccggggaagctttatcaatgtatatggggaagatagatcgacagaaataactagtaacgggagattagctactaaagggtaagaactctgaagacaacaggaatagctgatacagggactagtcactactagaggtgagacagagtacccaagaaaggaataagcttgaaagagcttgccccaccctcaaggctgacattcggccttgttggagagggtgcagctgtggccactggagggcggagcagctcgctgaggtgttgcaagctggggctggcaagctggaagccactcagattcaccaggaatacacctgcagggatgccattaaacctgctgggactccagctggaacaccagcaaaactcacctggaaaccacacacaggggtgttgttgaattgtctgtggagccagcagggagacccacccaacaggaagctgcacaaggcagtgcttgctgagggtgaaagccactggatattccacactgggaccaagcactgcagcagcaagacccgggatgcaccctgaacctggaagaaaagggcccttctgcagtgtcccaccagtgacaaagcttaacatcatgccagctggtgagagagaagtgtttgcagggtccagctctagtatcacaagcagcacaataaagagtggatttggaagcaagaggcaatgaattgataaacaacacatccttagtaagtgctataagaatatttgatcaggccaggtatggtggctcatgcctgtaatcccagcactttgggaggacgaggtgggtggatcacctgaggtcaggagttcaagatcagcctggccagcatggcgaaacctgtctctactaaaaatacaaaaattagctgggtgtggtggcgggccccagtgatcccagctacttgggaggctgaggcaggagaatcgcttgaacccatgaggcggaggttgcagtgagccaagattgcgccactgcactccagcctgggcgacagagtgagactgtctcaaaaaaaaaaaagtgtttgatccatagaataaatagctatgcagcatacagaagactttaatcctatctagctcatctctgggaatgggagtaacaagctcctataagagcagacctagcgttgtgcttaggggcctggactctggagtaagatgacatggatgtgaatcctagctttgccttctgctagcagttaggcagctcatctaacccctctgtgcttcagtttctccatctgtaaaatggggatgataataataccgacctgcgtcatagggttagtgtattaaataagtttataaacaattagaagagcacatattagcttttattaggtagttgcttggtcagaacagcaaacgaaaatatttcaaattttatgccaaaaccagaaatgtaactgggagcttaaaggatgggttttttaaatcagcaggcctgagacatccttccttctgaatcaccctccccctcaattcccatggctctactcctgcctgtgattgacagctgcaatgttttcttactgatccacagcccccagttaggagaggcagttaatctgctcaagttaagtcacccagttagagcaatggttctcaactggagataatcgatgcaccccctgaccccaggggacatttggatgggtctggagatatttctgattgtcacgactggggcaggagtgctagccagggatgctgctcaacatcttgtaatgcacagtataatcctaacaataaagaattatttggtctaaaatgtcgataaagccactgttgagaaaccctgatctagagggttcaggggtttggagaaaggggacaaaagttgagtagatgagccaggacatgtttccctgattcctccagctatgctgggttcttggctggttcagcctcggtgaccaactccagactgtctgaactttgggaggacgaggtgggtggatcacctgaggtcaggagttcaagatcagcctggccagcatggcgaaacctgtctctactaaaaatacaaatttttggtagattagctgggtctaaatgtacaatttctgatgtccctggactactagtgtcacatacatagaaactgaatccccaggtcttccacatcaagaaattagagaatagattcttgaaagagctgctattgaaacaaaactattcaaaattttaagaaatcttggcagaaggcagtttgccttttcccatcattagcaaatattctaatgatgtttgtttgaaacaacattcaaacatgctgtctgtttgaaacaagtttctcttctaagccccaggccccccatttcatacctggagctcagcagaattttactaaggcaatgagggttttagggtggaagaagcaaacgaaaagcatgagaaacaacatgataaaatgaaaagctgctaaataaacaagcagggcagaatactgactgacagttagcgtaaaattctatctgtcttagccacagcctacatcagaagccatttagctagcaaatataaaacatggatgggctgtctgaggcaacacatgtgaacaaagaaaaattagcttttctctaacaatgtaaaccacgtatctcttatgaggctgacaagaatataagtgaaaatggtcgctttgagactgcaccaccaatcaaattgaaatatgaaattccggaaagagctggaaagcaatttttttttttcctgttagctatttatgatgtttctttttttgggtcctacacgctcgaaaccctgcatactaactgctgccctcaacaaagaaccactcatccactcactgtttcctgactggggaatcagcaacttgttgatagttttcaaggaagagtttcagcatatggaaaagacagaatttttcataattaaaaagttcctggttactttcaaatacacacatgtaagtcatttgaaaatacttttcatttgctataatagaagctctttccctatgttttaccaagttcatactttctatttagtctccaaccaacatcctaccaaatacagatcaaagctattaaagggcctgcagatgtaagataatcctatctaagatgatctcatactcatataaatgtcagcattcttccctttaccgaacaacttgccaccacaggccttgtgcacattcaaaatgtgtttaaatcaaaggttttctatgaacaatttctcaggtatagccaaacacgcttatatgttaattcctgctgtaaaagtcaagatacagctggtcagtcattatactgtatttaaccatggactggaaagtgaatcgacaattttttttttaatgttagcacttgctaaggaagcaatgggattcagtctgtgaatgaaaaagaacttacatcagcacaggagatgtactgaattaggagcagggaggccagacctctgccttcctctctggaaagtcaggaagcatcagccacggacctctctgggatctggtgatacatatttctaaattacttcaaacaactcgacaagttatgtaactgttatggtcattaccaatagtaattgtggtcatcagcaatattcactgtatcaaggaactttcaaaagcacctcctttgttcccctgacagtataaactctgcaagatcaaaaagcagtttccataccctctgaatattgctatcagatacattttctaaaataatttggagacaggaggtggccctcaactgttcagaaatttattaaaggcctgctgtgtaccagactctagagggacagaaacaacagtccctgtttagtaggagacacataatctaatattttcctgctcaaaaacttcaaatattgaggaaattcacacttacatttacttcctccctctagcttttcagtgatgctgtgtggttctgcagaaatcagataatggggctaaaatgtgtacattccctattgtgtagccttaacttttctgaaactcattttctttgtctttaatctcaacactttgggagaccaaggtgggaggatggcttgaagccaggagtttgagaccaccctgggcaacatagtgagacctcatctttacaaaaaaaatttttttaattagccgggtatggagtgcatgcctgtagtcccagcaagttactccggaggctgaggcaggaggattgcttgagcccaggagttggaggctgcagtaatccaagatcgtgccactgcattctagcctgggcgacagagcaagaacctatcactacaaaaattaaaaatttgaaaaatttgaaagaaatataaaaagcaatgaaatcacatatgtgaaaatacttcctaaattctaacataaggcattattaacaaaacaaatccttcattaggtctccactgccagccttaggctatccatgaaacaactaaccagttttaatcagggcaaacctgttttcaacacagattatgtgaaagggtatagtcactaaactttttttaaatatacgaacaatacttaaatatcctacttatcattaagtatttctaaatgtctcctgatccaactgtataaacctacttctcaaatcactatttataaagctttcattttttttcttccaggaagaccaatgggttatgatgaattaccaactcttttagggtttgcacagtctggtattaagaaaaatgtttttccatgtaaagtgaagctagcccccagggaaccacacccaagtaatgtttatgttactcgagcatgctgaatttgactttgactcctgatatccataagggtgcatcttccccttccctatcgcagctgccccggccttcagtagttatccaaagtcactcctcttacaaagactaagtgtgctaaatggatttcccttaaactacttgatgcaaagaaatggaggatgtcaacggaatcacccatgattaattgtcaacatgtttcctgtccagcaactcaaaatgtcctaaatcaagcaatactaataatgtccacattggtagttctgaaaattcactatggtctttgatttccacaatgcctggattctctataatggcattttcaaaagtaactgaatattttatatattccacaggacagtcatcatggatcttcaattaaataatcactttttctagcaaagtaagcagcctatctaaaaagttcctagtagatggatagttatccaaaattgatttaattatttcatactttatctgcacaagaaagcaattttgtaagtgaaaatggataacctaaataaactaataagttttcaaactactacagggctccacggctttaaaaagtacagacacagaaaataccactttttatggaaaagttttatttgattttgtaaaacgtaatgttttgagtatacttactttactctttcaaagcaatgaaagtacaatgataagcatttgaataaaaagtaccctgttttatgagcttattttttaacatagtgaaggcatactctcactgaaagtagaaatatgtgatccaattacaaaacataacatttacgaataaacacacacaactgaatagtcatgaaaaaatagaggattagtcaaaatattctgtttaaaaatattaaattcaagttacatggaaattttatgcataaaaatcatattgtataatcagaatgaatcttcagtggtcatttctgaaaaacaaatactaactttagttaaaaagttaaacttttacttctctttttcaaagtattttcaaaacttcactattcaaattaaataggatattttaataatttacttcaaagatattatataattctgatcccaagagatcttcttgtggtgtttataaataaatctactaacagaaaagagtaagaaaagccaatctaggaaagaaaatcgttgaattaagtgagagtcaaagtgctaattcaatctatggggttttttcctccccatcatttcttttcacgttgcctttggagacagagtaatttgtaggcagctcgccttgatctacattttctctctctaatctctcttggctgtgatatagtacagggaaccactaatatcaccccctccattttcccagacaggaatacctaaggccaaacctcatgcccatcctcgggttgcaacaagtaacgtttacttcagcaacaaagtggacctctctagagattatttgttgtactgtcttgttgccttaatacgaattaatcattaaaaaataaattgaaaaccagaaattcaaactgcccatagacaatcatataaaagttgggaaaatgagaaatggagccttaaccattgaaagtctcccctcctccattcctagctcacacaattccaggaacagaatcctcaacataaacctaagcttcccctctgctgcattaagaaagtgtcacttctttgcgtcgaatgggttgaaagctttgggagatgaacgggaaatttcaagtccaccactttcatcaatttcccttgttcttcccgttctcagtccgcactcccaaggcacgggcagcttcgccgggaagcggcttgagggagttggcctgcctcgtggccgtgggggagggcaggcaaggcgcggtggcgcacagcggagtcctcttcagctttatcacccgctggggtgtaggcttcttgtcggagagtagcaccttagctggaggtaagtgcgtgcctccattttcagcgctcgcagccccaggggaagcctgaggatgcccaggtgcccccgtgcccaccagggccgtggctctggaaggtgcagagcgctgagctgcctttctgcggctaccactttgaaaccggtttgctgtcgccccagccgacgtctggatggcactggctggagacaccgtgactgaggccgagttcttgactttaatttgggtacttgtggaagggcccaaaaatctaactggcttaggaccagtcttatagttcacactttcgtccgcttcattgaacgttatcagtcgcctagaaatacagaagcgtgtcattttccacatgtatagttttagtaactcatgaaaacatctcccaagtttaccttcagcattaacagaaaggttttggtcaagaattaaagagtcaagaggtttatgggcacctacctcatctctcatctcccaccaaggtcagtaagcaagtttacaaaagattggtcttaatttgaatacgaattatgtaaactcacacacataatattaatactagcaaattaaaatttggcactttacataagaatacaatatatcaccctgttcccaagtatcatgatgtgacctacgggataaccagaaatatcacaaattgtttttcccagaactgcagtttaaagagatttagtaaagaaaaaaaaagatttcacaatcaaataaatattagaaatattgcttgatatagtttggctgcatgtcccccccgaagctcatgttgaaatgtgatccccaatgttggaggtggagcctgacagaggtgtttgggtcatgggggaggatccctcatgaatggctttgtgccctctcccatggtaatgagtgagttctcactctattcgttcacgtgggagctggctgtttaaaagcctggcatctcttgctgtctctcaccgtgtgacatatctgcttcccttcaccttctgccatgattgtaagcttcctgaggcctcaccagaagcatatgctggccctaaccttcttgtacagactgcagaaccatgagtcaaaataaacctcttttctttataaattacccagcctgatagtcctttatagcaatgcaaaactaataaactgctgcatatctttttttcttcttgaagctttaaaattcatgttaacatattaaagattatgaaaggcctatactaaagatatctgtatttcccaatcattctatagtgaaacctttgatggccagtaaaatttgcattctttggaacccattttggggactgctagaacagtcatggacaaaccttcaaagattccagaactgagtttaccattcattataaaaagcctacgggggaacatttttttaaatgaccttaaaaccgtcaaacaatcattgtcaaaaccttgcctgctccttcagcttcacttcctgaggaccaccccaagcatgaaaggtgactgcaatcctctcactctgctctcttgcaagtctgcatagcatcaatgtgtcattagaggcgattacaacttattcaactcccattcttggaaatgggatcataataacgtggttatttgaaaattgccatctgtagcaaagagtgcaaatataatatattcaaccctaaatccctactgaacattttccctggtcaccagatggctccttgggaccttacaagtgcttctcagtcatcatcatcgttatcctgttgatgcatcaaaaataatgcttcgtaaacttgtagaggaaagataactaacacagaggagggtctccgtaaaccactcctgcctgcctgctatgttttccatctacatcttccaccagactccacactgaggtttctcaacctcggcactattaccattttggtcacataattctttgttctggggggctgccctgtgcactgtaggatgtttagcagcacccttggcctctaccttctaaatgccagtagcaactctcaccccacagtgtgtcaactaaaaatgttgccaaacattgtcaaatatcccctggaaggcaaaatcacccctcgttgagaaccactgctcttgactcaaatatatttgctaactgtaggctcaaaaggtaaaataaatgataataaaattatggcttttaagaaataagatctgttttgacaagtgatggttaactactaaaaactgaataagcatctccgcatttcagtgaaagacccagagggcaaatgtaagaaagtagtctgaaattccatacgggcattcaattaaattgtagaacatgtgatcaagaaatcagaacatctgaaggccatgaataaaacccagacactgtaaaaaaaatgtgattttaaatgtatttaaaacacagtgaaagacacagctgtggagtgaatttaatgctaataatttcatggaacacaggaaaataccatttaataaaagtgctatttgtggcaataggaaacagaaaggaactcagaataagccacaagaaatttcaagtattaagtctaaatagattttttttttactattgccagtaaagcctgggattccacttctgtggagcaaaaatatttaccacagcatgcccactgtgtccactagtaattttagaatcactctctcaataagaacatgttacacatgcagttacaaagaattatagccactttttacatagttttggtaactttatatttatcaagatctatattttgatggtaagacagaatattcaaatcggtgattaataagcttagtaaggtcaagaattattattcattttcccttcacaaaggcagtaaaaatgtcagcgattaaaaaaacaaaacaaataaacaacacagcatagataacctctttcgaattggagccatgtgacgcaggcttccaagtaaaggccgttcttctagagtccaacactctatcagctcatgaggcacccgccagtagctaacacctggaaggtaaaaagacataattaagacagctaccatccactgcaaaatgctgagcaacactgtttcgcctaagacctgccagagtctgaggttcatgcctcccgtttggcaaagagaggtgtgcacaacatgaacaggaagcgctcacacgaggagctagggccagggagcaacacagctcacgacctgggtcaggaagagctggccaccagctttgccactgattagctgagaagattcagcaggttatgatgcatactcagggcagctgagagtgagggctcaggctccagcaaagcctgtgtgggtctcaatctccatctctcactcactattcatgtcaccttgggaaagttacttttctgggcctgaattttctcagctgtgaaatgatgacaataatagtatgtaccttgaaggaccactgtgatgattaaatgagttaataaatgcaaagtgcttagaacagggtctagcacagactaagcactcaaaaactgtcaagtacctttattcccagtagtcgtagggagcagtataagtattgtatagggggtgggttgtaacacttgccttgtctacttcactgggttgctgtaacatcaaatcaggggaactttgtgaactactctgaaaatggcaaccactgtacaaatatgagacatcaccacccgataaccaccttttccaacaagaatctgagctagtgagttaggcaaaaatgccattcaaattcattttaatttttaaatctgttatgttttttattaagagctgaaaaatgtatttattcttgaagcctcgaaaacattatgctaagtgaaaaacaccaaacacaataggtcacatttgtattgttccatttgtagagctatcaagagtaggtaaatccattgagacacaaagcagactgctggttgccaggggctgtgggagacagtggagtggggagtgaccgcttaggggttccttttggggtgatgaaatgtttagaactggagagaggtaatgattgcacaacattgtgaatgtagtaaataccaatgaaatgtatgctttagttaattctgttatgtgaatttccatctcaattttttttagaaaagaagcataaatatatacacatgaaaaaagctcaaggaattatgttgaataaaaattgcttggagtaatctaagtcccaataatggatttggtgttgtcttcttattaaacttctggtaacaataacaatttagcaagctgggcatataaatcattataatgatagacatatctgatactcaaataactctatgatcctcattttaaaacaattaactttctggaactgcttgatcacactccaaaacctacacatactataaaaacattcccaaatccggtccattaagtttgctttttctaaaagtcagatttattaagatataatttatgtaaaataaaattcacccttttcaggtacacatttcaatgagttttgacaaatggatatagttatgtatccatagtcataatctgtagaccacttctatcaccccaaaaatttcctcataccccttagcaatcaatgtcccctccatatccttagttttgccttttctgaaatgtcatataaatgggatcatacaaaatgcaaccttttgtgtctggcttctttagcatgatgctttaagattcatccatgttgctgtatgtagcaatgatcatttcttttatcagtgagtagtattccactgtatggatacaccacaatttgtttaaaaactttctttttttttcctgcctataaagtaattcacatcccttgtacaatacctggaaaatatagaaaagtatatataagggaatcaaagtcactcctaatcagaagaccaggaatcattggctcaggacagactaatatgtttcattccagtcttttttctagtcatatgatatactttacatttatttcctgcttttcatcatttcttatcatgggcattcatctatgcaaaaagttatttaaaataactttaatcgctttattatattccattctgtggatgtgccaaaatatatttaaccctcaatcattagacatttaaagtgtttttattttgtctctattatgaaaaatgccagagaacatttctgttcctaagcctttgtctgtgtttatgtccttaagatagataagatagattccaagaagtaaaattactgggtcaaagaatatgaacaattgtgatgcactgatgtgacctaacaagttattttccaaaagttacatcaatttttactcctaccaggaatgaataagagatctttactcatctggtatataaaaaattgtttttattaaatgtatatttcattgataaggaatgaagctgaaccgcctgccacgtgtttacttctttttctgggaattttatggtcatgaaccttgtaatttttttttttgtagtagtggttgcctttctaatcaattttaataaactttctttctattaaggatatactttgtccagttaatgcaacattatttatcctagttttttattagtctttaaattttatttataatttttaatgtttcttgtttttttgttttgttttgtgtttaacatttatgcctagtgttccattattggaacactaagcatgtgggagttatttatatcctactgctcaaggtcatcgccaagatctgattgcaaaaattcggctcactgcaacttctgcctcctgggttcaagcgattctcctacctcagcctcctgagtagctgggactacaggcgtgtgccaccacacccagctaatttttgtatttttagtaaagacagggtttcaccatgctggccaggatggtctcaatctcatgacctcatgatccacctgcctcggcctcccaaagtgctgggattacaagtgtgagtcaccgtgcccagccctccttcagctttctaaggcagtgggctcctggacatcttgccagtccagaggcacaaagagagacacagagaacaccatggagtttgttctccaacttgagcataagtgtctcaaagtaaattaaatataaaatagaaagctgaaagatgtcatcctgcctcttgaggggtatgactggaaaggaaaaaggaaggaaagtgaggggggcaaagttgaggaaaggaagaaggactggagctggcacgacacctgaaggaagaacagctgatacagtgttttgttttgttttgttttgagacggagtttcattcttgttgcccaggctggagtgcaatggtacaatctcagcttacagcaacctctgcctcccgggttcaagccattttcccacctcagcctctcaagtagctgggatcacaggcatgcgccaccatgcccggctaattttttgtatttagtagagatggggtttcgccatgttggtcatgctggtctcaaactcctgacctcaggtgatccacctgcctcggccttcaaggtgctgggattacaggcatgagccactgcacccagccaatgcagtttttaaaagcctcttcctctccttttatgtcttgctctgtcacccaggctggagtgcagtggtgtgataacagctcactccaccctcaaactcctgggctcaggcaatcctcctgcctcagcctcccaagtaactgagacaataggtgcatgacaccaggcccagatcttttatccattgtgtgactggcagtcagtctttactagctttcaggattatttgaggatggaataagtcttatttatctttggatccaattttaggacttgttatcatactttgcacctaacagacactcaatacatggttgttaattaagaaaaaaaatgcttaggcatagaacagaacacgtaacctgtgatccttatgaaagtgtcaaagcccttctgagactcagtttcctcatctataaaataggaatggtaagtagcgtacaggattgtgttaggactaagagatactgaatgtaaactacttatcggggatataaaacagcattattattaccaactctcactctgtagtttgagaaaaatgaccagttttcaaagtgtacatttaaagattattgtaattattttataagggctctttagacatcttctccaacattattttctctccctttccttgattacatattttatgcttaatttgaagtatttttccaatgcacagtaggtactaaatgaactcttatttaattaaattaaataagcctagctaacagaaacatacctagttactgaattataaactattaataatatctagcaactcatgggatttaaagatttgtaagtaaactgcctcagtgttatcatgagatgacaaatacattgtaagactcaaaagaatactttctaaaaaaagaaatgcagtatttgagcttactttgtcttttttttttaaagtccacctgcttccatgaaataaaagaattgcactgtaccttttccttcccaagcatcaaaggcatccatcattttcttcaactctgctactgaataatagctccaaatgtactgaacattatttcccgcctctctagaaatattgcaaagagtaatgaaaatatactacctaggtatggatgtgcatatatacatacagctaatatacatttaataagagcttgttaattaagggaaaaaacatgtaagcactgagtagttgttctgtgatccttaagtatacatatgcttacacagatacatatgtacacattatataatatactaacctatattttgatctctttttatcatagtattttattaattccacaatatgcaccatgtagacaaatcaacacatctttaatatcaagtttttaaaaaaaatcagcgaactccaatgaacttagaaaatattcacgtttcaccagcattatgccaggcacttacacatcttacatagaagcatccctatctgtaaagaattcagaaactgatgacatatttaataatctcaaaaggcaagcttatatgatccttcattagtcactaatattcgacccaatcccatctgccagagaatttttttaaaaattgctaagagaattaaccagtgtaaataagattataggaaaaatattaagtaataactcttaagaatttaacatgttcaagtcataaaattctaaagctggaagggaccagcaagtgcttcgtcatttctcagaagaagacaccaaggcaggccagccctgagtcactcagtaggcctgc

SEQ ID NO: 5639 - DNA, 102058 bp, Homo sapiens
  KIAA0089 gene - 32123148 - 32185205 of chr3; NCBI Entrez Gene ID: 23171; Build 35; sequence includes 20,000 bases upstream of initiation codon and 20,000 bases downstream of termination codon of the gene
cttccctggactcctgggcacaagataagttcccacttccctgcccctttgtgtgatggttactatgggactgaatgaagggggatgaatgcagaaatgaaaacttaagacaaaagagtctgttttaaagaaggtgtcagggggctccttgtttctagtgagcaagggccttgagcttccacagcccttccacagtataggtaataatactattactataaatttattgggtagaaagagcagggaggaggaggtaatgattagtcagctgcttgattgatcacaggttcacattattgataacaggcttcagatgtgcctaatcacaagaaaccctgcgcctggggcatgactgtcctcagcgtttcttctgggcagcagatgcagtttgtcagtttgccaacatcctgctttcatgagaagagtttgctgtttactcatatagcctccagtggtaaactgagtttatcacgaccctcattcttttggcctccaacatctccctctttttgtttttgcattaactgaataagatctgtccctatgttatgggggttgatgtcagcgtgactccggtcagtccttgctctgtcttctcgcattcagattcaactggctcatggctcatactgggggaaccaggcctgtgcttgggatccataggtccctccagtctaccgttccatggtcgcacacaccttgagggtacccacaaggtttgtccgtctcctataaaaactcaagcatacccttgtccccatgttagtaaatccactgaaaactttccactgataatgagagacaggctctttctgattaacagaaggcgcagagaaagcaaatcgaggcctatccttcttgtgcaatagtataacaacaacaaaaaaaaatccttaaaatctatcactatgagaagcctgtccctcggaatggccgcgggggatggcagaccctgctgcaatgcacccactggtttaatctgtgcattaatagctctcaaatcatgtagcaatcgccaccttcctgacttttttggaatcacaaatactggtatcagtttatcctgtgataaaggccattgctccacccatacaggtttgttagtcagccactctaatggcaaagcagtgggtggaggaggaatatcaatgaccctcgtcagaaatcctgatgacttagcccttttctatctgtctgttcagttattgataatgattcagggtttccttggaggggctttcctaagacatttctgctctgagatcccattttctttaacattgtaaatcctagattatcaatagtttcatttgtaagtctcatatctcatgctgtaagtaaatcttgaccccatagattaacagctatatttgcaacataacgttgaaaagtacatgactgtccatccactccaagacagggcaaaatcgcagctctctgttgaacactttgagctgttcctactcccactagggatgtagaagttaattgcagaggccaggacgggggccaattgtttttagatattactgacacatcagctcccatatccataagcccataaaacttctttcctttaatttgcactgtacagtgggtctattagatgctatgggttgtgatagataaatttccctcctagttgtactcccaaatcctttattctctcatttctccttaagtggagaagggtgtaatttacagggaataagcaacagtcaagcaatacattctcccggttcaaaaacccaaagatcttgtgacatcaccatcacctgaatttctccttcataattcaaatcaacaactcctgggactacagtaatgccctgtaggttaagatgacttttgcctaaaattaatcccatacatcctgttggcaagggtccccaaataccagtgggaatattggcgagtttgtctcctccaactaatgcaacccattctctgactgggagatctaatcctgtacttccaggtgttcttaagccttttgtacatctcacagatgccagtgcacatttacaatccatgtttgcatccccaaaagccaaagccaatgctagcatttctgcagccacagaagaagacagtacaagccaattatcatcctccctctcctgttcaccattttcaataggtgctgtgggtagggcaaaagactctctcaaattttcagaacataactcctgctgtcccgctaaataagaaggaaacaatggcaaagaacagcatgggccaaactccaaacaaaaacagaaagaatagataaattctgccccatgttaccttgattcagaaacttcccattcccagtacctctttaggacactgaccttatatcagctgccggcagactcgtcccggggtttctcgttcatctggtcagttttactttctctgctccagcagaccttcttcattcatgtccctgtatgtccctgtcggttcctgttagtccctgcaagtctcttctagttcctatttttccctattgtctctatttttctctatttatctctatttgtccctgcaggtccctgtttaggcaccacttgtgatggttactatgggactgaacaaagggggatgaatgcagaaatgaaaaacaaaaacaaaataatctgttttaaagaaggggtcagggggctccttgcttctagtgagcaagggccttgagcttccacagcccttcgtatttattgggtagaaagagcagggaggaggaggtaacaattggtcagctgcttgactaatcacaggttcacatgtgcctaatcacaagaaacactgctccttgggcatgaccaccctcagcattccttctgggtggcagatgcagtttgtcagtttgccaacatcctgctttcacgagaacagtttgctgtttattcatatagcctctagaggtatactgagtttatcatgacccttattctttcggtctccaacacctttaatctgtcaggtccgtgtaacatgctttggtcaatgaaccggagcagaggagatatgcgtcaactccgggagaaaggctttcagggccagtgaggctttaatctgtcaggtccatgtaacatgctttggtcaatgaactggagcagaggagatatgggtcaactctgggagaaaggctttcagggccagtgagtgattagtcatgttccctgcccactcccatcacaaacatgaccctccagatggtagacactcagttggtttgcaatcctgggtgaggaaaatgtgaatccccagccagcccaggatggacacacagcatgtgggagaaagaagccatgaagatgcatgaattttttgttattgcaacatattctcctttattgtgactggtacaggctagtatagcaccttttgtgtaaaaaaagaaaagggcagaaaaattaacccttttcttgtttagaaaaacaaagtgggccaggcatggtggcttatgcctctaatccgagcattctgggaggcaacagcggacagatcaccgaggtcaggagttcaagaccagcctgggccaacaagtcgaaaccccatccctactgaaaatacaaaacttagtcaggcgtggtgatgcccacctgtaatcccagctactagcgaggctgaggcaggagaaatgcttggacctgggaggtggaggttgcagtgagccaagattgcgccactgcactccagcctaggtgataaagcaagactccttctcaaaaaaaaaaaaaaaaaaaaaagaaaagaaaagagaaagaaagtgcagctcgctgccagtgctcatttaattttacataaacatgctcttagagactgaagcaaatctgactgattttcaatgcgaatataaaatatgaaaactgttcttggagttatttctaaacagagctaacatcagagttgtctgaatcaccagaatcatctatttcagaaaaattgaattcatcaaatgaatcttcagccaacaactctttgagaacaatgttaacatcacgtataggaatgctacattttttaggatttgccaccttcagtgattgagaaatattatattttgtaaatggaaataccactactaaaaacgtaatgctataaatattagaattatgtcttttgtttccaaagttgatatactagagcaatgcaaaaataataatacaagcaagatattttgtggcatagttatcttagggcaaatgctgcagtggcaagcactactagcaagtattcttggggcaaacgggaaaaggactaaatgtataatggtattttctcatatgcaggcatacacaaaaaacaaataatagtggttacctgagaaatggagttgggtaggaattggatagaggacaagaggaagagaactgctctttactgtacatctttttatatgttccattttagaacaatgtgatttcattacttattcagacactttaatttaaaaaaataaatagaagcataaggacattatgtagaaatatggaagtaaataccagaagaaatattgaaagtggttgtttctaaggagtagaatctggagagagggttgctgctttccatttagtatttactatttccacttagatttagtagttggtactagatcattttaaaaaccacgtgcatgtactagatttttgatttttaaaaattaagagaaaaaaccccagagagtgaccaaccaaacgtcatgtgaagcaatattgcaagggctaaattttatccacgtctcatatgttgagaagtgacataagaatataaatttttgaactgctccaaaatgccaatcttttacaaattaaatcacatctcttatacttgcaggtcattcatggaaaactgcaatcagtcttgaatgctgtctggcataaaatataaagcaaggattggtatctgatttcatagtttagaaaagaggaaaaccagaaaagccacagatacttttgcttttgccaagaaggcaacttctgcctcaaaacatcctctgtcctatccccctcccaccaccacctacctagctgtccaagtaaaaaatctgaaagtcatcgttaactctccccaacattgccagatctggtgggttctacctatagtcctggatcacttaggttcaaatgctagatcctataggttcttcctttaactggtccacttttttccatcccttttgtatgcaacagcctcttacttaactgttcttgttacttccaactttgccccttctaggacatctgctttgctgcaacacgagtaatctttttttgttttgttttgttttgagactgagtctcgctctgtcgcccaggctagagtgcaatggcgtgatctcggctcactgcaagctccgcctcccgggttcacgccattctcctgcctcagcctcccgagtagctgggactacaggcgccagccacacgcgtggctaattttttgtatttttttagtagagacggggtttcaccgtgttagccaggatggtcttgatctcctgactttgtgatcctctcgcctcagccccccaaagtgctgggattacaggggtgagccactgctcccgggcaagagtaatcttttaaaaacaaatatggctacctcactcaccaacctaaacacttcaatattccctcagtgtctccaaaagaaaatcaaaagctctatgacagaagcctgcattatctggcctccaccaaactgtctgccttatctgtctttattctgtttttcttaatccttttttctttcctttctttcttctttttttttttttttttttttgagatgaagtttcactcttgttgcccaggctggagtgcaatggcaccatctcagctcactgcaagctccgcttcctgggttcaagcgattctccagcctcagcctcccgagtagctgggattacaggcatgtgccaccacttccggctaattttgtatttttagtagagacggggtttctccatggaggtcaggctggtcttgaactcccaacctcaggtgatccacccacctcagcctcccaaagtgctgggattacaggcgtgacccaccatgcccggcctccttttttcttttttattgactttgtttctgatttttaaaaacaccttatctatctatctatctatctatctatctatctatctatctatcttgaggcaaggtctgtcacccaggctggagtgcagtggtatgatctctgctcactgcagcctcaatcccgggggctcaagcaatcctgccacctcagccccctgagtaggtgggactacaggtgcttgccaccatgcctggctaattcttgtaatttttgtagagacagtttcaccatgtttctcaggctggtctcgaactcctgagctcaagggatcctcccacctcagcccctaaagtgctgggattacaggtgtgcaccacggcacatggccgttcatctgtctttatggcttgaattatcctccaacttattgaattttcattttctcaaaagaaccgatgactattttcattttgcctcctaaccttcacccatgctgttctctctgcttcaaacactcttccccgacttaattcctactcatccttcaattcaggaatccagaaggtcttacctgacaccttgggtccaggttgctgcccctcccatttgttctggcgtccctcatctctcatcaggggaacataagggtggatagttttgtagatacctgctttgttctttatctagtctcccttctggactgtaagttccatgagggcagggactttgttttcttcaacattgtgtccttagctcctggcacatagtgagttcagtaactatgtgttgaataaacaaatgaaaaagacaaactaaaaaccaagttcaggctggacacagtggctcacgcctgtaatacgagcactttggaagaccaaggcgggcagatcacttgaggtcaggagtttgagaccagcctggccaacatggtgaaaccccatctctactaaaaatacaaaaattagccaggcatggtggcgggcacctgtaatcccaggtactcgggaggctgaggcaggagaatcgcctgaacccaggagtcagaggttgcagtgagctgagatcgtgccactgcactccagcctgggtgacagagggagactccctctcaaaaacaaaacacagaaaaccaagttcaggtggatatttgacttttaatcaagcaaaaattctgaatagatatgcctttctctggtcagttacagtgctaagtctggtaaattcatctttaaaactcccaagttctccaaatgatccaagctggctgacaccccagacataatctataataatacacagtgctgggctaagagctggcttctaaaccaaaagtagattatggtagtgtggtttataaaagaagcaacaaattttcacactgtcccaatttaaggaactggtgaaaacgtgcagttgctggataaaacctggtacacagacctcttggataatgtaataaagtttgatgtgaacagattacaattgacacctgctactgctaagtgcctgggtctctatttgggtctttcaagcagccaaatctgccttttatccattatgtctctattccccaaggaagtgagataaaagccaatataagtttccagaaggaggcattgttttcttctgccaaaaatctgtaatttatcactggactgtcaataacaatattgaagatgggtaattgcatttgaaaccgctataccaagaacaaatgtcaccaccagagattgtatggtgtgtaatgaggaagcaaagttgtgatatatgtggggtaaggcagaatagataaaatgtttctctacggtggtccaagtgtatgttttacttggaattagagaaataaatgtaaccaatatcagcctgtgaaaaagttttcagtgtcacagagaaataagaaaaataaagactttgggggagtgttttccaaaaagataagttgttttcttttaagttttcattatatgcatccttttcttatgttgactgacatttttaatgcgaaatgacatctagtgaaaaagcaagtaacagaacaatgtgcatagcatactaattaaaaacaagaggagccaggcgcagtggtttacgcctgtaatcccagcactttgaaaggctgaggccagaggatctcttgagcccaggagttcaagaccagcctgggcagcacagtgaaacttcatctctaccaaaaactttttaaaattggccaggtatggtggctcgcacctgtagtctcagctagttggaaggatgaagtgagaggatcaattgcttgaagttaggaggtcaaggctgctgtgagccatgtttgtgcctctgcactccagccaggcaacagagcgaaactctgtctcaaaaacaaaaaaagagagaggaaaaaaatgtatttgtatatgcatggaatattcttggaaggatacacaaagaaattgggattgagaacaagggtttcttcaaaggagggaattgggcatctgctgtaaaagaaagggatttcactgtatacctctttaagacttttgggttttgagccaaatggatgcattaattattcaaaatataagttaattaaagtaagattaataagatgaattaaaataaaataagatgaaataaaatggtaatcggatatggtaatagcttatgtccttacttggagaaaatggacaagtctctgtcagacatcaaaagaattaaaaatattttaatctgtaaaatcctgaagtcctatttttaaaaataaatatctaacacactgatattaagtaaatatcttctcattttagttaaagaagatgcatgtatcagtttgtcccgtcactggcaatgactttgaccatgtggttaaggtggtgtcagccagtttactctacagtaaagttactgttttatcctttgtaaacaatttgtgtggacactttaatgctaaataaatatcctgtcccacatcaaactttcgtcactattgttagcatccattgatgattgtctagagccatcattctttccatatttatgggttgacatttgacttgtttgtctgccttgtttgtttacttatttcccttctgccttgtttgtttacttgtttctttgaatcggtataggctcatgaacttttattcaaagagtttaaattcataactattattattaattttaatgcatgcattgactcagatttgcctagtgggaaatcctttttttttttttttttaatactatggaccacaagaccctgctatttaatctgggctgactgtgtctctgactgaaatgctcctctctctcatacttacttattaattatagttttctgttcctcaaacatgcaggctctgcactgcctcggggcctttacactagcagtccccctccctggagttgtcttcttcccaccttcccatggcaggctccttccatgcgttcagatgtctccttctcagagaatttttctgggaccatcttgtctaatataagactaatcccttggctgggcgcatggctcacgcctgtaatcccaacactttgggaggccgaggtaggcggatcataaggtcaggagttcgagaccagcctggccaacatggtgaaatgccatctcgactaaaaatacaaaaattagcctggcatggtggcgggtgcctgtaatcccagctactcgggaggctgaagcaggagaatcacttgaaaccagaaggcagaggttgcagtgagccaagatcacgccactgcactccagcctggacaacaagagcaaaactctgtctcaattaaaaaaaaaaaaagactaatttatctctcactcttactcccaatctcattctcagtctctcttttgtatttcattttatttaccttttgagacagagtcttgctctgtctggagtgcagtggcacaatcatagctcactgcaacctcaaactgttgggttcaagggatccccctgcctcagcctcccgagtagctggaatcacaactactcaagagatcctcctactgggattacaggtatgaaccactgcacctggcctctcctgtattttagatatctccctctctgttggctcctccccaggactagttcaacatattctagcctcctccacatgatgtaaaacaaacaagcacaaaaaaactaaaattattttgctactctttagttttgcctctccttttcctcgtgtccctagctctcatcttctcacagccaaacttctagaaaacactgtctactgctgcagtttgaatgtctgtgtcttctccaaaattcatgttgaaacttaatccccaatttgatagtattaaggggtggggcctttaggaggtgattaagtcatgagggctctaattgggaattatgactttatttgtttatttgagacaggcttgctctattgcccgggctggagtgcagtgacacaatcactgaagccttaacctcttggcctcaagggagcctcccacctcagcctcccaagtagctggggatataggtgtgcaccgccatgcccagctattttaaaaatttttttgtagagacaaggtcttgccaagtggtccaggctggtttcaaactcctgggctcaagcaatcctcccatgatagcctcccaaagtgctgggattatagtcatgaaccacagcacctggccagattatgacttcataaaagcgatacagggaattaggcccttttttttttccctctgctcttccatcatgtgaggacaagcaagaaggcctttaccagacactgaatgccagcaccttgacctgggactttccaggttccagaactaagacataaatttctgggctgagctcggtggctcatgcctgtaatcccagcagtttgggaggccaaggcaggcagatcacttaaggccaagagtttgagaccagcctggccaacatggtgaaaccctctctctactaaaaatacaaaaatagccaggcataatggtacaagcctgcaatcccagctactcaggaggctgaaacacgagaaccacttgaacctgagagatggaggttgcagtgagccaagatcctgccattgcactccagcctgggcgacaaagggagaccctgtctcaaaaaaaagcaaacaaacaaaaaaattctgttctttataaattgcctggtttcaggtattttgttacagcagcacaaacagactaagatatctgtactttctcaagcctcacttccctaccttccatttatttatacctccacccaccacacaatgagtttatgctctgccccaaaactgaaagtgacttactctgaccagatacagaaaaaaacaggcctgtggctagcccatatattgctttcatatggactggaaaaacatttccctttttcaagacgcttgcttccatctatcagaaaatagtcatcttaggtataccaatctgcaatgtctgcaatgtgcatggtgcctgctggtgttgtgcagtgtgctacctgcacaaccatatgaggaccctaccaacatcctccaagcccgaaagatacattacacggccgggctcagtggctcacgcttgtaatcccagcactttgggaggccgaggcgggcagatcacgaggtcaggagccagaccatagtgaaaccccgtctactgaaaatacaaaaaattagctggacgtggtggcgggtgcctgtagtcccagctacttgggaggctgaggtaggagaatggcgtgaacccgggaggcggagcttgcagtgagcagagatcgcgccaatgcactccagcctgggtgacagagcgagactccgtctcaaaaaaaaaaaagaaagaaagaaagatgcattatactttagtcctatccatttttttttttttatgacagtcttgctgtgttgcccaggctggtctcaaactcctgggatcaagcgatctgcccatctcagcctccccaagtgctggggttacaagcatagaatagccactgcacccagccctagtttttatttgaccactttcaactcccctgtgaccatccttccttcttgaaatgttgccttcctttggcaactgtgataccacacaatgttctcattgtttctttctcatcctctcatgcttctcttctttaatattaagtccattccagagtctatcctggtttgtcttcccatctctctgagtgatcccaatcactttcattcaacatttattgagtgcccactctgtgctaggcattgttctaggcactgaccacttgcaacttctaagtacatgctggtaaatgacaaatgtgtctatctcaggctcacatatccaactgcctccctgaaatctgaacttcgatatcaaacgaccttcccccaaacttaacttgtctagaactgagttcatcatccttctctctagatcggtttctcttcctgggttccccattttagcaaatgatattcattcagttgcccaagactgatagctggagtcatcctagacccttttctctctcccacctgagaaagtagtaagtctcttttttctgcttcctagatatgtctgactttcaatcacctgtctccatcactgttaccaccacactggtctccatctcactctaagccattatgatggctcttatagaatacagcagcaggctccttcctggcctcagccttcgggacttttccctgtgaattcatccagagcatgcttcctatgacacaagactgatgatgttaagctcctggtgaaaccctataatggtttttttggccttcaggatttcagttctaattcttcaatatgctttataaggccaaccataatcaggtacctcctctacctctctgcttttatttatttccattccccctttcccctcatattctgtcactcattcattcttccctccatccatactaaactcctcttagcttctgaatatcccattctctctctagactctgaactttggcctgtgctgttccctctgcatggagcagctcattagctgctctcccacccctttactttgccgatgctaccttctcttcaggtttcagcagagatcttactttatctaggaagccttccctaaactcccaaatctgggacaagggtctttttctgagctgccatagtaagctggtaccatttatcacactagggtgtttccctgttcattggtctacatcttcctttaaatataagcatctaagaggtcaggaaccttgcctctcttctttgtttgtttttgagacagactctcactctgttgtccaggctggagtgcaatggcacgatctcagctgactgcaacctccacctcctggggtcaagtgattctcctgcctcagcctcctgaataggtgggactacaggcatgcaccaccacacctggctaatttttttttttttttttttttagagatggggtcttgcccaggctggtctcgaactcctgagctcaagtgatccgcccacctcagcctcccaaagtactgggattacaggtgtgagccacctcatccagcttttgtttaatatttaattcttgggacccagcacagtgaccagcacatagtaggtgctcagtaagtacatgtagaataaatgaacagttgataagtgcaggatatgaatccaaaaattctggtcctgactcaccactggacccttggaaagtgtttattagtgttgctgtaccttagtgtcctcacttgtaatacgaatatataatatagagcatggcaatggcaattttaaaacataatccccaaattctttgacacttcttttaacgagaggtagagcctatgtcccttcctttagaatttgggctctgtaatttcttgaccaaaagatcacaacaaaagtgatgtcatggccatttctggactcaagtcttaagaaatcggcaatttccattttgtttttcttgggatgcttccttgcggaacgcaggcactatgccatggagaagcagctccagagaggcccacgtagaggactccagcctccagccctcagcttctgccaagctcccaggcagcaacacccacaatttggcagccattttggcctccatcttgctccatccaagcaaatcatcttggaagtggaccttccagccccatttgaacatccacccccatgtaagattccagagataaagaaatgttgtttaagatctacattttggtatggtttgttatgcaacaagcaataatcaggacagattttgatacctggaagtggagtattgataataccataacacgcagcactggctttgggactgggcagcagatacaagccagaaacgcctctgggagcatgttagtaatggtgtaggaggctgggagtgaggacttaaaagtgagggaaatgttatctggagagaggaaaggggactccagttacatagaaaagtttggcaacactgttgccgtggccttctgtaatgtggaaaataaaaagtgtacttcatgaactcagtgacctttctaagaagatttctgggctgagtttccaaagtgctgcctgatttttacttggctagctagtggcacctctttctaccacaatgcatgaaccagtcatgttgttaaagacattgtctccatgcatgaaattatagacaccctatgccaagcttgtccaacccacagcctatggaccgcatgcggcccaacacaaattcgtaaactttcttaaagcattatgagattctttttgcaagtttttgtttgtttgttttgttttttagtttatcagctatcattagtgttttatgtgtggcccaagacagttcttccagtgtggcccagggaagccaaaagattggacacccctgccctaagccttctccaggtccccgaagagttggcactgtcacaatgacaatggctaaccttttgtcttccaggctactcaacccttttggagaaggtggcaacatcgttggcactgtcatcttagacaaaagagagtgggactggcagaagatcagctatctcaaaattggaaagcaggtcactagttcctatccactgtgattcgtctggcattcttcagtcctctgtactgtggcttctcctttcccccatgattttcattaaacatctacacaaaaattatttaatatgtgcaaaatgtataaataactaatcctgcccttcaccatatccatgatcctgcattttgtgtgtttcctttctttgttttcctctatggtttcactacatgtgaatccctagtgatagatttatttttgcttgtttcttaactaacagaaatgggatcacactgtatgtattctcccgaaacttgctttattctctcaacattaagttcataaatttcacctatttgttttttgtcttaatctttgtaaccagtctgtaaaaccaaatgactatcctctctgttctggcacaatgtgctgtgcatatcaggtgaccagtaaacactgtaggatgatgctgggcaggatatgtccacagtgttgggagaaaagctgagtgttgggagagaacctgaggcagggcttggaacatgtcaggggtccagggtctaaaacccctcgtggcctttggaatgggtctagacttgcgggctccttgcttttagcactcccattatctcaagtagccatatgtttcaaagaaaatgctaaactctcacagctatagctcattcgcttgatacgccacttccttccaacccccacatcctcaccacctgtttctttgttttatcaccaataaatagcgtgggctcccagagctcagggcctttgcagcctccatactagcgttggccccctggtcccactttctctcttgtcttttctcattcctttgactctgctggacttcgtagcacccacagcttagtgttgggtctgatcaccccaacacacagaataggtgggtagctcacgttcatgcaaatgtagttgtaatattcaggaataagagtttccagagaaggtacaaaacttttacgtgacccccaaaaaatttaaaaaaaagaaaaaaaaacaaaaaacttttaggtggctaggcgtggtggctcttgcctataatcccagcactttgagaggccaaggcaggaagattgcctgagacctggagttcaagatcagcctgagcaacgtagcaagaccctgtttctaccaaaaaaaaaccttttttaaaataaactaaaaacttttaggcaactgctaaaaatgaatcatttggtgtaaagggacctttacaaaatcatttaagagcagggacctctcttaaaggcctgtggatctcccaagcatggaaataacagaaaatcttgagttccttcaagggaaattccaggcaccttcccagcctttagaagtaaatgagcaaattaataagcaagaaggtaatagtagcttaaaacaatagccaaggccgggcacagtggctcacgcctgtaatcccagcactctgggaggctgaggcaggcagatcacttgagctcaggagttcgagaccagcctgggcaacatggcaaaatcccgtctctacaaaaaatacaaaaattagcattgtgacatgtacctgtagtcccaactacttgagaggctgagggagaggatcacttgagctgggaggcagaggttgcagtgagctgagattgtgccactgcactccagcctggatgacagagcaagactctacctcaaaataaaaaaaaaaaatcaaaaataaaaagccaaggaagttagagtcagaagatggtccctatagaaactaatgatgcatcttaactatgtccctgagttgttttttaaaaacccagaccctcacgaaatgtatccactggcatatagacctcagataaggaggaactgaggattgaactctgaccactgttcttcaacgtctttcagaggggcctgaaagtcatgtctgcaaatcagaactaacattctttttttttcttttattttttctttttggagacagtgtatcactctgttgcccaggctggagtgcagtggcacaatcatggctcactgcaacctccaccttccaggcccaagcaatcctcccacctcagtctcccaagtagctagaaccacaggtctgtgccagcatggtcagctaatttttaaattatttttgtagagatggggtctccctatactgcccaggctgagaactaacgttcttttctactgaccccaaatttttagacaaagctttgtctaaagttccttaaccaattgcaaaaaagaaaatctctgattcacctatgacctgtgggtccccctcccccactttgagatgtcctgcttttttaggtcaaaccaatgtgtagctccatgtattgatttatgactttgcctgtaacctctgccccacgcacctttattttactttttatttttgagacagggtcttgctctttcattcaggctggagtgcagtggcacaattacagttcactgcaacctcgacctcctaggctcaagtaatcccctcatctcagcctattccgactagctgggacacccagctaattttaattttttgtagagacacggtatgtgttatccagcctggtcttgaactcctgagctcaagcaatcttcccaccccggcctcccaaagtgttgagattacaggtgtgagccaccgcgcctggcccccagctgcctttaaaaacccttacttgccagccatcaaggaggagctacctgattctccttgcttggtaccctacagataaacacccttctttctccctctgcaaaccttggtgtgggtatttggccttactgtgtcaggtgaagggaccctagttcagttagataacataaatatttgcagtgtatgtgtactacccaaggacatgacttcattattcaatttgacaaatgcgttctgttacacaaatacagaaaggattaataaagctttactagtccatctttcccattatccctgcatgtatccttgcattagtgcaaataattgagaacaaaccattggtgaggggatggaaagactgctctgactcaccagctccctttaagtatttccttaagtaaatatcataagtaacacaaataaatatttcatacaatgtagagaaaaaagcaaaaataacagttctctgagcatcaaactaataggcttagtattactatcatttttttgaaacggagtgtcgctcttgtcgcccaggcaagatctcggctcactgcaacctccgcctcccaggttcaagagattctcctgtctcagcctcctgagtagctgggattacaggcatctgccaccatgcctggctaattttttgtattttcagtagagacggggttttgccaagttgggcagactagtctccatctcctgacctcaggtgaactgcctgcctcgacctcctgaagtgctggggttataggcgtgagccacggcacccggcctaggcttagttttttgtaggtactagagtatttgtttctttagccagaatccactgatattttagtcttctggttctcaatcttggcttgcttttgcaactacctcttgaactttaaaaaattctgctccagcctgggcaacagaaggagactgtctcaaaaaatatatgtcaataagtaaatatcctgatgcctggatcccaccatgggacattctgatgtaactggcctgcaatggtgtctgggcatggggatttttaaaagccccagtgactaatatgcagcagagtttgagaaccactggtttaaaggactttgtcctactctgacagcgtctagcacagtgcctggcagagactgatgctcagaatgaacaaactaagattctatttgtcaaggaggagagcattgtgttactcacaaatgcaaacaaaccacaagcaagggataagtcaggccctgggcaaagacaatggtaaagcaattcctgccaagtaagcgtgtgagggtgacacccactgaatgcaagctgttgttacctttttccctttatttttatgtatttattttttgttgagacagggtctcactgtccttcagtctggagtgcagtggccctatcctggctcactgaagcctcgacctcctgggcacatgcaattctcccgcctcagcctcctgagtagctaggactataggtgcgtgccaccatgcttggctaattttttaaatttttgtacagaggggtggggggtcctaattatgttgctcaggctggtctcgaactcctgggctcaagtgatcttcctgactcggcctccaaaagtgctgggattacaggtgtgagccactgcaccaggtcaagtttctatcttgactctaactagaaaaggtgtcatccttgaaatgcaggtactgttcagccaaattccaaagtcctctgaagatccaagttctctaagaagttcagaggtgccaggctgtgtcttgtttgtgcaaatgaaacagaggatgacaaggtcgggtgggcatttcgagctctgccccaagtctggtcggcttgagagtcaacctaggagcctctctcggctccaaatggcaatgtggcagcccttcccgagtagggaaaaaggagcgtgtagggggcaccacggcaagctggttgggtctgctccacccatgaggatggagtgcagcctccaccgggaaccaggggcgcgagtcgctgctcagtggcctgggcctgcatgtggcgcggcgggagctgctgcctagggccgcgcagcgacggggggtgaggactacatgtcccgacgtgcctcgggcagggcggggcggtgccggagccgggcctggaggccggccggggccaggcgtgcgcagtggttcttgggagtggcgaagcgggtcctgccccgctgtcagctgcggcccccggcgccgggcgggggtggccgcgaccattggcggagaggcgaaaggggcggggccgccgccagccgctgcgggcaaggctgaacaggcggaggtgggcagccggccagggaagcacggtccaggcggctacattcggcccggccatggcagcggcgcccctgaaagtgtgcatcgtgggctcggggaactggtgagcggcggcgggctggaggccggggctccgcttccaggaagcgcctctcccgggcggtgagggctgcgcgccccatgctgcggcgtgggcaccgggcactgcgcgcagggaggcggggtgggcgacctcgttgctgggctgggcaccgtgcgcccgaggaggccgcaccggggcactcgctcgggaggcgctgggctcgcgtgcgtgcgggggacagcgcggagagagggcaccccgagcacgcgggcacctgtctgcgcccccgttactgagcgcacagaagccacctgcttgccacgcctgggtgttttgcacaatatcctaagggcgtattccgttctccacggcggatctcctgggtcaaggacttggtggaggctcgagcattcttactgcagtttcggtgttgaggaaaccgaggcggagagggctaaagggctcttgctgcccaggtcacgggcggggcatgctctgcccttcaaggtgcccgtctcgcccccgcttctgataggtccactatcttaggcgcgtcgtatcaggaagaaaatccaagtttcaacaggccgctctccctgaggcgttgagaattctcccttgccgagatgtttgcgaagctttgcgtctctttggggccttatttgactttaacattttatagagcacattagaaatgtcagttcttctagtacccttaatcaaacgtacactgtgggattctctggtgtgtttgggtgaatgtagaggtgggggtgtgaagggggaaggaagcaaagtgtagcatctggtgtttccaagccttttttcattgctgtacactctgccacattggagggactggtgtacaatagttaagagtgatgatgtcctttcagtgcttctgtttaccggtttttctgtggcgtgacaggcatcagaagtgctgcagcagctggtcctaggtagttggtcttagttttactctttcaagacttggcccagaaagtacttattgaaggaaaccttacctggttcttcacttttccatcccagcaaggccagtggcctctctctgtgtccctattgctggcctgcatcactgcattataaggagttatttgattatctgtctcccaacttttgagaatggcatctaccctagtgcctggcatatgctaagtcaatactaagactctgttgcagtggtgcgatcttggctcactgcaacctccacctcctggattcaagcgattcttgtgcctcatccacttgagtagctgggattacaggtgtgagccaccgctccctgcctaaaaactaatttttaaaaccataatgatatttgattgaataatacattcacattgtttaacaaccagggctgggcgcagtagcttatgcctgtaatcccagcactttgggaggctgaggtgggcccaggagtttgagactagcctgggcaacacggcaaaaccccgcctctacaaaaaataaaatattagtcgggcatggtggctcacgcttgtaatcccagcactttgggaggctgaggcagggggatcacgaggtcaggagattgagaccacggtgaaaccccgtctctactgaaaatacaaaaaattagccaggtgtggtggcaggcgcctgtagtcccggctacttgggatgctaaggcagcagaatcgcctgagcctgggaggcagaggttgcagtgagccaaaatcagattgcaccatcgtactctagtctgtgtgaagggagtgaaaccctgtctcaaaagaacaaaacaaaacaaaaaataaaaaacaaaaaccaaagagtaccaaaaacagtgaaacatcacccatccacatttatcccccctgagtacctcctggaggaaaaccagtgttatgaattacttctgtcctttctggaggaattccatgcaagtgaatgcttacatatagtcctttcgccctccacgctgcaaatactagggtattgcatacttttctgtgagctgcatttttcaaccaacaacagaatgttctacacaatatttaatagagttggtagcttgctgctgcaaagcttaatttggactttcagcttggctttgccagttgtttttttttattactatttttttagacggagtctccctctgtcgcccaggctggagtgcagtggcgcgatctctgctcactgcaagctccgcttcctgggttcatgccattctcctgcctcagcctcctgagtagctgggactacaggcatccgccaccatgcctggctaattttttgtattcttagtagagacggggtttcaccatgttagccaggatggtctcaatctcctgacctcatgatccgcctgcctcttcctcccaaagtgctgggattacaggcatgaaccaccgtacccggccggctttgccagttttaatgtcaagctcacttgagtgcagtgtcagctcccctgttggccatgccacttgaaaggcacccatttagcacatgtttttttaacattagttttttagtctgtacaattccacagatgacagccccttttcctaatttgcaagatgcaggacaagtagcacagctctgccatgctggaactgggcctggagcaagagtagtgaagtgagcctcctgccccctctgctgggatttggctgcctgcccgtggcttcttcattctggtgtacttgactgtttccttggcccactccagcccagggaaatggagtagaacttggccagtgatactgaagcagagcaattgagaaatgtgctgatggtttgggctggctgcctggcttcattaattatgggattagacgggaacaattcttggcttctgtgccactgccttgggtacagagttactccagtcctagagagaggatcacaacctccccagagggattcaggaactcagaaactgaaaacaacatggagaagccccagaggagtgttcagctctagtcagtagacatttgagtgttgcccggtgaagagactgtggtctgaccagggatgcagacacagctggacacagtcccggtccttaaacaacttaccttcaggtctgagatcagtgaggacatggaagataagaccgaaggaattgccaagtggaatggagtaactgctctgttacactttaaatcgtgtttctttttttgtttgtttgtttttgtttttcttgagacggagtctcgctctgtcgcccaggctagagtgcagtggcgcaatctcagctcaccgcaagcttcgcctcgcgggttcacgccattctcctgcctcagcctcccaggtagctgggactacaggcacccgccaccacgcccagctaattttttgtgttttttagtagagacgaggtttcactgtgttagctaggatggtctcaatctcctgacgtcgtgatctgcctgcctcggcctcccaaagtgctgggattacaggcgtaagccactgcgcccggcctaaatcgtgtttcttaaattgtggtcccaagaccacttgtgtcagaattaccactgaaactagacttgcttaatcatatcccctgagaatgagatttttttttctgaaggaactttagccttttgccaattttaatacagatcaccaagagatagacctacccttccagatctggttcttacctcaggaatgtcaagttgcttaagcaatgtttatacttggaactttagggcagcttagcctgtttgtgtaaataaaggtgtttgtcacatttgagaactctcacatggagtgcctctcccaagtcaattgtcatcagttgcaatacagttatcagaatattgaatctagctggcttgccagggagcttcagccaggaaggtcctgggcaggaaagtagacgtgttgtataacatgcccttgtcctgtcctttggtgaagctcattttctctacatagatcagagagaggaggctagaggaggggccgtcatgcatccagctgagccctgctgtgttgcccactgccgcaggtgcagggagggacttcctaacctgcatgacttttcctgaccctgtaaatttgatttggaaaaacaacaaaagcttctcaggttctttcaaagatgaaacagtttcttttttctttttttgtttttgttgttgttgagacagagtcagctctgttacccaggctagagtgcaatggcaccatcttggctcactgcaacctccatctgctgggttctagcgattctcatgcctccgccttctgagtagctgggattacaggtgggcaccaccatgcccggctaagttttatatttttagtacagacagggttttgccgtgttggccaggttggtcttgaactcctggcctcaaatagtctgcccgccttggcctcccaaagtgctgggattataggcatcagccacagtgcctggcccaaagtttctttcttttaaccagcaccttgggaagatcacccagacaaagtgcaaaataaagttctagagttaaaacctcagggctgtatttacagccaaacccttgtgataggaagcatatgtccagaaacacatcctaaatctcctttggaggcagggtagtgcagtggtataagaaagagcttgggaatctgactgcctacgtttctgcctgggtctcccacttggcagctctgaggccttgggaaaagcgcttctctctaagaatcatgtattgatacctgctgtctgggattatggttaggattaaatgaaatgatctggggagagtgcatggtgactagcactcagtaaatgacagttgctattagtattattagtttcatcatccttgatggacctgtcattaagtcacaaaatggactggtttggggtttggccaaggggtagagaggcagaggataggagagaagacaggagatgaggagagaggctgatagacagctggaggagtgtccttgggagttgcctatctcttgcccttgttttcacatcaccccacagcctgacattttctctgataccgaaggtcaaggagagctttggcccactttgctctgatgactgaagctggacctgtgactctgtcttttttttttttttggtctgctggaactggctgggtgcagcatcctggctgttcatccgccctgggcacccttttgtctgtgctactcagtttctgttgtgattctcaccacacagagagctcagaaacaatttgagtgactataagttagctcctttatggtcagaaataatccttccctgaggacaggcgcacggacacacttctgccttggaagttggagtgagagttgataggatggactggagatgaactgggaagagacttagagttcccttgtgggctaagatgagaaagtttgtacggctttttaaaaagtaatatttaatcacctgtttccttcatctcccccacctgtttggtatacaaatcatgagtggggctgggtgcagtggctcatgcctataacctcaatactttgggaggctgaggtggagaatcatttgagccccacaatttgagtccagcctgagaaacatagcaagaccctgtctctaaatctaaaaaataaataaataaaatataaataaaactcatggccgggcgcagtggctcatgcctgtaatcccaacactttgggaggctgaggtaggtggactggttgagcctaggagttcaagaccagcctagacaacttagtgagaccctgtctgtacaaaaaaaatacaaaaattagctgggcatgatggcatgcgcctgtagtcccacccacttgggaggctaaggcaggagaatcacttgagcccaggaggcaaaggttgcagtgagccaagatggcaccattgcactccagcctgggtgacaggagggaaaccctatctcaaaaaaatatatataatataataatgactactattctaggaatgagtcgagagctcccagtgtcttaccttaacctttcatttcttaacctttacctcttgcttcattcttccattctatctccttctcttccttaagaggcataaatataataatttatcattttctgtgtgtcatgtacatgatgttatttcgtttaaacatgtgacaggcctgtggggtactattattataaccctatgttagatgacataactaagatttagagaaaacttgcttaagtcaacagttagtaggtggacttgaaacccagatccttttaaccccaaagaccatgtttccataaattcttaccattttcagtgtgaagcatactttcacatgaggataaatatcattttcataaaaatgttgagtatcctcccaacaaaatccaattttatattctccttctgagaaataaaatggaagcaaggccttaaaaatcatctcattcagtttcccaccaatgtagtcatcccttctcctatagatatgacagatgattatagtttactattttcaaggcaattgatcttaaaattaattagaggattaattgttgaaaaaatcttatctttttttttctttgtatgtgaagaaaaatcttaggaaaatctaagctaaaaatctatcacctctaacttttacctgttaatcccagagcaacacttaggtgagcctactcttctctaagtcatgtccctttggacagaaaagtcacatatctcctaaatcttgtctctggcaggccaagtagcatccccaagtctctcagtggttgcaggtggacagtagtttctgggatcctcaccatctgtgtcaccattctcctttccctttcctcctccccaactgggtgatgtcaggaactaagctcactgtgccagaagtgtcctgggctcccataaggttatactggtgacactttgtagttattctgctttgaggctcagtctcttccacaattggaagaggagaactgaatcagtcatctctcactgcctaacagtctacccccaaacttagtggcttcagacagcaatcatttattagctcatgattctggggtttaacaatgtgggctgactaacctggcagattttctgctgatctagcctaggctcactcatatggctgtggttggctggtgacttggttggacactctcacccaccttttttttgttgttattttttgggagtctcactctgtcacccaggctggagtacagtggcatgatcacaatgcattgcagcctcaacctccaaggctcaagcaatcctcccaccttaacctcccgagtagctgggactagaggcacacaccaccatgcctggctaatcttcagatttcatcatagaggtggggtctcactatgttgcccaagctgatttcgaacacctgggctcaagtgatcctcctgccttggcctcccaaagtactgggattacaggcatgggccaccacacccagcctggctgggactcttggtcctagatgacctccttcatgtctggcagtgggcaggcttcagccagcgtgacaggggtgaccagcccacatgtctttcatccttcagcaggctagcttaggcttctccatatggtggttgggttctaacaagagtaagagaaggcaaaccttcatgaacttaataggcacttttcaagctgtagcacgaattgggccagatgcttttctagtccatgtgttcagaagagtcatagtttcctaaatctgtggctttaaattttttgacttgcaactagctgacatacaattttatattatgatggaggatacttcatatccaaccagaaacaaatgtttcacagtaacaaatgttactatgggtgattaactgtgatctcttctccttatatttattttgtgcctgcataaccttcagtttgagaaacactgtcctagatagtaaaacagtttctcattcttattgtttccggacttggttccttccggtgggttcttggtctcgctgacttcgagaatgaagccgcggaccctcacggtgagtgttacagttcttaaagatggtgtgttcagagtttgttccttcagatgttcagatgtgttcggagtttcttccttccagtgggttcgtggtctcgctgacttcaggagtgaagccacagaccttcccagtgagtgttacagctcttaaaggtggcgcgttcagagttgtttgttcctccaggtgggtttgtggtctcgcttacttcaggagtgaagccgcagacctctgtagtgagtgttacagctcataaaggtagtacagacccaaagagtgagcagcagcaagatttattgtgaagagcgaaagaacaaagcatccacggagtagaaggagacctgagccggttgccaccactggctggggtggccagcttctattcctttatttggccctgcccacaacctgctgattggtccgttttacagagtgctgattggtccattttacagagtgctgattgatgcattttatagagtgctgattggtgcatttacaatcctttagctagacacagagtgctgattggtgcatttacaatcctttagctagacacagagtgctgactggtgtgtttttccagagtactgattggtgcatttataatcctttagctagacacagagtgctgattggtgcatttttacagagtgctgattggtgcgtttacaatactttagctaggcagaaaagttctccaagtccccactggacccaagaagtccagctggcttcacctctcattatcattacagccagagtcacatgtatgtcctaagaaaactatatcctcatcatttggattttctctacccggtttttccagtgctgaagaaaggaagtggtttgcatgggttataggcaaaaaaagaaccaaagaatttgtgtttctccagtcctggaggaggaggagaactctaacctaatagccctaacactggccatctggacagaaatatccccaagctgaaattagtaattcatgtagctacctcagcttgatggaaatgtcttcaagcatctaaacccttttcgtgtacgttgaacttttttttttttttttttttttttttttttttttttttttttttttttgagacggagtctcgctctgttgcacaggttggagtgcagtggcacgatcttggctcactgcaacctccacctcccgggttcaagcaattctcctgcctcagcctccgagtagctgggactgcaggcatgtgccaccacgccaggctaatttttttgtatttttagtagagacggggtttcaccgtgttagccaggatggtctcgatctcctgacctcgtgatgtgcccgcctcggcctctcaaagtgctgggtttacagatgtgagccaccgtgcccggccaggttgaactttttaagttgggtttcttgagtggatccacccagtgagaggaagtgccttttgtagactgtactccatggttctccattgtgtgggtcgtctgttgaaattctgcatgtgcaaacactttgacaactgtaatatgttatataaatgttagaaatgattatggataaatttgcattatcacatataattaagtgaccatgcattcacatttgtcttcaactgtggtttatacttgtcccagtctaatttcagagcattctcaaaaggatcttgttttaaacaacaaatcttatggtaacctgcttaaaaggaactcttgtgagtttgagtaacatgattctgatcctcacaaccaggaccagcaatgatggcagataaatttcatctcaggcactgactctagttgattaatggtggctgcagagagttttgtgttgagaaggattctggggaagagagtagctttgccaggaaagggtgctgtgacctacgatagcaagctggggtggggattggggtggggactgacagcatctagcttggactgatttactactaccaattttactactactcatatttaaatttactactacttggactagttacttctaccaaaggagaacccatctgtgaggccttgactgacacagccagctcatgctcagctttggcccacagctgcacaaatgttagattcagtagtaaggactatcccggttaaccccttaagcactttatgtgttatctgagttaatcctcacagtatgaggtactgtattgtcatcatccttattttataataagtctgagcttacagaagttatgtaatgtgttctaagttacacagatactatgcagtagagtggttgaagttctctgccttcctgcccacttgaaatgtggctattcggactacatttaaatgttaactaattaaaatgtaaatactatgtgtagctacgtatgcagtggagctctacatacttattttctccttgctttttcatgtaactgtgtcttgaagccctttccatatctatacataaagaacatcttcattcttttttatacttgtataatattgctgggtataggtatgcttttgtttaatcagtttcctcttgatggatattctaagagttctgcagtgaatagccttatactgaaccatctgcatatatgttggtggaagccagaacaatacatgagaaataatttagtcatgatttcttatttcatttttcactttgtaataagcaagtatgaggaaggtggacagtaacattccagctgtagagggcctagaaacataagcagaaaagagatttgtttgttctggattacctagcatgtctggtgtagagctcaggtttgaaagctgagattttgcattgttgagactctggtggatgtttggaaatggttttcagtaattctcattatccaggaatgcgggcaggggtgtatagtctttcagttgttatgtcaacagagaccaagtgccaggtggctgttagaatttgcactgcatggttctttccattatcaatagatgggcttgcagaatgtatttatctaaaaagtttgtgctaggatgtagaatatgcttgtttgaagcaccatggacagtttggttctctgccatccttgcttaagactggtggtccttaaaggcaatttgagactgtgacttagacattctccaggaccctgtgtgttgttctcctgagtgggcaggtagattctcctgctacctatgtctttgattccgatctgaattaatcactgaccattcctccattcactcagatgaacattgttcccatggtgtgtggggttgatagcatggctgaccaggtcatggatagccatttttgtacaggctgacagaggtgtggtccatcccaaactgctcctacttggctgctctgaaaacatattgaagtaagtatcaactaaaatgagacttagggggcatctgtggatttcagttaaacctccatagcttctattttctggttggctaacaggccttgggacttgctgaaacttgtctgctttggattcggggtctgttaaaatatctaaatgggaatgatttaaaatcagaataaaaaaataaactaacacatgcctgtttgggaaaatttggaaaagataggcaagtatgaagaacacaataacatttgcttgtaaacttaccaacaagaaaggatgtattcatgcaacaaatgtttgttgtgcatctactatgtcaacacttcaatgtgcatgtgaatctcttggggattgtgttacagagcagattctgattcagcaggtctggggtagggcctgaggttcagcatttctaacacgctctcagggatatattcactgctggtccacgaactgcacttttaataggatctgaccataggctgggtcttatgcttgttcttgtgtgttttcttgccatcctttttaagtgtgtatgtttttttaattgtgacaaaatacacataacataaaatttaccaccttaaccatttttaagcatacggtttagtagggttaagaatgttcacattgttcgtattgaaaacaatgaaaatattgaaaagaattagatctccagaattcttttcatcttgcaaatctgaaactctatattcattaaacgacagttcctcaatccactctttccccagtccctggaaaccacgcttctactttctgtctctatgaatttgactactctaagtacctcatataagtagaattatacattatttatccttctgtgtctggcttatttcagttagcataatgtcttcaaggttcatccatgttgtaacgtatgtcagaatttcctttttaaggctggataatatcccattgcatgtgtagaccaccttttgcttatccatacatcagttgatggacacttgggttgcttccaccttttggcaattgtgaatagtgttgctatgaacatgggtgtacaaatacctctttgagaccctgctttcaattctttggggtatatacccagaaacagaattgcttgatcatatgttagttctatttttaattctttgagggactgccatttggttttccacagtggctgcagtattttacaaatctacaaacagtatacaagggtcctgatttctctgcatccttaccaacacttattattttctgtgtttttgatagtagccatctaagtggatctgaggtggtattatttattaattgcacacttgcaatcatatggtatgtacaattttacatcctttttgttaaatgtaacattctatcataagcattttcccctacagtttgaattttgatagaaagccttttcagtctccttcctctttgaagtgaagttgttcatattgatcttttttcctttgtggtttctttctttgattttaagcttagaaagcttccctatgtagagatcaaataacattcgccaagttgaatctatttttaaaatacttcatttttaacatttgcatctaatactctggcatttggttgttctttaaaagccctttgactgcaaagaattacgcaaaatgttaatagtggttctccctgggtggtgagattattcataatttttttcatgtattgctcttatgagtgaaaaagtacatgttatttaaaccacaaaggaccacgcttttgcccatggaaccagcccgggtcagctctggaagagatgggggcatggaatgtggagaatctagctgatggtgtattcttcctggacctccgcttcctccatagtaaaaagaaggatggactgtagggtcctttctggcctcaaagaaattcatcaggtttttaggcccaacttgatagtgtcaacctaaaataatcaaaaaggtcagaatctagtttaaagagagtttaattaagtgcgaaggttaaaagtgagcctgccggccggacacagtggctcacaactgtaatcccagcactttgggaggccgaggcaggcggatcacaaagagatcaagaccatgccagccaacatggtgaaaccctgtctctactaaaaatacaaaatttagttgggtgtggtggcgcgtgcctgtagtcccagctactggggagcctgaggcaggagaatcgcttgaacccaggagacggaggttgcagtgagtcaagatcgcaccactgtactccagcctggcgacagagtgagactctgtctcaaaaaaaacaaaaaacaaacaaacaaacaaaaacaagtgagcctgcccagaaagaacagattccaagaaatttgacagtgttcatatagaaaaagttcagggaaatttaataggatttcagcatgtttctatgtaaggcttaatgcatagttacaatgatctgattagtcaaggtggtctttctgagtggtgggggaggtatatttaacattccacacagcagatgtaaccatcattgggtcttggactgacgctatctggtgcgagttaggtacaggacaatgaaggaggcagttaatgtacaacaaagatcagcaattagaagcgggaagatctggtctctcctagtcatttacaatgaggaagtcaagaacagtggggaagagagtgaagcagaattgcaagcatgcaagttatacataacccagtctccaagccctaacttcccccttggcataataaatttagagggttctgaaatttttatttttatttaaaaacaggcgtccattccttggctgaagtagtacctccccagcctaattaaatactacacctttttagagagaaaggggtgagaaggctgtggacagagtgaatggcaaagggttagctggggctggaggcggggagggcattgccaagctgggggttaggacctcctgcaggcgggtgtccatccagctgggactcagggccgtagagcagaagggttaaaagggatactgtgggtaaggtatttgaaacagtgcctgacacctggtacgcaccaaattagtgctgtttttgcccaccccgtcccttccttgcctcttgcccctgccacgccattttctccaccttccctccctcctctttttctcctcccttagtctccctgatcctttccatttctcttgcactgtctcctcttctctccttcccttaacctgtctcctcttccttcttttctctcctctctggatgtgttggttctagataaaatctgtgcctattgttggccatgccacctgctatgagtgagctttgccccaggggccttactgctgccgggaaggtacccagcctcctccccgggtaaggcccactaagcctcagagctccgccctggctaggctttctttatatatatatttctctctatatatatttctctctatatatatttctctctatatatatttctctctatatatatttctctctatatatatttctatgtatatatttctatatatatatttctatgtatatatttctatatatatatttctatatatatatttctatatatatttctatatatattatatatatttctatatatataatatatatatttctatatatatttctatgtgtatatttctatatatatatttatatatatatttctacatatatttctatatatatatttctatatatatatttctatatatatatatttctatatatatatatattttttttaggcagagttttgctcttttgccgaggctggagtgcagtggtgtgatttcagctcaccgcaacctctgcctcccagtttcaagtgagtctctgtcctcagcctcctgaggagctgggattacaggcacgcgccaccacgcccggctaatttttgtatttttagcagagacggtgttttaccatgttggtcaggctggtcttgaactcctgacctcgtgatctgcccgccttggcctcccaaagtgctgggattacaggcgtgagccaccgtgcgcagcagcacagttacatttttttctgtgcttgttgaaacagcgtcagtctctgtttaccagtctccaagctccatgaggatggggacttgtctgcgttcattcccttgtgtcccttgcacccagcatggtgtctgaaattaatgggtgctcaataaatattttcaataaaagactctacactacaatagggcaaatatgaattagcagcaagtgcaggctttggagacactcagatctgggtttgaattgctaaccgtagatggacagcatgacttaggcaattcatttatgctctttgggcctcaatttcatcatctgtaaaatggggataatgtgcacctctcttatgggctgtaataaagattttttaaatgaaatcttatatgaagtacccatctactcaagttccttttaaattttatttgcatagcattacaggacttgtgaaatagtgtatactttaaggcctaagacttaagacaattcattatttcatgggtaatagaattttatacatctatgtaaagacccaggactggccatcagcagacctgagtcctccaagttctgccttagctagtttttgacctttgctccgggggccttccttctgcctggaaggctccccaacctcctccccaggtaagacccacctggaggccatacctggtcgtaggatgcaaggtgaacatgactgagtctcatgcatcttaatctgcaagatgaagagtttgggtagggttaaacacatcatgcaggcagcacccttatggctttggctctatctgcttcatagctatagtattatttgattgctattctttctttaaaagtttatttttattcatttattttttggagacagggttgtgtgccattacccaggctggattgcggtggtatgatcatggcttactgcagccttgacctcctgggctcaactgatcctctcgcttcagcctcctgagtcgctaggactacaggtgcagccgccatgcccagctaattttttattttttgtagagacaggatctcagtatgttgcccaagctgtctcaaactcctgggctcaagaaatgctccctccttagcctcccagtgtgctgagattccaggtggaagccactgtgtccagcctaaatgtttactttaaaagacaacttcataccactatagtaaatatcacaagtagaaggtaacaacaacaaaacccagtagaatgaaaacaagacagtgttataaaattcttgccagatattactacctgccaaggctcagagtctgaggcctcttcagactttgtgaagaagggaaattagcacatgctggagagatggtaaccacttaatggcactgcagcgagacattctgcactcgctcaggaccatgagagttgaaaagggcatgagtgattcagtgtcatttggtttcgtgtgtatccctagtacccatttctcactttgggaagcactggattcgatcatagacctggaaggaaccttaaagattacctgacccccccatcattttgtagatggatgagctgagcctgatgtggaggtggctgctcgtgcccttgacccagccatgtgaagacctgtgccctcgattctcaaaatgcgggagtcgaaagacagacagacagatagatagatagatagatatgcaggagttgaaaaataggcaggcaggtagatagacagagagatagatatgcaggaattgaaagatagatagatagatagatagatagatagatagatagatagatagatagacagacagataagacccatgcctgactatgcttgtgtagtgttacagaaagcagctgagacatggagagtgccagcagtgtggccgcaggtccccaactatgacctgttcacatgcaaaccacctttgtggactgtagtcagtacttttattttaagctcagctctaatatatctatgtacatttttggactggccttctgttggccagtcacatttctttctttctttctttcttttttcccagacagagtcttcctctgtagcccaagctggaatacagtggcatgatctcggctcactgcaacctccgcctcctgagttcaagcgattctcctgcctcagcctcttgagtagctgggactacaggcgcacgccaccatgctcagctaattttttgtatttttagtagagacagggtttcaccatgttggccaggatggtctcaatctcctgaccttgtgatccacccgcctcggcctcccaaagtgctgggattacaggcgtgagccaccacccccggcccatttctttagaacagggtgtgccacttataagtagactctgttcccttcaaaaccctctggctcctccaaaacactttccttgctctatttcatccacaagaaaaatgaaactgctctttcacattggtcagaagaggtaacacttgggacaaatgcatctagtaccattccagaggcacaaaggaattttgggtgcgggttatactttttgattttttataaaccacacagataaaagtggacaacagagaaaatattgagttcaacatggagattgggctgggcgcagtggctcatgcctgtaatcctaacaccttgggaggccaaggtgggaggatcgtttgagcccaggagttcaagactagcctgggcaacatagagagatttcatctctacaaaaactttttaaaaaattagctgggcgtggtggcacacatgtagtccagctactcgaggggccagggatgattcccttgagcctgggaggtcaaggctgcagtgagccatgattgcaccactgcactccagcctggaggacagagcaagacattgtctcaaacaaacaaacagagagagtatgccaaagggggttaaaacaaaataaaatatagtgttttaagtcctggtcctcctcctccatgccctgcctccccgccacccttgccaaaaaaattactgtataaattatatatagagaacaaaactaggccttaaggtactaggatcattttgttcctctccatatgtgaatttaattccacagtccttccttcagcactgaacactaccgcagcccccaatccctcccaccacattgccaatccctgggtggcaaatccaacagcttggccaacaattcacttggagtggcctctagttgtgtcaaagatgctgtatttatgcatctatcagcttttgctgcaacacagcccactctcccctaactcagctgcttaaaataacaagcatttatgattgcttatgagttatggatcagctggtcaggctcactcatgtgtctgcagttagctgagtatttgggtggaaagcactgctgtgtctgctcttcccagccctgatttgcgaagctttttttgcttctcagcggggtttggtcttcctgagcaccatccttatgtcttctccctgcaccctgggttgggctgtccattatggttctcttaatagaaggttgagcctgggagacttgtcatggatcaacatgtattgcagttggttcctttgtattgaagtccactgcagtttacccttctaaccacatctgcttccactttcttccacctcttaccacacacagcatcatgaatgccttttagctatttatctctctgagcgggtggtaagcttttgagagcaaataacacattgcctttcccctgctgtattaccaccatctggcccaatgcattacgcatagtaggtgctcagtaaatatttgatgactgagataaatgagtgaatgactgaaattattgatgaaaccaggaatgaggtagaatgaggtcttgatgaccccccaagagtaaaataactggaattccccttattaattttttatcctgtcactttaagccccattgaatcccaaaggatgtacagacatggtctggagggcttagttcttaatggtaccaatgtttgtttaaattttcctaactctaggcaggtgtggtggcatgtgcctgtagtcccagccactcaggaggctgagttggaaggatcacctgagcccaggaggtcgaggctgcagtgaattgtgactgtgccactgcactccagcctgggtgacagagtgagatcctgtatcaataaattaaataaataaataaatacataaataaataaatattcccaactcattgcagcagatactacaggtttgcttctggttgcaaatgtttggcttccccaagaggcagctgtaaaggggaaagcaagtgtattccagtaagatcatggggagggattcctggttctgatttatttttccacttggtttactagacttagattcctggtgtctcatagtccctcgtcagttgatgctcagtcccccagaaccatacttgttctctatgaccttgtgaaagttacttgatgccagggaacactgtgaaccacagcctttatcttcctgtgagtacgtgagcagctgtttccaagattagaataaaggtggtagtgatggtgggagattcctggcctcccttctacaaagtgtcagtaggagaattagattaatgggtatttttctaataacctgtcctgctggcatagaataagaatttcacaggtacagctgcatagccttgatatctacagctattcttttgtgagggaggagggcatcagaattctaatcattgtgcagagcagtggctctcagccctggctgcacatcaagtcatcagggagctttaaaaagtacagatgcctgatcccaccacagaagtgccagttccgttggcctggggtgtggtctgggactcaggatttttaaatctcccgggtaactctgtgtgcagccaaagttgagaaccactggttcagtttatcccttctatgtcaggaaagggacaatatttataatctgttagaattacttgaaattttatggttgttaaagcatacaggtttatatgctgggatgtattatatttgggttagaataacagattcatccagggatgaaaataaatgtctccaacatgttctgcatccacttggccgcccccgccttttgttgtcaccccctactccatctcatcaatttgtcttgagaataattgtgagaaaaagtagcaactgccctaacacatgaatttgcaagatgctctttactgcgttctctcatttgctcctcacgccaggaaggtcatctaagaaacaaactgtttctcagttgaaagtccagaggggaaagctgacaggctcagctaggatcaagtgcccaccatggccccatcagcagcttctgtgagatggacacaggtgcctggtccaacctcctctgctgcggcaaccacgtgcagacctgcactgctgtcgggaggacagatgttaacaaatcagggtcattcttgtcccctgtaggaaagcctgtgggagactgagccgtcactagaacatgtttgctaaatagagatgcagagaaaagggagcttgggggccagaggccggcttggttgcagggcggagggagtgcaaagtactcaacaactgggccctgcgctctccctttgctcctcttctggaatccagtcaggttcttgtctttcctttgtgattctgctttgcacctgttgcagttcatcaagacacagtttatcttaccacaggtacatctcaatatcctttcaagaccttctagggtcattttcatgctttggggtggatttctcttctgcctgtgacgttgtcttccaagataggttgattcttactagtttcaaggggtggtgcattttgaccttaagccaaattctggtgctttcccagtcacaggcggtggtattccatgtgaaaacaactaagtttcaaatggcttggggctgatacacgtcacatcttgagtaggctcagtgtttgaatcagaatcaaaacacaagtcttctgaattttaatcaaacgctttttctctcccgcccaagtgagtttatgtttttcttttccacgatttcttttgtaggggttcagctgttgcaaaaataattggtaataatgtcaagaaacttcagaaatttgcctccacagtcaagatgtgggtctttgaagaaacagtgaatggcagaaaactgacagacatcataaataatgaccatgaaaatgtaaaatatcttcctggacacaagctgccagaaaatgtggtaagactttggggtgaaatgtacattggttcattctgcaagttgtgcttggctgagcagcacttgggttttggaactgggaaagctgcttcccttttccccagttcctttccactaccaattggttggttggttttggtcttcctgactctgaaaatgggtttcctattatgttgctaaggatgccttaacaaagtgccagactgggtaccttaaacaacagaaatttatcttttataattctagaggttttgagcatgagatcagggtgttgatagggttaatttcttctgaggcctctctccttggcttatagatagcatcttctgtattttcacatggtcttccctctaatcctgtctctgtcataatctcctcttataaagatagcagtcatattggataaagacccaccccaatgacttaagttaattacctcttttaagacactgtttccagatacagtcacattctgaggtacagcccataacaggtttcctccttggcattcaaagtgccagccacctctggaactaacaaacttgccttaggctgctcctgctccccaagtagctcctgctgtaccctaagtgcatgagatcagcttgctaggacagctaatacaatggtctgtaattaaagtcagggtcaaggcctaaattacagaaggagatagaagaaaatgggaaaatgtaagactgacagtttaaattcaagcttattaagtctgggagagaaaaatacaggttattgcctgacctccttctattgacttgcaggggaagaaagaaatgagcttggggagtgaaaagggtgtaccctgctgcttgtctgagtggaatttatgaacttcttctgttgtcagattcacccctttgtggctttctatcataatctctttgaaaaacagacagttgtggctgtctgattcctatggttaacccaagaagctcatctcctttgttaacgaaataccctttactgcatatattcactcaccaaaccttatgagcatgcactgtgcatgcaaagcaccgtgttgggtgctggggacagaaagaggaataagacagtgttgctttcctcaaggaactgagcgggggagaccgatctctaaatcaataaatgtggggaagttttagttacagtgttcgttagtgtcaagcactgtgctaagcaatacatttagtctcatttaatcctctcaataaccctcttaggctgatactactggttttcctattagggtgattattttgattatatagtggaggaaaccaagactcaaagaggctaatgaacttgtccagggtcacacagctgagggctacggttcagattgattcctggtggacgcatccctgagcatgccgaatctgttgccttctagacagtgatgactttctgctctggacttgggtgagccagcatttccctacagttattcttggtgtagttggtgggggaagaagaacctttagagttgtgagcttagaagttaagttgtccaaatatctgctggagagaataaaagaggtagctcttccccctgcaatggaaggcctgtggggtcatctctaatccattcttggggcagatcattcttttgagcttcacttttctcatttttatcagaattggttgccccttccctttggtaaactacatgcttcattgttacattcctcccaccctgcctggcgccagtcccttgtgtacctgtctgtctacctccacgtgccctcagtgtgtgaccttgctttctggttcttcattcacccacagtccctagcacagtgcttttcctacagtggatatttgaggaatgttgggggaagtgaatctgctgagtggttctgtgaagctggagcctgtgctgcgaacagggagagtgggagggaaggaatcgacatagaggagttgagagagcctgccccccacttgactgactccaccacccacccctggtcactgggtgtggacagaggcaggagaattcactcccagaaccctgttgttgtctgatagatctctcaaacctattcttcctgtttaagtgaaatttttgaccaatatgtccccagtccctcaccctccagcctcaggtagccacctaaaagtacagtttttaatcattgtttttctttccaattcaagcaggagaggtttgttgcatttccgtcaacacaagctcactgtttatgctgtcatttgatgtgctgacttcagactgagccttttctgtgtgagaccctcaaactgctgccaacgtgacccttccccaggtccacactcatcatgtggcccctcccacataggagccttctgttacagtgacttcaccatgtcattgcctgctcactaaaagctgagcccgtctggatttgcgatttccctttagatccgaatgaaaagaatgctcattattttctgaaggccggttgcggtggctcacacctgtaatcccagcactttgggaccgagcgcagtggctcatgcctgtaatcccagcactttgggaggctgaggggggcggatcacttgaggtcaggagctcgagaccaccctggccaacatggcaaaacctcatctctactaaaaaaagaaaaattagccgggtgtagtggtgcacacctgtaatcccggctatactcgggaggctgaggcaggagaattgcctgaacccaggaggcggaagttgcagtgagacgagattgccccgctgcactccagcctgggcaacagagcaagactccatctaaaaaaaaaatagaatgctccgtttaaaaaaaaaaagaatgctcattattttctgtaattgcaaaatggttgatcctgttttctagctctatttccagagcctgtgtttggagctcatcaaggtagaggattcttttgcttccctgttccagcttcagccagtgacaccaggatttagattccagcacccccatgaaatatagttgccgttgcctctcatctcctgcctcctttttaaaaaactgcttcactgagatataatccacagaccatacaattcagtggcttttttcgtatatttacatagctgtgcagccatcactgccatcaattttaacacattttcatcaccttgaaaagaaacttgtaccctttcatagtcacctcctgttttccccagttgtcccacagccctaggtgactactaatctactttctatctctatagatttacctgttctccatatttcatgtaaattgcgtcttacaatatgcggtcttctgtgactggcttctttcactttgcataatgctgtgaagctccatccatgttgtagcatgtatcaatacttcgttcctttttatggctgaatacgatcctgttgtatggatgtcccacattttgtttacccattcattggttgatggtcatttgagctgtttccactctttgggtattatgaataatacctttatgtacaatgtgaacctttatatacaatgttttgtatgaacatatgttttcatttcttttgtgtgtatacctaggagtagagttaactttttgaggaactgccagactgttttacaaagtggctgtaccattttacattcctatcaacagtgtgtgaatgttccagtttcttcacattctcaccagtgcttgctgttatctgactttttaatcctagcgagtatctcattcatggttttgattttcatttgcctgatggctaaccatgttgagcatcttgtgcttattgtcacttgtatatctttggagaaatgtgtattcaaatcctttgtccatttaaaaaatggattgtctttttattattgagttatacaaattctttatatattctagatacaggtcccctttctccacaagtattttctcctgttctgtgggttttctttttacttgcttgatggtatcctttgaagcacaaaagtttttaattatgaagtccaatgtttacctttttactctgctgtgaactctttgagtatagtttcttgcataggtctttattcactaatgtctcctcagcacctggaatagtgcctggcattatttgtggtttgaataaatgccaaggatagtggaagtggtgaggaagaacaaaccaggatgaagagttttgtttcagtgctttttaggtggtatcacatgggaaataagtttagggcaagacttaaaaaaaaattaatcatttacatttggatactagggttggggtaatacctattaatttttgctgaaagccttctgaaaattaaaatatcagttcagtgcgaagcctcagtgttactcctttcctccctgggtttaactctttgatttcattagaggagtagttttccctggtgatcttcaaattttagtgttcatcagatcactgggagagcttcccagggatatgtgggcccactcctatagtttctgattcagtaggtttcaggtgcggtccctgaatgtgcatttctcacaagttcccaggtaatggggatgctgttggttcaggagccatgctttgggaaccatgggggtacataataaattgatattattggtgttgtactggggaatccaggcgatggatagctatttttccagaagtagccttacttaccagcagtggcatgtttacataagaatcatcagataaggtcctctgtctgagggtcatgtttctgcatgtagagccaagtatgtgaatttcacctgagatcttggctgcaagtgagatgaagagacagaggaaaattacgctatttttgagcctctactatgtcccaagtatgacactgctatgtgttttactcctggtattgtcttgaatctgagtacacacatcccccagataatgtaggtgagttgccatggtgtccggttagctgactggcattagagcccggccacgatgctccgtgcagccacggcagctggaccgttgttaaaccacaccattctcattaggaaccagaattgtttcagcatgtagattcatacagacttgaagtagacataactagtggccctaagagattagataaaaatgagaacagccttggtatcttttatttggcttatccttgttttatctgtcattactatgatgttgctacaaaaaggtttgtagtaagattcatggattttagggggaaaagtcttcatttgaataacaggaaaattcttataatactatattaaaaagatataaaatattactttaattctataaatacaattttagacattgctgtaggctcgaaaagaccttggaaggagtgtaccaaaatattgatagtgattatttctgggaacagcagggagaagctgttcttattttcctacttagagattttttcttcagatttgatccagcgagcctatttatagtcatgaatgaatggagaaagcattttagtcctaattggttttaaagaccataaaatagcatctttggagggtgaggagatcagtctgtgatgatgaaagtgaggtctttttcttgcccactctgatggctgcagataagatgttgctaacaggtaaaagctcattgagcacacactgtggacagtgatggtggatccaggaagtacgaaagaaccttcagacttgtccacacagacttcaccagctttgtttccaatggtttttatttattattaggtttttattaacttagactaagagcactgggctcctgaaagtctgggcattaagcaaaccagccctgatgccttcgttctgggttgtttgtcctacttgccattgaaaggcaagacctgttgttctgagttttgcttcccagcatatttcagaatctggaacgatggacaccttcagagttttggcaggaggctcacaaaatcagtcaccatttccaaagcagctcctgattattttcagagcagaaaatcgggtaggggcttagcaaaaggttttattctgaaagatgagattcacatgatctcattagctgataagaacttgttctgatacggtgtaagaggaataatgttctgtgaatggaccatgcacaccataaaaatacagctcacattgtacacgttgcttctgtgggttaaaccctaagtattccaccaaggagaataagccccaaccacattgtcctagagaccatcacattccctaccacctgcaggttcctctttgatttattaagaaggaaatgtaagagacagaagaaatcctggccagctagcagattccttgagaatggtttgtttgtttgcttgtgacagggcctcactctgtccccaaggctggagtacagtggtgcaatcacaactttttgcagcctcgacctcctgggctcaagtgatcctcccacctcaacttcccaagtagctgggaccacaggcactcgccaccacacctggttaattttttttattttttgtaaagatgaagtcgcactgtgttgcttaggctggtcttgagctcctgggctcaagcagtcctcccacctcagcctcccaaaagtgttgggattatggcatgagccactgagcctggctggggatgtattttagcaagagacatgggaataggccgatttcttaaaagttaaggatttgcaagacacgggtagatttttctgatgaatacgctttcatttgttaaggtctttgtagtttcaaaacattgccactcatattacttaattggaaagggttctgtgaggtagccagatcggaaaggtaatttttatctctattttacatatggagtgactgaggtcgatgaagctgagtagcttgccagaggtcacacagctggtcagttgcagatgtgcaacccagaccttcaaacctatattttttctctttggttctggtgttttttccacttcaccatgttgaaaatgccccaaagggggaaagggaggaatgtgtatgtgttagaggtggatggggaagaggagaaacagtaggtccagaggaataggttttaattaaaagtcaggcggccaggctccatatgaaccagggagtagggtgcataaatgcccatctgagcaaggccagtgttgaaggggaaggagtgatcggagttcttgtgaaggccgtgggaagatgggtgggacacaggcaaacacatgagaacaaaacaatgagctttgccaataaacgacacacaggccaattgtgggttggcatcgagagggttgtttttttgtttgttttgttttgttttttttgagacagagtcttgctctgtcgcccaggctggagtgcagtggcacgatcttggctcactgcaacctccccatcccaggttcaagtgattctcatgcctcagcctcctaagtagctgggattacaggtgtgcaccaccacacctggctaatttttatatttttagtagagatggggttttgccatgttggccaggctggtttcaaactcttggcctcaagcgatccacccacctcagcctccccaagtgctgggattattacaggcatgagcatggcgcccagccttcatcgggagattaatgcaatagaatcagaaaatgctttgttggagggggtggagtctccaggtgggagaggaataatgtagcaggtggatttttttaataaatcttcaccacttgtggactacctagcctagattaccaatctggagaagccctttcaagaggaaaataggcaaataggccttccctgcctttggatctgccactaacggtggagaagtgctgagctttgggttttgatctgctctatggggagtgactctaggttgtcattcaaatcagcttaaagctaaatgttttggctcttgtaactaaagatccaggcagtgctggcttcaggtgtagcctgaaccagcaggttacatgatattaacagggccctgtttttccctctgttcccctgctttgccatccgcaaagttggcttcatccacatggtagccccgtggcgtaggttctcccctcacatttgtaaacatggttgcagtagttccagacttcacagcagcatcccacactgttcaaggaaagacattgttcaggctactcctgaagaataaggaagcatctgtttcccagaagacatctactggtttcttgttggctctgattgtttaatgtgcccattagcttgaacaagttaagaaccacccctgaaatggggtaggggccaattccacccaaatggcatggataaaatggggaagttgtagcttttgaaaggaagtttaaggaaacttctagaaagaaggggaatggaggctaggcaataaattatggaagtcctccacacctcctgaagggataagggaattaaacttcagatacattttctttggggaatcctttgtgtgagggagtaactcttagcacaggcattagtcaaggtaataggctaagatactgcaaaagacataataatgtgacaaagaacaagagacttgtcttcctctcacatagaaatactccagtggtttgctttacactattattcttggtcccatgttttttgtttttttttcccctgtaccatctcctaagccttgtaaccctcagtgtgatcaaggctaagttaccaaggttttcagctcacagaaagggggaagagaaagtgtagaggaggcaacccactgtcttgagggctctgggctgtcagtggaaaccacttctccctctcacatccaacaatgagaacttggtccatggccatgtgtagctgcaaggactgctgggaaacacagtccctggctagatgactagcgaccagcttacaggtctgtgattatagagaaaggggagaaggaattttggctgggagttggcaatctccatcacaacccccaaactaggtttcctcagaggctggcccattccgaatgatgttcctgtgacagacacgatttcctcagagaagaatcttcatccaaggcctttcattttgggaaccaggaatgcttaatggggactaagtcagttatagttaggtttaaatacatatgacagaaaacctaaaataacagtggtctaagcaaggtaaatgtttgtgcatttttctctaatgtaaagacatttgtggttggtgtagcatcatggtggcagagacttgtttgattccactgttctgccatctcggcatgtgctgtcctccttctgctctaagatgactgtctgaatttccgccatgccttcacattcccactggcaaaaggaaggagaaggaccttccaggacattttctagaagtcacaggcagcacttccattgatgctcccttgatcagaactcagtcacatggtacacgtagctgcaaggagcacagggaaacatagccttctttgctggcattcaggagcccagcttgaaactaggggttctaatgctgaggaataaggaagaacagatactaggtgcagcaagaagcctttgccagagaccatgtgccctggagtccgcacggcatgccttcacttctgccgtgttaaactaatcttcacccttaaggaaagaaatcgtcataatagctgacatgtgttgagtgtatatcaagtcccaggcagttttctatatcatttagtcctcacagtggcactctcaaaggagagtttagtgtgggatcatttacagaggggccatggggtcgagggaatcaacaggggttggtgaagtgctcggagattagcaacagcaggaagccattaccacccctaaaagggtcagggaaagaacatgtcaccagcctgaagagggcttagagacatggccttagaaaggggctgcctggcagcagggacagctgtggaatgaagccaagccagaaacactgtgagcctaggcagaagtggcccgaggaggctgataaatacccttgacctgtctctcctcccatcctttgatctcctgacaatgcctcccattggctgaagcccactggaagccagagaacaagggagcctggggaaatagtttagagaaagcagcctcctgagaacagaatggggcagagaagagcggaaaatggatgagggggctggtgaggtgggagagcaacagagagcaacccacatagtgttattagaggtgccttttgcagataaggcagttgaggggtggagaggataactcacctgcccagctggtgacagaggcaaaccctctgcttcagacccccataaggaataaggaaggcaaagcaaacacacttgccttccttgtctatctgtgcaatgctctgcacatagtaggcatctgataaatggtcagtgagtgaaaccttgtggacaggcaaggtttgatataagaggagaaacggtcttctctgccttttggttgcaggttgccatgtcaaatcttagcgaggctgtgcaggatgcagacctgctggtgtttgtcattccccaccagttcattcacagaatctgtgatgagatcactgggagagtgcccaagaaagcgctgggaatcaccctcatcaaggtaactcgagtgcatgctgcccagggctagacattggttatcaggaaatttcatttcctcacactttcatctgcttgagatttggagctgaaggggaagttgtggcggtttttcgtttgtgttcttaaagatgctcaaaagtcataaaaaaaataagactagtttagctcagattgagagtgggctgctttccattgcagcagactagcagcagcagtgatgtgaagagctgtgccgccccttccagtccactctcggggctcagcctgccatctggaaagcaccagcagtttgaattagctgggaaattaataaccattagtgcccattcttggatatataccctaaagcatgtgtttttaaccagaactccatgaaccacctctgaaggtccacaggttgaatacaggaagttcatgcatttaaatgtggtggaaaaaaatccttgcattctaactcattttaacctctaagtgaaatgagcattctcttcatttatgaatgcagctcacagccaaagtttcagtaatagcagtattagcaggatctgagaccttgtcaataggagtcgcagggctttcatttcagtttacacctttttctgatatctcaaggtatcatttatactcatcactacttggaaattgtggtaattgttagacctgccatgatatctttttctaattgcattaataaaacagtgcatatattactttatcataaatttgttttttaaacaaatttcaacataattggattcctgggttattttaggtgttttgttttatgcatatgaaattctgagaatgagtccataaacttcaccagactaccaggggtaaggcccatgtcgttggaaagattaagaactcccaagagaggctgtgccagagcatttacagatgaatgttcatgaaggcaaaccagagcaacccaaatgtcatcagcaagagagtagacaaatgaaatgtgaactattcattttggaatactgtgcagtaagtgaacagaaacgaaccagaagtttgatgcagccacatgagtgaatctctaaaacggtattgtagttcaagacagcacatcacaggtgaatggcacaactctctttatagacttgaaaccccagggataatgacgtataacattgtctagggaccatccgatgtggtaaaatagtcaagaaaagcaagggagcaatgcatacagcattcaggacagtggttcaccctggggagcaggggtagaaggaggatgaacttgagaggagacacacaggggacttcagtggtgtcagtcacgttctatttcttaacacgagtgatgagtacatgtttattttcttcatttgattcttctttaagctgtacataggcagtatagatgcttttactcttgtaagtaggagacatttttcaagttgtgtagccatgggacatctactatcccatgcctctttgatttggcggtttgttctctcctaacttcttggcatccttgtagggcatagacgagggccccgaggggctgaagctcatttctgacatcatccgtgagaagatgggtattgacatcagtgtgctgatgggagccaacattgccaatgaggtggctgcagagaagttctgtgagaccaccatcggtaagcactgcctgggagggaccccaggagtctggacatttgatgtttgaacatgtacatattccatttctgatattttctgtaatagactcttccctgtccctcttaacattccttagttgggcattcagtggggcgagggttttacttaaggaggctattttgtggaactgaagtgtttcaacaacctccagaatgaatataaatgaatatagccaagaagagcattctgacttgctgtgatccaataatgaattactgaggttaaacacaaaagtgcaaggttgcttgtaccaagaaacaggtggctacatccatggtaggggtcccctggcctcagaagcccaaattttcttttcttacaaatgttagtatctggatcctcattgattccagtgagatctaaaaattggttgaatgacccccattttcaggtgaatgataagactcagagaataaattacctgccccaagatcacacactaatgtagaagccaggaacaaatttgagtcttctgtttcctgaactagtaagccttttctactcttacacattatacattagatacattattctcacattgacgttatgaaaattttcatttcttttgaaaggggctttgagaattctcaagtgtccgtgtactatattaaacgatgctttgttggaagagtaatattattgtattttcagatgctttgcaaaagtttatctaccactgcagaacttactttcacccttatcaaacctgcaagcaatatgaatcatttccccttggcagctttgtaaaaggaagctctgagagatgtcaggctctcttgcatgagatgaatgcgcaggaaaatgtagctccagattcttatacctgcctatacgtaggactttttaggatttttttggaattttctaccttaatttttatttttaattatggaggtattttacatgattattatggaagatagagataatcaaaagaaagccattttaaatttttgataattttgttatatatccttttttactatttgtatgaactattatgtttgtagtgaatcatatgctgtttaataattgctttattcgctgaatatgtaacaaaaacctttcagagtctgttaacatactgtacatcctcataactgcatagcattccatcagcaattccatatatttggatacaaaacttttttttgaaaaataatatttgttggagaggagaagtatcacaaataatacaaagaagaaaagaatagcctatgataccacctgcccaggttgtcatttacgaaagtgatacagacacaggtttaaaaaaaaattcaagcaccatgagaaggtggaaaagtagaactaagattgtaatttcccacccatttccctcttcccagagggaatcactgttagcagtttcttttttgttttttataattgcaacttttattttagattcgggggtacatgtgcaggtttgttacatgggtgtattgcatgatgctgaggtctgggttatgactaatcctgtcacccaggtagtgagcatagtaccccacaggtagtttttcaatccttccctcctttctctcctctctagtagtccccagtatctgttgttgctatctttatgttcatgggtacccaatgtttagccctcacttgtaagtgagaacatgcagtatttggttttctgttcctatgttaactcacttaggataatggcttccagctgcatccatgctgcaaaggacatgattttctttttttttttttgagatggagtctcaccctgtcgccaggcttgagcgcagtggtgctatcttggctcactgcaacctccaattccctggttcaagcgattctcctgcctcagcctcccaagtagctggaattacaggcatgcgccaccacgcccagctaatttttgtatttttggtagagacagggtttcaccatgttggccaggatggtcttgatctcctgacctcatgatccacctgcctcaacctcccaaagtgctgggattacagatgtgagccaccgcgcccggctgatttcattcttttttaatggcttttactattagcagtttctaaatattcttctggaaaaaatttatttatatttgtatgctagtatgtacatatatgaatatgtcttattcttttacagtaaattcttttatttatctgcagttttaatatagcctgtgaaattgttatgtaattacttatattttcccaaaaagattaactagtttgttccaactcaatcctatttgccaataatcctttcccagttcattctggaagactaaatcttaatctgcaatcccaatccctgatccaatcctggctaggactctagccctgtttgttgtaggaaagtttctagttgggtacattaggcttttttggttttaaaaaacagataaaagcacataagttgcatttctttccctctggcatttctttacccggtgcttctatgccttctctgtggggtggagtgtgataagcactgatgacctgaattaaattaagtaaagcatttctgggtggagtagctctcgtgaggctaaagccgaggatcttctgaggccaagagtttgaaatcaccctgggaaatgtagctgggagtttccaaaaaagaaaaaaaaaaattttttaattagcctggtatggtagtacatacctgtagtcccagctactcaggagactgctgtgggaggatcaccttgaggctaggagattgagcgaggctgtagtcactgcagtggctatgatcacgtcattgcactcctgcctgggtgacagcaataccctgtctctttaaaaaaaaaaaatttaagtaaaacattgaaagtaagatagaatatgaaagtgatgtttaaaaattgttttatataacctgaattaattaatttttaaaagtagagtcttgttcgaattcctggcctcatgggatcctcctgcctcagcctgctgatgtaccgggattacaggtgcgagccactgtgcccagcctataacctgaatttaatcatgagaaaatatcagacaagcccaaagtaagagatatgttataaaacaacaggccaatggtatctttgactcttcaaaaaagtcagtgtcatgaaagacaatgaaaggctaaaggagtgtcccagaataaaaaggactaaagatatattaccgagccaggcgtggtgactcacacttattatcttagcactttgggaggccaaggtgggagatcacttgggcctaggagtttgagaccagcctgggcaacataatgagatcccatctctacaaaaaatacaaaaattagccaggtgtggtggcgcacacctgtaatcccagcactttgggaggctgaggcgggcggatcacctgaagttaggagtttgagaccagccttgtcaacatgacaagcgaaacctcatctttactaaaaatacaaaaattagccaggtgtggtggtgcacgcctatggtcccaggtactcgagagcctgagatgagaggattgcttcagcgtgggaggtggaggctgcaatgagcagtgatcgcaccatggcactccagcctgggtgacagagcaagaccttgtctctaaaaatcaaaaaggagacatgagcactatgtgcagtgtggggtcctggattaggcagggagggttgctgtggaagacaatgcagaggtgattggtgaggtttgaatgtggattatatgttagataataatattatgtaaacattacattttctgtatttgatcattgcagtgtggttatccagacatcctttgttgatgcatagggactattttaaattgcggtaggttcaggaatcgtggcccacttgaatcttctgtggagggaaaagatagggcagcttcaggcctcaaaatcctgtcatggtgaactacagtgccctcttgtggtaaggtctcctttcgttcttggggcataccacagactctgaggcttttaatccagtcattccacaaatatttttcaaaccctcttatgtatcaggcatggtgccaaatgtctagaatacataagctccttatggaacttgtaagcacacaaacacatatggaatcacaaactaaaataagggttttgaaggagttttattacataggttaattgcctctaaaacttggtgtgacagagaaaggggattttcctgtctttggtttacattgagttttgggcaaccttcccacatggctgtccggcattagctgttctgtacagatgccctgagtccctgcttgccatgtcactgtttattactggggtttgttgttgttgttgttgttgtttttgagatggagtctcacgctgttgcccaggctggagtgcagtggcgtgatctcggctcacagcaacctccgccccctgggctcaaatgattctaatgcctcagcctcctgagtagctgggaacacacacacacacacacacacacacacacaccaccacgccaggctaatttttgaattttttgtagagatgggatttcgccatgctgaccaggctggtctcgaactcctgacctcaagtaatccacttacctgagcctcccaaagtgctgggattacaggcatgagccaccgcgctggcttatgactggtattatattaataataaaattcgcgggccgggtgcggtggctcatgcctttaatcccagcacttgggaaggccaaggcaggtggattgctggaggtcaggagttcgagaccagcctggccaacatggcgaaaccccatctttactaaaaatacaaaacttagccgagtatggtggcgcatgcctatagttgcagctactcaggaggctgaggcgggagaatcgcttgagcttgggaggtggaggttgcagtgagctgagatagtgccactgcactctagcctgggcaacacagcaactctgtctcataaataaataaataaagttactacctattatccatgatttaaggtaataaattttaaaaggtacctttgagaaaatatgagattgctataaatcaagcccacctcttggatgggcattgcgttatttgcagccacaaaggaacccatagaccctaccttgtatctatggcaagccaagagtgtgccttcccctgcccattcctcagtttgttcaccagcaacccaagtttccagctgcagatggctggattaaagtgacttgagggaggggctggtctgcaatgttcaggagcatgcttcatgttggaggcactgagcagtgggaggagacacgatgaggctgtaatatgatgtaggggccaggggctggtttacccaacccagatgatgcaacagtgttgcacagagtcacctagacagcctggtggactgtttaaaaaggaagagaacagtttgcacaaactgacatagttctaacatttggaaaaggggaactcagctaaatgaaagaacagtaatgctacagagtagactgtgtttctaagtattgggtgtagatattgtgttttattatgaaacttttcagaaaagtagagtagtatcacgaacctcacatgcccgtcacccatctttagaaatgattaactcctggccagtctcatttcatccactccccaccctctctcaaccctcagatggcctggattattttgacattgtgtcacttcttggtgtagttttacttgttgacaatcatgcttttttctttttttttttttttttttttgagacagagtctcgctctgttgcccaggatggagtgcagtggtgagatctcagctcactacagcctccacctcctgggttcaagcgatgctcctgcctcaacctcctgagtagctgggaccacaggtacgtgccaccacgcccagctaattttttgtatttttagtagagatggggtttcaccatgttagccaggatggcttcaatctcttgacctcgtgatctgcccgcctcagcctcccaaagtgctgggattacaggtgtgagtcatcgtgtctggccaaaaaaaactttagattcacattcggtcagttaaaaatgtatgtcaaattgtaaatgatcacctcgattggaaacgggatatttttactttatttctgctcctatgtgttttctaaatatcctatcatgaacatgttacttttatagtaagtagaaacttattttaaagtgtattaggtgtgaaaattaagattagaggctgttattaatatccttgttgtctaacctttcaacaggcagcaaagtaatggagaacggccttctcttcaaagaacttctgcagactccaaattttcgaattaccgtggttgatgatgcagacactgttgaactctgtggtgcgcttaaggtaaagtcagcctcaggggaggagttcatcaagcaaggcaaatgttagcatcattgagtctaatcctcaagaatgggctctgtgttctgtgcacccacatcagcgaagaatagtgaattgagagtcttgtttataacttcctgttttgctgcagcctttcccgggtggttcagttcctctcttactcgtggcttgctttaacttgtaaatatgggggaattgtgatgttttggtctttgggaagttggcagcattgatatttggaaagcatgggagttccttgatgacagggtttcacccaggagcaaatgattctattcattcatgtttttctcccacacttcatcctgagcaggaaaaggaacttgtttcctctgaattatgctactctactagtttggctggttgttcttattaagggaaaaaataatctgctgctggtagaggtttttctaagaatagttttgtctttgccctcaagagagagaagatgtgattaaagaaatgcactccactggccagtggcttgctggatttttgtaagtggaactgtacagtatgcactcttttgtgtccggcttctttgattggaggtgtatttttgtttgttttaatgtaaattttaagaggtacttcatacagaaaagtacaaaaatcataagtatgtagtttatgttatctttttttcccctcttttgaggtaaagggaggtctccacacctgggctcctgacttgttggctgctgtcttttaaagccttaggcactgtccctctctctgccgtgacttgggggaacaaccaacagggaacagcagcagctacctgctcattccccctcactatctaagttgcctttatttcactatcatctacaaaaaagagtggggggaataggggaaataaaaagttctcaatgtgaatgccccttttgagccacttctgagtcatctcttttgcagcaaaaagccacccttcagaaatttgagcatctagggaagaggttaggcaatccaccagtcacctgtctttattggatgggagttgcaaaggtggaaagaatgcctgtctatgctttctcataaattgtatatgtttttttctagtcagaagttaaaaccactctctagaattaacattgtgtatatatgtgtggtcatgatatataatgagcatttaaaaaaattaaagccaattaaaggcctgggctcctagggagcacacatgcatatttctaagcgcctgtgtggggcattctttgcattagcattacattacatgcaggcccagttatacatgtaagacgctgactttggctgctttgtttatttttgttggttgagatttttatgtgtttttaatagtccttcattaaactaattaccactcaacagcagggggcatcgtgaatgcctaattgctcagtgctggcctgagctgctccaaagctgttttcaagtgactggatgtttttggtggtcatggagaagctgtgaaaccctgcccagagcaaagagtgctgggtgagaagaaggagtctagattgaggtgagggctttggaaaagcttctgctaatgggaacccatgctggtcttgtgtctgaacttagaatggctttcatttttgctggcaggaagactgtaagtggatgtgccagctaccttgatggaaagggattcatgggggatgcagggaggtgggggttgaaggcccttaatcatcctccctgcaacttcccacacaatcttttaaaacgagatcagttaccatcattcctgggggtttgcatcagagttaaaatttttgaaaactgagaaacaggcacttgtagcaattattaactccaaccattgtcttgcacagataaggaaatcgagatccaaagagcaaatgactttagggtagcaaacactggcacactcggagcgtgaacacgggttttaagactctcagcccagtttctttggttactgtgtaccacttgacttttctggttagtaatcaggcagcatgaatgaaacgaagccctctctcatcagagcctgccagagcaaggacacatggccgtatgttgctttcatcacataaataacagtgatgggtttttccccccgactataacacagtcatattccttgttttcacacaacagaaaggtgtaaagaaggaagtaaaaatcaaatcactgacaatcctacatcctgaaataacctcagttaatgtttgttgtatacccttccaatgtttttagtgtgtacctatgtgtatgggtcctttttaaaacaaaaactagatattagtgttcaagtagtttgattttgtgtgtgtgtgttttgtttgtttttgagacaaggtctcgctgtgctgcccagactgagtgcagtggcacaatcatggctcattgcaacctcagcctcccaagctcaagctgtcctcccacctctgcctcctgagtagctgggactacaggcacatgctgccatgcccgactaattttgtttattttttgtagagatggggcctcgctgtgttgttcaggctggtcttgaacttgtgaactcaagcagtcttcccacctcagactcccaaagtgctgggattacaggcatgacccaccacatccagccattgatgtgttttacttttttacgttaacaatctttagtaatattctccatactagccaatttacaaaatgtacattatcttttttgtactcaaaaatgtggagcatttgacttactaggaaaaatgtgaaaacaactctctacaaggataaaatagaaaattcaaaggatttatgcataatcattttgtaccagtgcctcttactaccttcggaatgtccttcatgaactcttagctgtattcatctcttagtaaggatatatccttttttaaaaatcaactttaagtgtaattcatgtaattaggccaggcatggtggctcacacctgtaatcccagcacttgtggaggccaaggcgggtggatcacgtgagtatgggagtcttagaccagtctggccaatagggcgaaaccgcatctctactaaaaaatacaaaaattagctgggcgtggtggtgtgtgcctgtaatcccagctactcgggaggctgaggcacgagaatcacttgaatctgggaggcagaggctgcagtgagccaagatcgtgccactgcactccagcctgggcgacagagtgagactccgtctcaaaaaaaaaaaaaaatgtaattcatgtaatcaaactgcatctatttagagtttataataccatgggttttgagagttgtgtgcatgcacttgcgaaaaccactaccaaagtacacaacatttccattatccccaaacaactccacatgtccctttgaggttcctcatcaccccagcctccagttgggcagtcagctgatctgcttttatatgccatcgtttgcattttctaggatttttataagtggaactgtacagtatgcactcttttgtgtctggcttctttgattggaggtgtattttttgtttgttttaatataaattttaagaggtacttcatatagaaaagtacaaaaatcataagtatattgtttaatctatgttatcttttttttcccctctgagagaggtcttgtgttccttggctcaagctgttttcctgcctcagcctcccaagtagctgggattataggtatgcaccacagcgcctgatttatgttattgttttctgtgtttttaaatagtctagtggtcttttttttcttaacaacttttttttttttttgagacagagtcttgcccaggctggagtgcagtggtgtgatctcagcttactgcaacctctgccttccaggttcaaggaattctcatgcctcagcctcccaagtagctgggattacaggtgcattccaccacacccagttaatttttgtatttttagtagagatagggttttgccatgttggccaggctgtagctggccaacagatgtattacatctgtaatgtacgttttgtaattggctactatggagaatattactaaagatgattaatgttaaaaaagtgaaactcatcaatggctggacgtcgtgggtcatccttgtaatcccagcactttgggaggccgaggtgggaagactgcttgagtccacgagttcaagaccagcctggacaacacagtgagaccccccgcatctctacaaaaaataaacaaaattagtcagacgtggtggcttgtgcctgtagtcccagctactcgaactcctggcctcaagtgatccgcctgcctcagcttcccaaagtgctggggttacatgcgtgagccatcacacccagcctatttttcacacctattatgcatgaattcatagagaataagtcccagcagctcaggctccttcccactggttcccacaaagtgcgcttctctgggtggagcaggctggtacttcagtctaatccaggtacctttctctttggcttccttctttttctgatcattttccttcatgtgtttcaggaagctatctcagctcttagcttaatatgctccatacacccattaattcttggcaagaatcttgcccttaacttgtttaccacaatgccagcagcatgctgggtaacattgtagactcttccagtttagccatggtgacacttgtggggcattcctttttgaacagtgaccattcccctgatgtctacaatatcatctttttttaaaaaaaggttttttagcttatgtatttattttttattttttttgagacagggtctcactctgttgcccaggctggagtgcagtggcacaatctcagctcagtgcaacctctgcctcctgggctcaagtgatcctcccgcctcagccttctgagtaactgggactataggtgcttgccaccatgcctgctaatttttgtattttttgtggagacagagtttcaccatgttgcccagtctgatctcaaactcctggactcaagtgatccatcagccttggcctcccaacgtgctaggattatagacctgagccaccacaccctgccaatatcacctttctgatagattcacatatatgtggccaaaggagcaacttcatgctttctaaaaggcctggagaacatatgtcaggtacttctctcctctttcccttttgtattcatcattttggtaaattactggaagatggcgattctggccagaaggctatcatttttaatagattctttatcaggattgagtttcattaacagagacccaaaataatacaggttgagtatctcttatctaaaatacttgtgaccagaagtgttttggattttggattttttcttttttggaatatttgcattatacttaccagttcatcatccctatttgaaaatacaaaatgctccaatgactatttcctttgagcatgatgttggtgctccagaagtctcagattttggagcattttggattttggattttcagattaggaatgctcaaactgtactggctgaacaaggtagacgtttctttctttcttatgtaaaatccagaatgtatatgacaattctattctatagaattcgcagggatccaggcttcttccagctcacttggtgcttagcccattttgtgctgctataacagaacacttgagactgggtgatttataatgaacagaaatgtattggctcatacagttctggaggctggaaaatccagtatcgggcaccagcagttctggtgtctcatgagggcacggtctgttccaagtggcaccttgaatgctgccggaggggaggagcgctgaccctcatgcaacagaggaatggaagaggcaaacagagagccactcccggagtcttttttctaaggaaaagcctcagtccattcatgaaggcagaacacgcatgaccaaaacacttcctgttaggccccacctcccaacactgccacagtggccaccgaatttcaacatgggttttggagaggacaaacactgaatggcatagggtagcatagggtgtggcccttgtcttcatggtctgtgaaagtgaccagagcatcaatgtcacatctaccttccaagcagcgaggttaaaaaaagaagaaagaaagaaagaaaaaaaaaaaaagacagacaaagagcacgtggcagctatctttcaaggaaggttctggaaaatcaaccttgtcacttggcttcatctcagtgggtacactaggtgtgaccataactagctacaaggcaggctggaaaatcattttggggatcttttttctggatagccatatacttgcattaaaataagagattctattattgtagaaggaaagaatagattggggataaagcagcagcccgtggtacaggctggtggtgttcctttgtggggctgttctgcagttctaattgctgggcatgtaggtttgctccagggctttggctgtggtaaaccatgccgggatgcccagctttgggtctcatctgtagtcagggccactgctcgcccaaaagcacctttatgtgagtgagagcaaggcctacataatctgacatgctagccactagacatatgtactatttatatttacattcaaattaattaaaattcttaaaaactaaaaattccatttcggagtcacagtaactacattttgaagactcagtggctgactaatggctactgtattcgatagagcaaatataaaacatttctatcattgcagaaacttctattggacaacgctcttccagctaaggcagcttcatattggtgcgaccgactaggtgggccaagtgtgggcctgcctcagccttccttgacatctcagccaggctgccttagacaggggccagcagcaaacaatatgtggcaccttgcctttagtaatcccaaaccctgcagacagtctcctcttggcagctagcctcaggaggagtcggatggattgttggactgagagaaaacagtgagtactgacttgggttttggggaggcagttcttgctgggtggtgagaatgtttatgtaacctgcaggtagcatgggctggttctcctgttctttattctttttgtgggaaggtggaagtgggagaggaattgagccccatccaacccacccctattcagaactggaaagagtacactcaagagtggatgattgcctctgagtattccgtcactcaggagatggggaagagctacatacgtctgttttctgaaaattatggtatttttagctccaaaagagtttaaagcagatttaaatgcacagtggataatgataactttcacatctgagcgatctcggaggacatctgctcggatgctgttcaaacacgctctgactggctcagtatctttatttttcttttgacaatggtaagtggtggagggagagaatgaggatttcaagatctgtcataaggcgactaaactgggttgcagcccagggtcctcttagaagagaggagtttaccctgcactaggtctcctgatctcccctggtgggaaggttaaatgtctagtaaaagcttctagtagaagctttggggtggtctagactcccatgccctgcagtgaaggggccacagaggagctgtgagggagcacccaggcaccctcatgtggcttttctgagtacagcaacatagaaacactgctttggagctcagggcctgtccatacagtcctgcttggatggttctggttgcagagagctcctgctaaatctttcctgttgggtgaggtcagctcttcctgttagaaagttctcatctggactctgcggtggcctctctgtgcctttcactcactgaccctagagcagcacggtgtggcgtgatcttctcgggcaaggtccttactctgtgtgcttcagtttcctatcatgttcccatgataataggacctgccctgtgacaatgttgtgaggtttaaatgaggtaataatatatgaagctcttagaacagttcagtaaggtttgctgttgctattttttattaccttttcttctcctaagctacttttttttttttgagacaggctcactctgtcacccaggctggagtgcagtggcatgatctcggctcactgcaacctccgcctccccagctcaagtgatccttccacctcagcctcccaagtaggtgggacgaaaggtgcatgccaccatgcccagctaattttttgtatttttggtagaaacagggtttcactatgttgcccaggctggtctcaaactcctgagctcaagcaatccacccaccccagcctcccaaagtgctaggattatgcccaacctaagctaccgtttttacctcccaagccttggtgtaggccagggaggcactctcctttgacaaccaattgcaaagggtcaggcaggtctttttgaccgaggttggaggaagggcagatttcccacactggagcagcaaggcacaggggacagagcgggctgcaaagccaggcaccaggggcacatccagactccatcttttaccagtgaggtgttctcagtgggccactaaacctctctgagcctcagttgtgccagttgggaaataggaggataggtacatacttctgagtcatgggaatgatgatgaggcagtgtgtaactagcctgggctggctgaaggcacgtaataaataagtgcctcccctcctctgttgacaggagccccttgttgaacagaagtccatgttctctcccattcagcccatagacatttcctggggttggtttttcatataacagtttcagaatggttcatgttgtgatggagggggaaatagggacacagtccagggggcatcagagagcaatttcaggaatctgaccagttggccaacagcctaagcctcgccacattgcatggcaacttcaataaaaccacttggccagctcacccaagggctggcctctgggcttcggcagtcagacccgctgcatgtccccaggtgtcaatctgttgccccagtactggttgcagccccagtgcaggctacaattgcaccaactttcctgaaagaatgtcaatactagaagggccttgaaaagtcttgtccaagccctgaattttacatctgaggtgaagatggccggagaggtggagtggttggcctaggtcacactgtgacaatgtagaggctctctggatgtcagtgccgtgtaccgcttccgtctccttgtagcctccttagtctggctgctatgctgggaagggcgtccagacctaggtgggcccagccccaggtgttcttatggtccctgctcttagcctctgcatagcactcatcctaaaaggtctggctgtcccatcctgactcggcaactcaccccttctagaagcagagctgcagaactagatcgcacccgaccccccagcatctctccaggctcctttcacacggcttctgccttgcctcttccatgatgctgcctgttgctgagagtgtgtaagccgggaattacacactgatgagaactgatgaaacctatagttcgcatagcctgtgtggtaggaagaggctgagaagctttcgcaggttcaggcaagttggtaccttacgaagacatatgcacttggtcaggctgtcagttcctaggaccaattcctcatcagctctgcctgcatcatttttagagaatttttccactttttcctttctatgttgactgcaatgagaggcataagcagcaaccgcagtaagctctcacattattgctcaggaagagaagacactagggggccttcctatccccatcctttattctctagccctcttcattccacatcaccccgtgggagagggcaagagagggctctgttctgtgggtctgtggggagtagacagaaacttcaggaggcccaattggatgttttttttcatgtgaagtatctttgcgcctcggtcttctggtaagcaatagctgtatctaaatgaccaagtctgtttgtcatggtgagcccggccacatcaatgatatgtttgatgtgttttatcaaaaactgcctgtgtactagagaagacatttttattccccagctcattctgtttttcatctcatccctcacattttataggcctgatgttttaagaaaagttattctttcactataaaacttggttttattaaaatacacttattttaactcatttcccaaactaagttcatgttttaaaatctcccacggctctctgtacagtcacaggtattactggaattgctagtgtggttagacagttggatatttgctttttggggggcattgagtgttcttggtgaaggagctggaaaagtggaaggggccaggaacctaggggctcaactgaagttccaactgagttgccacctgtgcaactgtgcaggtgttacttgtcataggtggtaatctgacttttacttattatttgggcccagctcagatgccgcctcctccatgtggccttccctgctgtgaacggaagcttgtggctcctgccacttgtcagcacactctctcccctctgccttttttttttttgagacagagtctcgctctcgcccaggctggagtgcagtggtgcgatctcggcttactgcaagctccacctcccaggttcactccatcccctctgccttttgatgtgctttgttgtgtctcttttctcagccagattgtcagctccttgaggacaagctctatgtcttaactctcatctttgcagctctcccctgggggcatcttcagcccctgcattccccctgccacccgctagcccctgcaatcactgtgtccctccagggctgagtggggtgctccccacacagtacatgctcagtgcatacctgttgaaacggaatttcagattctcagtaccttttatggaatatcactttctgctgagcattaacagttatttgtacacgttttatttttcctgtaaggtcagggctggtaaacgttttccatcagggccagacagaagaggccttgtggaccatatggtctctgttgcaattactcaaatctgcaaccatagacgatgtgtaaatgaatgggtatggctgggttcccgtaaaacattatttacaaaacaggcagttggcctagattgccagcccccttagcagattttcagcttctgaaaaggcaggctctgtgtctcatttgccttgtgtctagcagaggccatgcagagagtgagtgctccataaatactcatttggggattattaaatgaagcaaaaggctggaatttgagctgcacacatacaggcctcatgacccagtgtttcaattcctaggtcatacccaacaggattgcctgcacgtagtcaccggagggcatgtgccagggtgtccatggcagcactgtttgtcatggccccaaactggaatctaccccagtgccagttgacaggagataattaaatcaattgcagcatattcacaaaatggaatactatgcagcaattaaaataaatgtgctctatgtaaaaatatggatgaatctcacaaacacgatgttgaattaagatgaagctacacataaaatattacatattgtatgactccattcacaaaaagttgaaaggcaggtaaaacacatctatgctgtgagaagtgaggagagtggttacctttggtggtggaggtgggctggaaggggttctcgggagcttcctgaagcactggctgtgcttttctccttgatcagtgtgctggctatgggggtatgctcagtttgtgaaaattcttcaatccgtgcacttaggatttgtgtacttttctgtatgaatgttatggttgcataaagcattccatttaaaacaaaacaaaaagtaaagtagtttgtccaaacattatttaaccaaagactactatcagccgttctgattttctgtccaatgctcttcaactgctgaccccaaatatgggctctttgtcctagaaaggggaatatggaagccctgtctctcctttcgtcatctctttcacccaggtgtacaagagcagagcccggcattgagtattttgaagatggagccaatgtccctggtctgcccctgcctcggcatcccccaccacctctggcatccatacccgtggtgggtgctgtaacggcatctgggctttgtcatctcctttgcagaacatcgtagctgtgggagctgggttctgcgacggcctccgctgtggagacaacaccaaagcggccgtcatccgcctgggactcatggaaatgattgcttttgccaggatcttctgcaaaggccaagtgtctacagccaccttcctagagagctgcggggtggccgacctgatcaccacctgttacggagggcggaaccgcagggtggccgaggccttcgccagaactgggaaggtagcccctcacctgctctcccgcaccccctccttcctcacttgagactcctggcttggggtgaactgcagcccagtggagatttcatgccagcatctatttgctgggattgttccgtttgcctggctgctttttcacttgactcttctgttctttatctttgtgtctttatctttccttggcttccagcaggggactgaagctcttctctcactctgctcttgaaataattgatgctaggccgggcgtggtggctcatgcctgtaatcccaccactttgggaggccaaggtgggaggattgctttaggccgcaagttcgaggccagcctgcacagcatagcaagacccattctctaaaaaaaaaaaaaaagaaaaaaaacacttaaaaattaaacaaataaatgattctttagtctttaccatagtttttttaaatatataatcctttgtttttaagaccattgaagagttggagaaggagatgctgaatgggcaaaagctccaaggaccgcagacttctgctgaagtgtaccgcatcctcaaacagaagggactactggacaagtaagtctctcagtcgcccatgagaccagataaatgtccatcattcctattctcaggacttccagccccacggagatgagctagactatttgacaagtgcccttagaacttatctggattagttcagtcctttgtgtgatgtgaacgtctgtgatgagaagcatctacctactcccaaaacatgtgtttacacaaaaccaggctcaacttcaatgaaaggagctcaattctataagtcatgttataaaatacaaaatttaagattctagtttgtctcgcagggtgtttggtaaaagctacatatcatacgttttaaaatttgtaaaaattacttttttgtttttattaaaaagtatggttatgttattaaaatgtcaagtcagaaaagaaggaaggacgagttagcccaacattataccattagaaggtagctctgttaagtttggtgcacagccttccagtctcttcatcgggtgggtagatggggcttaggatgggatgggatgggatggaatgggatgaagggatggatgatgggtgggtgggttggcaggtgggaagggatgggatgagatagatggatggatggatgatggatgggtgcatgggtagatgggtgagtggatgggtgggatgggtgaatggatggatgatgggtgggtgggatgggatgggatgagatggatggatggatggatggatggatggattatggatgggtgcatgggtggatgggtgagtggatgggtgggatgggtgaatggatggatgatgggtgggtgggtgggatgggatgagatagatggagggatggatgatggatgggcgcatgggtagatgggtgagtggatgggtgggatgggtgaatggatggatgatgggtgggtgggtgggatgggatgagatagacggagggatggataatggatgggtgcatggatagatgggtgagtggatgggtgggatgggtgaatggatggatagatgggtgggtgcatccatcctccattgcccttccaggccagttgtgtgttaaaggtgggcttaagtcagtttatttgccacctgattgagagagtgagccctgtagcaccagaaaagcttcccagcctctcctgaggccactctccagccctacctgctccacagcactttctcttgccgatttactgagcatgattgtggaggaccataatcatgatgccaactacaccactgcataaatgcttatgcagcatattgcatgtatccttaactctcccgtaatactctctaggggaggggaggtcttgttgcctaggactgaagggagctgggcagctggaatgacatgctgattgtggctaatttagagcatgagcttctctccaagctgggaggagggtcgtggatgttgttgctattatctctggttgcagctcctttatcctggttctgtcagtttaggtgtctgctggtcccagtcatgcatctttacctccccctgcacccagcacccctcctccttttacccagaacaaattaatcagccatggagttctgtactgaaagttaaaaatgagggtggatggagcatttgtcttaccttttaaatttgcactttatttttctgaaatggcttttaaaaccagccatgcagagatggaagttcacaaacaggctgccaaaggaggagaactacctttaaattgtggctaaaaggaaaatgcctctgacatgcatggttttccttacctacttagcagcagacagtgatatgtttgtgtgtggttggactactttaatgaccactgagcatttatcaagaaatttttttaagtctcaaaaaaaaataatacttggctgtttagtgagactctcccaaccagaattttcaagtggcatcttgaaacacaccccaagtgtgctaccatggggtgccttgataggattctctggatggacaggttggctgggcattagcctgttagctccagggggacatggactagaattgcgattctggggccagtagctccctgttttcaaaagcaggtgtaatcaagcaggtaaatctctgctctgagcagacatctctccttggtcatgtcccattttatttcttctgattagagattgaacaggctccacctgtgcttaataacatcgctgctggattggacgtggcagcacccttctcctgggctggagtgtagaatcccctgggactcctccccattccttgtaccacctgcctcccaaaggcagaggcctattgtgctccctttgcaccacctcttactttgattcctttttcctttttcattctgaccaccactactccggtcttcctctgtttccttctccctcccttctcttctccattgctatagaaaaaatagcaggagggcagcattcaaggctgccctgtggcttattagccctgtggccttgggcaagtcacgtatttagctgttctgtgccccggtgttcttatccacaaaattaagatggaagaccagatgaacaccatggtccctaccagcttgagcattcacattcagaggcctcctgctcttatagagtgaagcacatggtccttaggcagatgtggcccccctcaatctagcaccaatgtaacttcctgcagtacatcctcttactccctatggtaccgtcttttcttgaatggaacttttctttgcctctcattttaccttaattaccttttctttttttttttgagacggagtctcgctctgtcgcccaggccggactgcggactgcagtggcgcaatctcggctcactgcaagctccgcttcccgggttcaagccattctcctgcctcagcctccccagtagctgggactacaggcgcccgccaccgcgcccggctaattttttgtatttttagtagagacggggtttcaccttgttagccaggatggtctcgatctcctgacctcatgatccacccgcctcggcctcccaaagtgcccttaattaccttttcaaagaccgtgtcacattctgagatactaggggttaggacctaagcatattaattgggaggagggcacaattcagcccgtacacaacatgttctctgaggtgcatgttgcaagctcctgggtctcactctgtcacccaggctggagtgcaatggtgcaatctcagcactgcaatctccgcctcccatgtttaagtaattctcttgcctcagcctctccagtagctgggattacaggcgtgtgcccctatacccagctaatttttgcatttttagtagagactggtttttaccacgttgcccaggctggtctcgaactcctggcctcaagcaatctgcccaccttggcttcccaaagtgctggattacaggcatgagccaccacgcctggcctggctttatttataatactgcacatccctgcacttagtctgaagtctgaaacatcttaagccctcagtattgattagtgggatagctggctgactggtttgtcctttttttttttttttttttttttttgagacagagtcttgctctgtcgcccaggctggagtgcagtggcacgatcttggctcactgcaacctccacctcccaggttcacaccattcttctgcctcagcctcctgagtagctgggactacaggcgcccgccaccacgcccagctaagtttttgtatttttagtagagacggggtttcactgtgttagccaagatggtctcgatctcctgacctcgtgatccacctgcctcaacctcccaaagtgctgagattacaggcgtgagccagcacacccaggcctctggtttgtcatttttttaaatgaaatgttgtctttttcttcctttcacctctaactttatttagagagtcttccaaactgatctaattgtccttttagcattttatgtaatagaaaataatatttagatgggcagtgtagcctaatggttgatcattggcttcagagtccaaaactgtggttcaatttactcatatatagaatggggacaatattttctacctcatggggtgattgtaaggattaaacaagttactcgtctgtagaaatttctcttccacacacttcatatctcttgttaacatcccttccacagaatgcactttggaaatgatagttttaaaagttgggagtgctttcagctgcaagaccaacacacagttataacagggaatatggaggtgaacattattaaagtgttggcccagtggctctggctctggattagaatctcagtgatcctgttggctttcccttgaacctcaagatggctgcagcagctccaggcatcacattcacttttacactcaggaagggaacaagagtagtctggggtaacagatttttcctctagtgcctctcgagaaatcttcctcgagaaaccttcagcagatatattatgtcttgctgcctaggactgtgttacttgaccaattctaggtgaaaggctaggaaggtgagtagtctcttccaaccttggggaaagggagaagcaggttggaaatggctttggatggccagtcatctgctaccacactgctttggggacatatacattgttcttgttttaggaacagggaaacatagcatggaaggacaaagaaaggggctgaagtttctaggctttaaatccaatccacaggaatttattcaacgaattctcacggagcacctgccccttgccgtgcatggtgccaggcactgaggatacagtagtgaaaaaaacagacttggtcccagtcctcagggagctttctcggtccaggacacactatccatcttgtggctgctattataagctgttgttactgcacatccaccatttgccaagtgtgtactgtgtgcttcacacataagtcatttaatacttgcagcaaggctgtgtatccagtcccattttacagatgggcaaacagggtcagaaggattgtgaaacttgcccagagttagtaggctgtagagtcagagttgattaggtctacctgactccaaaaaaataaaacattccacaaaaaagtagcaaaacattccgtaccttaaaaaaactacaatgaagaaacaaccctacaacgatagactctcataaagacatgtgatctattagtactatttgttcttcttaaaaattatcattataaggttctgtccagctaattttcaggattgcctttcaagactctattgattctgccaagctcactttgagctatgtgtgtgtgtgtatttaaaagcctgggccggcgcggtggctcacgcctgtaatcccagcactttgggaggccgaggtgggtggatcatgaggttaggagtttgagaccagcctgaccaacatggtaaaaccccgtctctactaaaaatacaaaaattagccaggcgtggtggcacacacctgtaatcccaactactctcaggagactgaggcagcagaatcgcttgaatccaggaggcagaggttgcagtgagacaagatcatgccaccgcactccagcctgggcgatagagtgagactttgtcgcaaaagaaaagaaaaaagaaaaaaagcctgatgaaattatttctttagtgatttttcacttatatctgtattcacatcttggaagaaaaggtaagataaatcaagcttctgacataagatgagtgctttgctaatcgtgggtcctcactcggattcttgcgggagcattccagcctacattatttgttaccttgggatgattctttttggagaagggagagcaatgcctccttgcaatttaaaaatttatttttacaacttttaaaataatgacagaatatagactcctccaagatttgaccaagagttggagccacagctcctatgtaaatgacaacagtttgccctggtaggatcaccgtgtgacttggttgtggacagtgtgctccaagcttaattaggcagaggatggtctaggttgccccaggatctgacagccacattccagaggctctctgcagaccaaataataaaggaatgtagaaagtgctcactgtgttttccatagtcacatactaacctgcaatctgttaggacagaaaacctaacttattctctgaggtaaatccagtggcctaactttgtcttttcacatttcctcccaactaggtttccattgtttactgcagtgtatcagatctgctacgaaagcagaccagttcaagagatgttgtcttgtcttcagagccatccagagcatacataaagtgaatcatgcaacgtgttgggggaagttctgcctttctgatcaatcttttgggttcacgtggaaaccaggacttggcaacatgatgtttgactgtaatctcatcacggatatgtatgaatttttacaggttcgtttttgaattgtgagaggcagttcattagcaaagatgtactgggcagtaactaaacacacatgcaaacatgtgaatggtggtttattcctcattctgtggatgtttctatgagccaaaatttgatgtctttttttcaaaattgcttatgaaatttccacacaatcgtagcttataagattggaacgatctcagccaaatattttaggtgtaattcatatgtatttgagtggaggattttttttctcatttttctagtgttaaattttaaccagcattaacatggtagagtggaggagtgagtgtgttcaaagatcaacatatttaacttttaaacactatctcaaagccagcataattaactactttgattgtgggctgacctttgtttttttaacaatcaggcatttttaattagataatccactcatgtatttccccctcactgcagttgtctgcatttttagcctcttttctcttcgttagttgtcagaatatgccttcgtcaaggctcagaggtaacaagacagaaaattcatctgggattttcctgctgtggctggcacattcttctgattaacagacacttgtatgatgctttaggctagttagtgcattttttagcaaacatttatcttaaacatcacagatccactggggggtgcaaggggctactgttagtcctcttgttagatgcagtcactcctcctggtcacctagtgagcagggacagagccaggagtcaagtgcagtgccaaggtgcatgaccctctgagaagtcactgggctgatttgacctccgactcattggttgtgcaaatgccatgtgcagcctttcctgaggccataggagggcttcctgcagctgagatctatgcaggccatcctctcaacaagtgccactccaagggcggtcctcggtgcagcagcatcagcttcacttgtgggggggtgggggaaggggcggtctcagaaatgcaggttcccaggtcccaccctggacttctgaaggggtgtggcatctgtgtttctgatgcttactacaatatgtgaaccactactttagaaaatctgctttaacttggtattcctctaattgtgttccctaggaaatgactgtcccaagagccagtgattattccaggtgttccctggaaaggtcaagtgagtctgggaaacactatgtctgtacacctcttgaaggtgtcgaatgtatgtttatacatcagtggaacccatttttctagcctagcaagtcccaaacacattacactgaagagattttggtgaggaaacttgctggagttttcagggaacactgttctaggcttaggtgaccttaggatcactcaagtagacccttcactccctgcgagaaattaggatgaataactacctgtggcattgttggttctgaacttttacagttcaggcctgctgtgaatctttgatgaagctttaaggtgacactgttgtacaagatgtcagctttgctgaaacgcacattacctggaataagtgctttaattgtagaattagaatgggatttactgtactgttttaaatgagattggcttcagaatccattacagttaccttacatagcacttgatacgtgttaaatgaacatatgaatgtaatttatatattcctagaatttaagttactttgtgagatttgggcctgtccctcaatgccagtttaggatttctttttttctataccttgaaatgattataaaatagattttcatgggaattttaaaaactctatccaaaacatttttggagcattttaaagccccatacacagaagtatacgaaagcacacaaaacactccaagtttcagcagttttagcgccaccattaacccactttgcttgtctcatgaaaaatctttgttaaagtttgtacacaggtaacaaaaagttactttaaaagatatataaagggctgtaagctaattgtggtgtctagtaagtagcataatgagatgtgaggagttggaactttgcgtgttttgcgtattttcatctgcattcagcttcttactctgggtttgtactcgagtgttatttctttacaaatgcccttgtaattaccactctgaagtctgctgactgtgtctcttgaacatacttaggatattctgcacattatggaaaaaggtaaattttagaagtttctgctctactaactgtagatatttatgactctgcgagttatctatttttataaccacctgtggtccattgttcattttaattcacatttcttatgaagtatggtaacagggagggagacacctagattagcagctcaatttgtactacttcagccaatctgtgaatgtaaaaactacactgttgccttgctaggatccaccctcctataatatggaacaaatatctgaatgaaatccaccctaggagacggagtcaaactaaacttgtggtttttcatttaacttttgactacagcatggccccatggcatccacaccaagagggtgttgtgatgaggtgccggtgtgcaaagggaactttagtttttccactggttcttatctgctagccttttacatacatgtgtactatatttgtttatagactgtaggtggatatataatttaaaagcttgatttaataaacatttaaccccctaaacttgcaccgtggatcctgtttttctttttatcagcttaggtaatcattttatttgtcggctttttcttttttcctgaactgtgtttcattaccaatatcaaaaacagttttcaacagaagggcttcatctctaatcccaggccttaaatgcatctgtttttattgtttactgatatttttatacaattgcagtttaggatggagaccttctagtgaatttgaaatccccttctccccactccatgtatacctttaaaagctgggaaaatataaccagtgctgatctcgtaaaaatgtaagggagctctccctctacctctacctctacctctctacctctctacctctctacctctctacctctctacctctctacctctacctctacctctccgtctccctctctttccacggtctccctctgatgctgagccgaagctggactgtactgctgccatctcggctcactgcaacctccctgcctgattctcctgcctcagcctgccgagtgcctgcgattgcaggcgcgcgccgccacgcctcactggttttcgtatttttttggtgtagacggggattcgctgtgttggctgggctggtctccagctcctaaccgcgagtgatccgccagcctcggcctcccgagatgccaggattgcagacggagtctggttcactcagtgctcaatggtgcccaggctggagtgcagtggcgtgatctcggctcgctacaacctccacctcccagccgcctgccttggccttccaaagtgccaagagtgcagcctctgcccggccgccaccccatctgggaagtgaggagcgtctctgcctggccgcccatcgtctgggacgtgaggagcccctctgcctggctgccccgtctggaaagtgaggagcatctctgcccggccgccatcccatctaggcagtgaggagcgcctcttcccggccgccatcccatctaggaagtgaggagcgtctctgcccggccgcccgtcgtctgagatgtggggagcgcctctgccccgccgccccatctgggaggtgaggagaccctccgcctggcaaccgccccgtctgagaagtgaggagcccctccgcccggcagccaccccgtctgggaagtgaggagcgtctccgcccggcagccaccccgtccgggaaggaggtgggggtcagcccttgccaggccagccgccccgtccgggaaggggggggggtcagcccccggcccggccagccaccccgtccgggagggaggtgggggggtcagccccccgcccggccagctgccccgtccgggaggtgaggggtgcctctgcctggccacccctactgggaagtgaggagcccctctgcccggccaccaccccgtctgggaggtgtacccaacagctcattgagaatgggccatgatgacaatggcggttttgtggaatggaaatgggggaaaggtggggaaaagattgagaaatcggatggttgccgtgtctgtgtagaaagaagtagacatgggagacttttcattttgttctctactaagaaaaattcttctgccttgggatcctgttgatctgtgaccttacccccaaccctgtgctctctgaaacatgtgctgtgtccactcagggttaaatggattaagggcggtgcaagatgtgctttgttgaacagatgcttgagggcagcatgctcgttaagagtcatcaccactccttaatctcaagtgcccagtgacacagacactgcggagggccgcagggtcctctgcctaggaaaaccagagacctttgttcacttgtttatctgctgaccttccctccactattgtcctgtgaccctgccaaatccccctctgcgagaaacacccaagaatgatcaataaaaaaaaaaaaaaatgtaagggaaattcctagaatcctgaaacaaataggggactgattgccagagtcgaaagaattgagttgtgaagcttatgctacacgagagcccaccaaaggctatgttgtcagggaaaaaaatgaaataagaaaacccaggtagaggtacaaacaaagaagctgggctccatgtgagaaaaatgttttgttttgtttgctacagagtcttgctctgtcacccagtggtggcacacacctgtggtcccagctactcggggctgaggtgggaggatcacctgagcccaggacggttgaggctgcagtgagcagagatcatgccactgcactccagcctgggagatagagcagtgagacactgtcttgaaaagataaataaaatagttgaaaaataattcattatgagtgaaaaccaacagatttttaaaaacagagttagaaccgtaggatttcagataatttgagtaatacgatagatgcttttttaaaatcatttgaaatcctttatagagatgggggtcttactatgttgcccagactcgactgcagtggtgtgatcatagctcactgcagcctccaactcctgggcccaagcagtcctcctgcctcagcctccaagtagctaagactccaggggcatggtaccacacccagctttttttttaaagtaaagatagggtcttgctatgttgcccagtctggtctcaaactcctggcctcaagcaatcctcctgtcttggcctcccaaagccctggtactacaagcatgagcctggccagatgctttgaaagatatttttaaaaataaaggcataaaagaaggattaaaaaataaattgtatgggaggaaaaaaaaaaagaacccagccaggcagatttgaaaaggaacctattcaaacatttaggaatgaatataatcatttgaagtttaaaaataggcagatggaaagattaaagactagatttgacagagctgcagatggaattggcaaactggaaaatagatctgaggatattaaagtagcaaagaaaatatttgagaatttaaagattaagtggaagatagaataggacttgaacatacatctgataggagttacagaagagagaaaaaggaggcaatttttgaagaaaaggctgaaatttgtcccgatttaattatgtgcattcaattttatgttattctccataatgtatttccattaaaatttaatcacatggtctttatagctttttatgactgcatataaactaagttgatggtgaacgtttttgaggaaatacgctttatgaagaatctgtgtggataatctaatttactgaagctgtgattgattcaagttactgaagcaagtgatgttacctttggtaggatgggagacagcaggcctggtactgtgggaagacttgttctagctcctgcttaacatttaatatccatgttgtttagccaagtcagctaacttctctttgaggttcatttttctcattcgtaagtgggaataatatctgtgcagcctacctcataggattgctgttaaggtccgtaaagagcaggaaatcaacatattaaaggagaaaaattaaatgatcatggcgatatctgcttgtggcagaaacaatgccatgtgttcactaaattattttttcttttcttttttttttttttgtagatacacagttaaattacatttcccaacctccccagcagttaggtggcatcacatgattgagttctagtcaatggcatagggagagaaaagtgccactttcatgtgttctgtctggttctttattatttcttctgtgcgtgctggttgtatatcaatttccagtatgttctggaagccatacattgaagatgatggacccccttttcagccaggattctacaagacaatatggagaaagtaccccccaatcacattggtctgtgattgataggtacaaaaattattgtattatgccactgagacataggagttacttgttatagcagctagcataacttcacttcatacattgctaaaaagatgtttgaggagatccttttgtggttgataagtgtgatgattcagttttcatgctcatgtatgagatgtgcccccaatcaaacttgtcacaacatctgcttattatcagacatgaaaaaaaatagatgtttcaggaatttaaaaattgaacttgcagaaacatcaagagattagggaaattttaatcccttggtcactacagcatcacagtgtctgttttgccatcacttttttggacacaggaggctatatatgagtgtgggcgtgcctatgggtatgtctgtctgactcttccctacccaggataactctggctaaatccaaatttgtatatccaatagtccttctttctccctctcactctatttttttttttttttttgagacagagtcttactctgtcacccaggctggagtgcaatggcatagtctaggctcactgcaacctccgcctcccaggttcaagtgattctcctacctcagcctccagagtagctgggattacaggtgcatgccaccacacccggctaatttttgtatttttagtagagacggggtttcaccatgttggccaggctggtctcaaacccctgatctcgtgatccatccgcctcggcctcccaaagtgctgggattataggcatgagccaccatgctcagcctcatccttctttctctaggactaatgccagcaagttccaggacttataacatgtgcttaacatcagagaagtcttcaccaggtggtgatgtccttaagatgtcttcctcatttcaaaagctttaagttagaaatgtcactagatcttagataaggccatatgctacttgtaacctcctgaaacctgtctgtctgaaacctgaaggagtggttcttcagctccccctcaaagacttaggaattaaacttgtctgaattgtacacattgtgagtgaaatagtgccactggaaagtactttactgttgaactcaatgcaccctgttatttgtcaaattggtgttatttgactcgttacaaatggaaatgcttttatgctatgatggaagtgttatttgcatttttgttactagtcttatttttaaataatttttcaataggtaacacagtcatttggttcaaaaataaagcctgcttcccaagtagttattagtttttaacaatctcttctagaatttcatttcacacacataagcaaaatatatatattctcattcccttccccatttctctacataaaattgagcttacttgatgcattgttacacatcttgctttttttacttaacatgacatcttgacaatcttttatatcagttatttttaataactgcatgtttaactttttactttgaaataattacggattcatagtaaattgcaaaggtacccttcacccaattttccctaatatatcaacacctagtttttaaaattgtaagttaaaataacagtagcgaaacactttcagcactgctctttttctttctttttagtcagggtttccctctgttgcccaggctggactgcagtggctcgatcctagcccactgcagcctccaactcctgggctgaagcattcctcctgcctcagcttcttccaatagctgggacttcaggcatgagccaccacacccagctaatttctgaatattttgtgaaaccagggtctcaccatgttaccaaggctgatcttgaactcctggcctcaagtgattctcctgccttggccccccaaagtgctgggattatcggtataagccaccatgcctggcccacttttagcactgttctaagtgctttgcatagatgaacattaataaaaatgtatcacccccatatacagatggggaaactaaggcacaaagaggataaagaacgtgtccaaataacagagatagtaattaatgaggccacgttttggacctggggagtttggcttaaaagtctgtgttcttaactcttagataagactacattaactcctttgagtaatgggtgttcatagttaagcaaaagcaaacaatgatgtgaagggttgaaagtgtaatcattcaattcttttgcagactttcataaatgtactgtgttcatgcatgcgatatattttaagacaatactgttttaaaacttttttaatagttttaatattgaactttctgtatcaatataatctcctacatcattctacatatctgcatcattttctatgactcttccttagtttattacagataaatgtttgttttctttttattataataactggtgcagaaaacattcttgcacatggatttctgctcatttatatgagtgaatctacatcataaaatcctggaagcggaattgctggctcaaaggtatgtgtgttctatactttaatggaaaccgccaaatcccccttcacaaagatggctgcaatttatgcttctgacctcactttctgttcctaattacctctacagcctctattagggaattctttataataaccagagacctaaattgaaccaaataagtcccagaaatgtgagcctttgtacttaataatttatgtctctcctgtcagtttcactgtaaaaaataaaattttttgttattcaaaactacaattgtgttaaagcagccatcttactatatagttgtaatagttggtactgaaagtttttttttttttttttttgagacagggtcttgctctgtcactcaggctggagtgcaatggcacaatcttggctcactgcaacctccacttcccaggttcaagcaattctgcctcagcctcccaagtagctaggattacaggcacccgccatcacgcccagctagttttttgtatttttagtagagacggggtttcaccatgttggtcaggctggtcttgaactcctgacctcaggtgatctactcacctcggcctcccaaagtgcggggatcacaggtgtaagccaccgcacctggccttgaaagtttttatagtcacagaaatgttcatgtaaatgagatgtttataacgaatgttaaaacaagaaacatttttttaatcacaaattcactatttattcaaaacctcttcaagctgttgtcaaaacaagctgaaatgggggtaagatgcttttctgggagagttccaggttctaattaactatgacccttgcccactagaggtcgctcttcgtgaataacttccctaggcagttggcatgctgtgaaagacatcactattcctatggcattttggtcaagtttttagaagaacacgtatttcttatgaactaaactaaatttgtactagaaagcgcccagtgtctacgtttcactttgacttttaaactcaaaacagaccacaatttcttcttgttattccaataaaactttatttacaaatatagacagtgggtcagatttggcttgaagtctgtcaatccctaggttagcaggcaaattttttaaacaggaaaaatagagttgatgcggcctttctctgcaaggggacaaagcctgggaaatagaggtctggagcaaaatgtgagtccccagaatacaaaggatacaaatgaagagatgcatagggtcaggtatggggccaggggcatggagcttctacgccctccctgggcacgccagcctccggggacctccatgtgttcagctatccggaaactcccagaccacacattttgacatacagcagctttactttcactgctggcctgtgtccacctagatgtctgggggacttttgttgcttcttgatctctttctcttccttgatgtcggagacccacttatgaacatctttactaaatttctgttttcttctgtctctcattctgacactgacattctgacaaaagcaaaaacacttgcttcctgctttctgcttttaggaaagattccaggaacacacctgggaaatacttttaaaggaggcagtttcagcaaggagagtggtaggaaagataaaacctctttgcatcctaatctttctggtttgcttgtctgttatctttggagacagcataattttcactaggatgctgtgtaatcatgaagctaatgaaatgtaagcttcaagaccctcacttgtgtaaatcctttctaaggccctgtaccaaactttgttttcatagatttttatttttcttaaagtcataaccccctaaaactagtccatctctagtttcagaactttggagtcaggtgggggttcaaattttagacctgtgtgaacttggggagctaacttccccctaggccttaattttcttttctgtaaatagtatcttttatcttgggtttcttgagaagtcagaaaacatgtcatttgcttttcccaattccctgaacatattaggggacttcatgatggaaagaacccagagagaaaatgacaaatccatatttggatggaattgcttgggacctttgtggggagatgtgcaggaagcaagaggacactctggacaacagatcaaaaggggatgaggagcagagatgttgggtgaggccagtgtccaggcagttactgaagccagagttgggtgaaggaagtatctgtgtggcaggaaggaagaagcgggagtctaagcccagcacagtgtccagggtgaggcctgaacttcagaagttcacatttcatttcttgcgggtaatttatgaatcttgcatcccattgctcaggacttactcattcaggactctgttctcattgatcctgccgtcctaagtgtgacaaccgtttgaaattaattattgcaatacccaggataatcacttgagggcagcactgcgcaagggttattcaaccaacaacgttcatttaacagatacttattgaggacatgtcgtgtgctaagcaaagttgtaactagggtcaaggaaagctttcctgaggaagtgaccctcgacccatgtagcaggatggggtggaattaaatagggaaggaagaggtgttccaggtaaaggtagcagcatgtgctaaggctctgtgatggcagaaagcctgggagtgggggaagaagggacagtgccgtggtagctggaaaagtgagtgggatgtggatgcagatcgggattacagctcagtttctggagcctattaacattttctgagcggttactatgtgtcgggccctttcctataacttatttcagggaaggtggtaatagtcccattttacaaaggcacagaggtatggctaccaccagtctttcttcaaggcacctctccttcccagagcatccttgtctccactggacacttagtcctacctttccttcaacacatgggtcaattgtggcttcaagttgaatatcttactgatcattttgtgcatacaacgtgttctggtgactgggcagttctccctaagccagaggttctactgatactgtgtgtcctcagtatctagcccacagatgaccactaggggatgctctgttccagttggttcctgtctggaaataggcacatgacatggcgatttggcagaacaaatgacatagtgatgtagtagatcttggctccacttcatccctccctgaatccatgcattttgccacaagactttacaggctttacagacacggtatatctcccaggccctcaaatctggctttgctcttgtgacttgctttgccaatgcagtgtggcaggagtgatggtgtgccagatgcaagcaatatatatatttatcaactcgactttctcctatacttttgctctatttagtctcattttgaaggagataaaatatgaattctattttaaatatttttattgcatacaatagctcaaattcatttctttttatctgctgtcttactttccattatatgaataaatcccattctagttattcatttccctattgatgggatttaggttgtttgaaggttctctttttttttttactaataaagaaacaaaatgggaaatatttctgtgcatgcctcttgtgtacctaagtgagactttctcatgggtatatactaggaagccatgggatactcacatcttcaaatttactaaaatattactaaattgcttttcaaagaacttggaccaatctattctcccaccattattagtatagaagaattctcatttctccacatttggcatcacctggtgttgccatactaatttgtgtaggtttttgccaatctgataggtctgaaatggtatctggttgatattttaatgttcatttccctgatttccaaagatgttgagcttctttccttgtgttcgttggccttccaatttccttttgtgagttgactgtgcatttcctctgttttccttttcttttcttcttccttttttttttttttttgagttgacttgctcctgaaagtctgtccttacataatcttaatattttatattatatataatgtatgcttgtatattatataaagataatatattaaagactataatatagtatatgcaatacatttaaaatatatatcctttgtatatttggttgcttatatgcactgcaaagatcttccagtattttataacagttttattgagatgtagttcatatatcatacaattcaaccattgaaagtgtacgatgggtttttgttacaattttagaacattttcaccaacttgaaaaaaaaaaaccttcaccttttggctatcatttccctattcccccatccccaaccctaagcaaccaccaacctaccttctgtctctatcaatttgcctattctggacatataaatggaatcatataatatgtggtctattgtgactggcttctttcatttagcctaatttttcaaggtttatccatgttgtagtatgtatcagaactccattcctttttatgaccaaataatattccatcgtagggatatgctacattgttttcccattcatcagttgaagtaatgtttactgaaaaatgtaactgaaattcaaaactgtttttaatagcatctgatttctactcatctgatctgattgcttacccctgacctctcctcacacataaataaagttggttttgtttgttttgttttgtttttaccatgatgatcaaaaagtttctgactggctttgaactgtacttcattggtgaaaatcctccattccaatccctataattaaagaggtaggcctggggacccttgttatcctgtgtggcctgggatcaagagcatcagcatcacctgaagctcgttagaaactcactctcgtctcgcagacctgtctggattagactctgaacttgaaggagatccccaggtgagtcctgtgcccatttgctttgacaagctccgccctggaccactctttctcacccgggtgagtgttgaaatcacctggaagcctttgggaacaatgccaaggacctgcccgcctttccgagattctgatttcactgctctagagtgggtcccagacttagagtgtctccagagctcccacgggatcccactgaacagccagacctgatgcagagatctttgaggagcaatcccaacttttttctgtaaaccactttcatttagggatgtttagtctacatgatttaagccaccaaatttgcaattctgttaagcaaaactgactggttctcggtgaaggagctgcaggcccctttttaaagggactggagtatgacggccagtacaccttatgagtgggtgtcaaggctctgttgacaaagatggtttgtgtttctaagaaaacacagctgaagccctgtgaagggtaggttgccaaggatgtgctagtttttcttggttcattttcagttctccgtttacaaatttgctctgcaaatttggaatggctactactttaagcagcgtttacccaaaagtgacttcttccttactcctgccaacagagtaaatacaataagaatggacatcttgggtagacatcaggatgtctctttttaaataaaccccatcctgatcttatctttgctaaggaagctgtggcagcaacaagctgtcaaatcaatttctctcccttctcatccctccgacgatttccttgaacgcatgtgtttctgttccctgtcactgggctcacacagcagtcaccacagtaaccttctcatgggtgggggtgaggagttcagcatccaccctttgtatccacaaaaggctttgccaccttactggggggggttgcctatgtttccttgtcatttacaaccctgccccatttctgttccagatagtggcacagtaatgccccagattgaggtcacttctcttggagttaaaggaaacaggagagggatgcgtggtgtttgcaccgtgcatcctgccattatccaactcacaggtatgtgtgtgcatcctctggactttctggctatggtcttttcagccacctcagagattgtgtcaccttgacttaccgaaaggagtgaccacctgagaatcaaaggccccggggttcctgaaatccacaccaggaagggcacatacaggtgtcaaatcgcttcttggggtctctccacaagcacctaaatgactacgctgttaacttgatctatttctctcatactgggccagagaaccctgctttattttccagatacctagtgctaattctcctgtgtttgtgacactttcctaattccaaatctgggatatttttctactacttgaggcagattccttagaggcttttaatctgataaagagttctcaaacctgggcaatccagggtgtgagtcttagtttgagagaggacagacctcctttaacccagcaagtcagagatctttcgtgggtggtgagttctgtgcccacagaagccagcatggcttgcttagcattacagtaccccgggcctgccatggacaattacttctggttttgatcttcactaaagacttttgcttcattttctggtacactgcctttctgatcacattacaggtctgcacctgcgcgtctgtgcgcatgtgcgtgtcctttgtaaataactgcctgttcttttctttcagctagtccttgcctactcccctgccctgccttttttattttttaaactggtttcattcttttaaatcagatctccaataaataatcgagtaacctggcctgaggtccctgcctcctggaggtgggagtatgcacacaatgcttattggcaatttccacagaagggcattgagccgcttgcaatgtgatttatttttcctccagaacaactgatcgcaacttctgagacatctctgatgtcctttgcaaactccagcgtgcatgttcctgcatgtgctctattgacaaggatttgatgtgaacatcatttctttcaactttagtacatgtatctgcagaagaatctgtgttcctgttgattcacagcgctgacttcttcattggtttctatgacagctttctgaaacaacaggctggggtgtgtgtgtatacgtgtgtatgtgtgtgtgtagagtaggagagagagaacgaggggggagagagagaaagagagaaacaggacaccatggattgatttcatttgatcattatgcctaggtgtccaagtctgtctgtcactctgctgcattcctgtactatcatgcctgtcttccactcccttttcttttttttttttctttctttctttcttttttttttttttttttttttttttgagactgagtctcactctgtcacccaggctggagtgcaatggcgcaatctcggctcattgcaacctctgcctcccaggttcaagctattctcgtgcctcagcatcccaagtagctgggattacaggcctgtgccaccatgcccagctaactttttgtgtgtttttagtagagacgaggtttcatcatgtcggccaggctggtctggaactcctgacctcgggtgatctactggcctcagcctcccaaattgctgggattacaggtgtgagccgctgtgcccaacctctcccttttctttctctgccccgtcttgtttattttcttcattcctaaccatcacatccagtttcatccactttaacacagaacattatatgtgattctaaattaattaaacttaagaagttttactgttctctgttattaaatgtcagcagaatagaatgatttctttttcttcttaaagaaaggaaaagggtagtaattaaaatgctttatttttcctcttgattttttggatgccatatatatggtttcaatgtcaaaatttcaatcaccctgtatgatctcatcttttttttcattttgtattaaaccaagagcattttcccatagtattaaatatccttagggaatatatttaaccatgtataagttgatggcatttttagagttttattttaatttggggatacacaacctaattatatccattggtctattgctagtggtagaattacaggatttgaagggtagattttgaaagctttcaataaatatgactcaactgcctaccagccacgtatgagtgcccaggttagtgcccatccatctggcattgagcaatatcttggaaaaatacaactttgctcatttaataggtgaaaatggcatcttcatattttcaatttgcatttaagtatcactaagttgaagatttggagataatagaatttagaaaaggaaaaagtttacttgcaagaaatacagggacctcagaaggaactgctcatcagataaaaaacacaacaggtcattaacagcaaacactgcaaacttaccaaggttactgaatttgtagttggtgtgttcatgacagaaaaccggcaattttcttacggggttatcatttctacaaaggctggggtagtcttcagacagcagttttgcaaaagtctgggataaagttgtttgcattaagtagtcagcaacttacaggaaatgctcaagagttcatttatttggggggctagaattagagagggttcaaaatgtttgttttcctctaaccatgggacttaacggaggcaagagatcagttttgcttccacgagacttttcaggtgtagacaggattgtgtatttctgcttgtataactgtatgtgtcttttgccctatttaactttactgggtcgtaccttttgcttattgatttttatttcctatatattaaaaagctattacgataaaatgtaaaaaaaatactttcaatgtcgtttgccttttggtttatgatatttttatcataactaacacctttatctttatgtagtcaaattgttcaattagtttccttataatttctgctttggcaccacacttagaaagtccttttcagccgggcatggtggctcatgcctgtaatcccagcactttgggaagtcaaggtgggcgaatcacttgaggtcaggagttcgagaccacctggccaacgtggtgaaaccccatcactactaaaattacaaaaattagctgggcgtggtgatgcacatctgtaatcccagctactcagaaggctgaggcaggagaatcccttgaacctgggaggcggaggctgcagtgagccgagattgcaccactgcactccagcctgggcaacagagcgagacttcataaaaaaaagaaaaaaaaaaaggaaagaaagacaaaagaaagtctttttcagctctttttatattgtttataggcagcccacagaatgggagaacatatttgcaaatcatataactcataaaggattgatatccagaatatacaaagaattcctacaactcaacaacaacaaaaacactcaattaaaaaactgacaaagggcttaaataggcattcctccaaagatatacaatggcaataagcacatgaaaggatgcccaacatcactaatcactagagaaatgcaaaccaaaaccacaatgagataccacctcactcattaggaacgttatttttttcacaatatgtagttaataacaagagttagtaaggatgtgggaaaattggaactgctttgcattgttggtgggaacataaaatggtgcagccgctatggaaaatagtatagtggttcgtcaaaaacttaaaaatagaattagcatatgatctagtagttccacttctgggtatatacccacaagaattgaaagcaaggattcagatatttgtacgctgacattcagagcaatattaatcacaatagccaaaaagtagcagaaatccaagtgtccgctgagatgaatggagaaacaaaatatggtctacacatacaacaatggactattcgttttttttttttttttttttttgagacggagtctcgttgtattgcccaggctggagtgcaatggtgcaatctcggttcactgcaacctccgcctcctgggttcaagcgattctcctgcctcagcctcccgagtagctgggattacaggcatgtgccaccgtgcctggctaattttttaatagagatgggatttcgccatgctggccaggctggtctcgaatgcctgacctcatgatccatctgcctcagcctcccaaagtgctgggattacgggtgtgagccactgcgcctggcccatacagtggactattctttgaccttaaaaaggaaagaaattccgacgcctgctaccacatagatgaactttggagatattatgttaagtgaactaagccagatacaaaaggataaatactgtataactccacttatatgaggtacatagagtagccaaattcatggagacataaagtacagtggtagttccagggacgtaggggaggggaggatggggagttgtttaatgagtactgagtttcattctaggaagatgaaaaagttttggaggtagatggtggtgatggctgtgtaacagtgttcatgtgcttaatgccactgaactatacacttacaaatgattaaaatggcaagttttatgtatattttaccacatttaaaagatattttctcttaatactttataattgcattgtgtacttttcagaaccattctggctatgaaagcatcagcaattcctattcacacttcaagtttacccattggtggtgacaggttggtggttgggtgcctggtgaaaactaaaccaaggctgagttagaaatgaggacagaccttgagagatggagtcaggtgtgctcgtcaggctcttttgatgacaaggaacatggattttcttagactacctgtcccacttactatcactgcataacaaactaccctaaaactttgttgattaagcaaaaccattttattatatgtcacaactacatggacgctgcatgatttttttgacctacccttggaagacacatagtgttacatccactgcattctgttgactatagtaatgtcagctcagattcaaggggaaaggaatcataggtcccctcctgatgggggagtggcaaggtcacactgaggagagcatgtgggatggagatagtgttgtagccatctttgaaaaatggaatctcctccactgctaagaaaaagaggatttattataaaaatacaaaagactagaattaggaaaaccctggaatggaccagttgctctgtctctgacctctgcatgtctgctttgcactctctctactcagtttctcttggtcttgtttgatttccctcagcctctgctcctccccagcacactggcctttgacctgctatggcctctccagcctttgtcaagcttccccgaatgtgttagttcaaattccagagagaggctctgactggctcatctcatatgtctcacaacacttggtccaatcaaatggaggggctgacacaggctgggactaaagggaatgaggagctgggcggctctcagatcaccctgcactgattctcacacctggctgcatattcggatcacctgcgcagctttaaaaacatacccacggcctgggtcccaccctcagagattctgattcaattgatctggggttagaggctaagtatgcatgttgttttagatgcatggtacccacgcttctcctgaaaccagggaactttgctgctggctgtgatacacagtcagcaggtgtggacagcaagctagcccaaagaggatcatttaccagacagggaaagaaaaacaggcttttcttgttttccagcgtgtgttgttgcttttgttgtttttttcacaaatctcaaagaatttgtgagctcgaagagaccttagagacaatctaatacaacacattcatttccaggtatggaatatggcgaccaatccgtcctggtttagctgggactgccccaacttcagcactggaagtactgccacatcccagggaaatccttcagtcccaggcaaaccgaaaaggctgtaccttatatagaaactccaacccattagcagtcactccttgtcctccctgcccccagctgctggcaaccatttatccactttctgtctgtatggatttgcatactctggacagttcatataaatggaatcccacaatatgtggccttttgtttctgccttatttcacttagcatgtttttgaggttcattcatgaagtagcaggtgcacatacttcatttctctttatggctaaataacactcccttatatggctttaccacattcgtctgttgatggacatttgggtcatttccacttttgggctattatgaataatagctcctgtgaacatctgtatgcaggtttttgtgtggacatatgtctttagttttcttgggtatacacctaagagtgggattgctgggtcatatggtaactctatgtttaacattttgaagaactgccagactttgttaaataaagtgtctgtatcattttatgtttgtaccagcacaaatatgaaggttctaattcctccatagcctcactagcacctgttattatctaccttttgattctagccatcctagtaggtgtgaagtagtatctcattgtggctttgatttgcatttccctgatgattaacaatgttgaacatcttttcatgtgcttattggccatttgtgtatctttttagagaaatgtgtattcagatcctttgctcatttaaaaactgggttatttatcttcttattactgaattgtaagagttcttacatattctagatataagccccttgtcagatacatgatttacaaatattttcttccattcagtggttttcttttcattttccggaagatgtccttgaagcataatagtttttaattttgatgaagtcccatttatctattttttcttttgttgcttgtgctgttggtgttatagctaagaaaccattgcctaatccaagatcatgaagatttaggcctatgcattcttttaagagttgtatagtttagctctcacatttatttaggcctttgctccattttgatgaagttttgtatatggcatgaagcaggagttcaatttcgttcttttgcatatggctagccagttgtttcaccatcatttttgaagaaacttccttgtccactgaatggtcttggcacccttttagcaaacaagctgagcttagatgtataaatttctgtcaggactctcacttcaattccattgacctatacatctatccttacaccagtaccatactgtctggactactatagatttgtagtaagttgtcaaatagaggagtgtgagtcctccaacttaattcttcctttttaagatgattgtggttattctggataccttgaattccatatgatttttttttttttagtttttctcattactgttgggttttattttttaattaattaatttttaattgacaaagaaaaatagtatatatttatcatgtacaacatgttttgaaatacgtacattacaaaatggctcaattgagctaattaacaaatccatatgattttcaagatcagtttgtcgattgctgcaaaaaaaatccaggtgagattttgataaggactgcattgaaactatagatcactctagagagtattcccatctgaacaatattaagtctttcaatccatggacatgggatgtcttttcatctatttaggtctttattgatttctttcagcagtgttttgtaatttgagtgtactagtcttatacttcttatgttaaacttattcccg

SEQ ID NO: 5640 - DNA, 207400 bp, Homo sapiens
  STAC gene - 36397101 - 36564500 of chr3; NCBI Entrez Gene ID: 6769; Build 35; sequence includes 20,000 bases upstream of initiation codon and 20,000 bases downstream of termination codon of the gene
cctgtaatcccagcactttgggaggccaaggcgggcaaactgcctgaggtcaggagttcaagatcagcctggccaacatggtgaaaccccgtctctactgaaaatacaaaacttagctgggtgtggtagcgggcacctgtaatcccagctactcaggaggctgaggcaggagaatcacttgaacctgggagagaggttgcagtgagccaagatcgtgccactgcactccagcctgggtgacagagcgagactccatctcaaaaaaaaacagaaaagaaaaggaaagaaaagaaaaggaaagaaaaaagaaaagaaaagaaaagaatgaaatcattgtcctttgcagcaatatggttggagctggagaccattatccttagcaaactaacgcagaaacagaaaaccaaataccgcgtgttctcacttataagtgggagctaaataacaagaacacatggatacaaagaggggaacaacagacactggggcctactttagggtagagggtgggaggagaaagaggaccaggaaaaatacctatctggtactatgcttagtacctgggtgatgaaataatctgtacaccaaacccctgtgacacgagtttacctatataacaaacctgcatatgcacccctaaacctaaaacaaaagttaaaggaaaaatgaatacataaataataaaaaagaaaaatatgccactttcttctggcctccgtggtttctgatgagaaatcctttgtcctttgaattgtttctcctttttttttttctataggtaaaggtttcatttgtgtctggcttcttcaatactttatttgtctttagttttcataagtttaattataatatatcttgaaatggattttgttgaatttcttcttggggttctctcagtttctcaaacctgaaggtttatgtctcttgataaatttggtaagttatcagccatagttttcttgagtactttgttagccccatcctatttatccactcctttcaggattctgatgatgtgaatgttaatcttttgttataaccccacaggtctctgaggctctgtccattttattccatctactttctctttactcttcaggttgggtaatttctattattataactttcagtacaccgattcttccctggcattttccatctgctatttaaaccatccatggagctttttatttcaggttttgtattttttcagattgtggaagacaaagcaactctatcttaaatgctaacctgccatgttgacttccaatcaatccctgttctggaaatgcccctaagatttctactttatctagttgccataaatcctgccttcaggtcaaaacaatcttggcaataaatcctgcccttaggcagatccacatagcactgttgtctttccctggaggtcagctttaactatcctacacattccttccatacaaaatataagccctagttctgtgggataatggcatggggacccaccatcttgtctcaccattgcccacgactatgacttctgttcctaaatccccatcaaatgtttctttctcagaaactgaatttctcagcctctttcttgtgcccctcaccttccttggcatttagggataggtttgcatagacctgcccactgcataacatgtggcgaactctctaggagctgagagaccaagaaatggggaaaggaaatgaagtatctgtgtgggaaatcccagggtggccagccacttctatgtggagtggtgtgactcgccttttagacacttgtacatgactacagggatgcccagaaaatgctggcagatttagagtgattattaactgatagccatctatcagacatcttatcgcactgtggtgaagaagggcagagagcggctgctgcagtgagttggctgcttctgaaggctgcccatttgttgacaaaaacccagctagcagcagaagcaaaagtaaaacagcttaagtagaaagtacaattaggaaaaatatttttaagagctctatagtccaaagttgacttaattagtaatatttaggctgtatatgtatatgtacgtgtgtgtatatatatgagagagtgagaacagagcccttaaaacaaaacatatatgtcaagtaaaacaattcacttgaccaaattctgtttctctatttacttctgtctgtccctccttcctcttgacaccctccatccacataaaagaacctacaaaaatttctaatagcctgggatcctttaaggaaaacagaaaagataccacagaatcctctttcggaaggattctctgctttccctcttggaatcccaagagttagaagcaaagagattcctctcaggtctaaaactctgctttcttttgttttgcattactaatctctttggcttttggaggtattagaggttactttgtaccctgagaggacttgaccttggtgtgtgagtaatgactgatgagtcaccggagagaactgcagtgttagaggcggctgatggcagttgtttacagtaaatagttattactacaggggggctgctcatttatttgcacatttagataagaaaagtatggtttgggcatccagaggctatggaaacatgtcccactgagggataggagtccatgggggatgggctgatcacagagtgagctgattgctgtcaggctgcccaccagcctcaggtgaatgccattgcagtgaggatgccatggaagcattgcactgtcaagtctcttggcattttccttttggagaatcaagattcagtgtaaaaatgggctccttgattgaggggcatctaagtgttctgacatgtttatatatgttatatgcatgtgatacatcattaccaaaatatgtgaaagagctctaattaattaccttaaagaaaaagtaaatgcttaaatcacatattttatcagaaaaattgaacctaactcaaatgccttttagttcacacgcctttactaatctttggtaattaaagatagttttaaaattatttgtaaaataaaattgcaattaatatatgtaatttaaactactagatctaagagacaccattctacatacagactctacaaagaaagtaagatttttttttggtgaagaaggttatgaaaaaaatgaggatgcggtttttgctaaaggaaaagtaattttgtccagtttataaaatggtggggaatgaggacctttgattccttagtggctacatagtcacccaaggtatggagctgcaattgtgctttgctcagttgctaaaggtaaaagttaccagtggaatttagagatggatccaactcttagggaattgtttccttggatccataaggaatgcaaactaataagaaaaactgaaatattcaatctcttttttattgttatctataatagctaaaatgaaattaaatgagagagtgctgggtttgaccttgttgctaaaccaaggtgggatttcagtgagtttgagcttcctttactagcctcaaagctgatccccccagagcaaaattatgcgggaacaacagaaagtacctctgagacctgcagttaccaagaaggcagccagtgtagtggaagaacaaaaccaagtaactattgaagccagagggtatagtgctagagcaaatgaattgttccactttgtagattggtatcatcagcttcctgaagaacctttactaaaatcaattatgagagtaactaatttaggggtagtatctttgcttttaaatccttcagagcggaagagcatgtttgggttgatgcaggaccagcagctcactgttgaacaatcaaagacagcttaatgtggtacagacacaggaggctattcccaagggaatagccagcctgcaggactggataaatgccactgtaaggtttgtttaccctgagaagggtctgcctgactccacctataaatgccaagcggaaaaccccagatgaagtagctgaaatgcttcctatgcaattcatgtgagactgccttcatgatgactgggatattcgcctactgaatatgcccattacccaagtcacggtaaatgctatggttaagggggccctattttcacgagcacttcatataatcttgttactacaaaaccaaaagactatcagaaaagccttgtcaaattttttgtctcagcttcctcttgtggatgttacagatcctaataaatacattaggttaattaacaagagaattaggaaaggcaaaagggaaagtcaaataactcatcacagcaaggtggaaatctttagatggttgttacaaaatggaacaaataaaataggagttgatgggtttaaaacaaaggtcttaatacaacattatggaaggttgggtggaccacaggaagcccctgctcatcccctaacactatagggccccaaactagttttctgtatttaccccagactggagaattaaaaaaaaaaaaaaaaaatcagaaggcaaagaatacaatgagaaagctgaccaacaattgcttgggggcaaatgttgacgtagattaatcaaggtaaaaattgacaaaagagcccgagttccctggctgaaccacatctgggaacccaaagacttttttacaagcgccagtaaatggtctggtagtgaagaagtgaagttcctaagactagaatataaaaatgtaagagctgccgggcgcagtggctcacgcctgtaatcccagcactttgggaggccgaggcgggtggatcacgaggtcaggagatcaagaccagcctggcgaacacggtgaaaccccgtctgtactaaaaatgcaaaaaattagccgggcgtggtggcgggcgcctgtagtcccagctactcgggaggctgaggcaggagaatggcgtgaacccgggaggcggagcttgcagtgagttgagattgcgccactgcactccagcctgggagacagcgagactccgtcccaaaaaaaaaaaaaaaagtaagagctgaagagctgataggcttatggaagttggaatatttaagcaggctttatgtatagtagttttgtctcttttatctaaatattttatgagaatgaacattgtgtctaactgggaaatatttctcctacctagtactgcagaacagagggcatgtaaacccttcttttgagcaatattaattgtactgctaaatgggaacctgtaagatttcccaagcccacaaagcatagagtagaagctgcagtgctggtaggaacaaattctccacctgatagccctttgtgcagtgtttattggggcttatgagaaaaacttgtaagcccttttcaacaatgactactggcactttggactagagaatttccacttgaggggaattaactgccttgttatgagatgttaattaaagctaccccgtgactgaagatataaaagatcctgacacctgaaatacccatgttatctcagatgatgtcatagaaacctctaatggggatagcagtacccagaagagtttcataataaaatggaaatgatttatataggatcacgctgaagaggctatgttgtctcaggtataaacctggggttcgttgtcatgcaccagaaaagttagaacacagacacacatgaggagtttaggagtggaggtttaataggaagaagagaagagaatgagaaacagctctctccacagagagagggatcttcaagtggaaaagaccagctggtggcaaatgcctggaattttatagcatagtttgaggaggtggtgtctaatttacatagggcttatagattggttcaatcaggtatgacgtttacatagcacggtgaaggtgggttgccctaccctgaacttattatgcaaatgggctttccggttgattgctgccatgttgtctgttctttacagtacacgtggctggcaaagagaagggaagatggagccaccatcttgaacatgtctagtccctagttcctgctggcattcacctgtgcaagctctcagcttgcttgtctatgtctgcagcttgactttacaggctcctctttgctagaaaatgatttggggctgcttttcattaaaaagaaaagccttactgagtgctcccatacccttactatctgcctaagtgatttcttcttaactcctatatcaatgctacctggcaagagcaaagaagagatactcacaaacagggagcctctttttctccctgcttgtgtctagtaccaagatgaacagacaacatcctaattggaaggctactactctgattaaagaggagtcaagaaaaccttgttttcttttgagctatttagagtttacaatgattgagtgaaggatacttttgtgagcaaaatttacctttctctcgacctgagttctccaaaatttggaaactattcatgagtattcttctgtcatggcaatataatttatttgcataatttcagtaagaagctgttttcttttgtaaaaggacacaattagagacactggttattttaccaaggccttgactagagtgccatattttccaatatgactatactgctttgaggaactgaagttggctttatagagccaataaaaagcctcttggaaagactggtcttgcaccttgtgacctgtggtaagaaaagaatgtgactttctgatagtctcaggaacctcaagttattttgggaccttgagaagagaggaatacaaccattcatacaggtattacaggcacagtctgatggagaatcattggcttggttagaatcgaggcttgtaaaagtctaatctgagattgcttataaaaactttctggcaaagccatctttaaaagtgccagtatggccagccactattcttgctgcactttatgcaaataatcaggccaaatataatgaggctaacatttatttttcaaataaattggtcctactatgtgagaaataaaaacaaaattgtcaagtccccccaaccaactgaaataaccccctcttggccaagggaacaacacagaaatcttaaaaaactaagtttctggccgggcacggtggctcacacctgtaacgccggcactttgagaggccgaggtgggtggatcacttgaggtcaggagtttgagaccagcctggccaacatggtgaaacctgtctctactaaaaatacaaaaaaaaacttgccaggcgtggttatgtgtgcctgtaatcccagctactcgggaagctgagacaggagaatagcttgaatctgggagatggaggttgcagtgagccaagatcgcaccactgcactccagcccaggcaacagagcaagaccctccacctcaaaaacaaaaaacaaaaaaaatgaaaactaaattcctggccatgatgggaagtgaggtcagacacaccttatcataccccttccctcactaacctcccttaatattttttcccctaaggggtaaacagaaaccagccctaaaatgttggctccactgctgatatgaactaattgcctgatgctgcccctccctttttttggtttcagtgcaacagatgaccagtattccttcccgataagagaccaaggaccaccaagtggctctggctagtctacagaggctgtcacaaaaggccttcatgttctctgcttcatattttgatgtaaagggcctaattgttatacacttaaatgttgagtctccaccccaaggtgaacatgggatgcatgttgcatacatgttagcctattatgcttgcccatgcaactccttcatgaatattcatagctcctataacctgttgaatatgtacacttggccaccctgctcaacataaattcttattccctctgccgctacttgaagcactcgcttttcaatttcagctgcaggcttcacttcccacctgcacattgtggtggcctcttttaaaaataaagtcttcctttctaaattaataaacttgtgacttttttggtcaacatatgatttatccttgctagaaatggagtaattggggaaaaaaatattcaaaagaaaactatagtaaatccttcatttgtttctagcccttatcattgtttttgacttgttattatttgcccacaatttgaactgaaccctgaattatttcctggctacaacaattctctaaattaagaaccaagttttatttttcttcacgctctttttttttttctggtaatccttgtgtgcatattaatgttatttatctcgtttttcttcttctgagaaaaccaaagtcatggtatcccaaagactagaagattattcaacaaagcctatgaatcttcttcatttggaatcccacagggcccaatctgtctgccattggcaatgcaccacattaaatgttgtacaatatcaagcattctccctaaaggctctgggaccattgtggaagagaagcgtgcatgagatcgtaagagctgggttagggaaatggagtgtggaacataaacttcattttggatgccaatctgccacgttgacttctgattaacgcctgatccaggagtgcctctgagatttctcctttatctactgtttctgtaaatgttgtccttaggcaggttgatatagcactcttgcctttccctggggatgtcaactttaattgtcctacatatggcttccctatggtatataagcccttggtctgagggttagtggtgcaggggtccaccatgtcatctggccgcagcctgagataatggcttctgttcagaagtccctattaaaagtttctttctgagaaactggatttgtcagacttcttggacctcttagcttccttggcctttgaaggtagtttcacatagacttgcccactacagaacgcagatctaaaatttctatttggttcttctttatgtcttctatctgttttctgatacttactatttctatgctgaggttttctgtttattcacttgttttaagaatgtttttattggtgactgaagcatttttatcatgctgctttaaaagctttgtcaggtaattcggttttttgtttgtttggttggttggtttttcaagacagagtttcgctcttgttgcccaggctggagtgcaatggctcaatcttggtgcactgcaacctccacctcccaggtacaagcaattctcctgtctcagcctcccaagtagctcagattacaggcatgagccaccacatctggctaaaaagctttgtcaggtaattctaacaactctgtcatttctgttggtatctatttattgctttttttttcattccatttgctatcttccagtttctttatataatgaatacttttattgaaacatggacaattttgtattatgtcacgagactctgaatcttatctttacttttagctggctttctctgacactgctcttgcagaggaagtggggcaggtaccaccttgttacagccaggtggaggctgaagtccagatcctctaggggaggatggcctttattactgttgggtaaagatgaaagtctcactcctcactggtctccactgacactataggtgggccttattataagctggtggggattaaagacctgattccctactttttttgaggtgcctctttataccctaatgagtgtgaaaatttgggttccccatttagcctatactggtataggtcggggtagaaccatggtgttttctgcatgtttggctggaatacagcaattgttgtctgtaagtttctctcttgcttgcctgctcccttttttggtccattggctaaagagagcaggcttttgctagtgctttttttgtctgttcccactggcatttctgggttgcaagcttcttcatctccaagtctgggatatataaggcaaaaagaaaatccagggaactcaccaatgtgtcatcccttgggtcctgaaagcacatatgagtgcattcttcttctctccactttcttcagtctgccttttagagtcttgttatgtcagttttatacataacgtcaagggattttaattgtccttagacaattaaagagctagggaaaaatatgtctgccccttctactaacaagcaggggtctactcacttttatttgggttatctacatcttatcaaatttttaggtaaatgtttaggttttattgaaatatatctgcagaaaagctcacaaatgaattaccaccaccaaaagtgaggtgatggcagtttactagcaccctagaaagctatagtgtttcttcccagttataaattatctatccctcttccccaaagataatcattgtcatcacatctaatgctagggattagtggggatatttttgaacgttatgtatattatataatacaatatgaactcttctgtgttgacttttttaactatgtttgtgagagtaactgaatgaccgatgaccacgtgacaaagtgttaaacttcattaatcatcagcaaaatgcaaataaagtcgcagtgataaaattaaaaataatgactgtataagtgttgaagaaaacaactggaatccttaatttacacttacatgttagcatcaaaagtcatgtacaagaatgttcatagtagcactattcatgataagctgaaaatagaaacaattcagctgttcatcaacacacagtggatgaaagaaatcatggcagatccaaacaatagaattctacacaacaatgaaagagaaaacattcaacaacatgagtattcaatgatttttaaatactgttgcacattttacttttaatgtagttttaaaaatcaaactatgtttcctgaaagaggaaatataggctgggatcagtggcttacgcctgtaatcccagcactatgggaggccaaggcgggtggatcacctaaggtcaggagttcaagatcagcctgaccaacatggtgaaaccccatctctactaaaaatacaaaaattagccaggcatgatggcaggtgcttataatctcagctactcgggaggctgaggcagggtaatcacttgaacctgggaagcagagggtgcagtgagccgaaatcacgccactgcactccagcctgggtgacagagcaagactccatcttaaaaaaaaaaagaaagaaagaaagaggaaatatgccatagtgcaatatgttgaatgcaatttaaaacacttttaattccacatatttttaaaatatgcatgaatgtctacgatatacatttttaaaacattatagtgagtatcatttgaaggaaggggattttgagtgaggatgagagtaaatttggaactgctaattaaataagttaaaaggagaaatgggattgcaaggactaattttgacagtgcaatgaataactcaattctgggtcctttcaatatctccaacgtaataacactaaatataaataaatagccaacacagcataccacaagaaaacataagctggatatataccaatcttaagatgccaggaatgacctacctcttctctttctgaaaaactgccattacctttcactattaacttctttctttggtaaatcctccctggacccctcagttcaattagccctttcttttccagattcccacagctgtctcttcatacctgtgatgattattattattactattttgagatggagtctcgctctgtcgccaaggccaaattgcagtggcgtggtctcagctcactgcagcccctacctcccagattccagcgattctcctgcctcagcctcctgggtagctgggattacagccatgtgctatcatgcccagctaattttttttatttttagtagagacagggtttcaccatgttggccaggctggtctcaaactcctgatctcaggtgatccacccgcctcggcctcccaaagtgctaggattataggcatgagtcactgagcccagcctacctgtggttatttgtcctaaattctgcctttctaatgaagctgaattttcctttgggtcagggaatctgcatatacttgcctatattcctaaaactaataaagcacctagtatacagcagcccttggcaaattttgatgaataaattggtgaataaaacaaggacttcattcattagacatctacaccttatttcataacaatctcaaatatcttaagctgaatactaactccttgacctcatgaccacacaagaggtagaaacaacaggacatggtgactcactacataagtggttgaggaaaagtgaatggaaaaatagggcatatttttttatttaaaatatgggtatttatctcatttcatccattagcactgtaattgcattctagggaactcagcaattctgtgcaatacagagttggtatccaggctgggcttcctcaaattactgagccatttgcttggtagactttggcattttggcagcttacattttagggatgaaacaggaccaagatgcagtcaaaaacctcctcagaaggtctgcctgaataacaactgcattcatactatctcccactgtaccctctatctgataagctatcattatgaactatttttaactattattattgtttgaagagacaaaaatctccaatatttttttggccagttctgcaagaacaaaggtagattaaacataggtatgtttcttaagtctgggctttatgggtaagtttgcctcagctatggagggaagaaacttggtatttaaggcttaaagcttgagtcatcttttccaggccaattgtcaagtgcctgatggatggttcatggctgccaagggagcaattggagaaacatagagggttataggaggcagaaagacaaagcagtcatataacccccatcctgaaaaatatagtagaaagaatttttgagattcatttgctgccagcatggctctacaaacttttggaacatatttcaaagtaagtacaaagcattatgtataaagagcatcaactattatccatttttgctggaattcctgttctttgttttgaaaggcaattctactgctcacttttaggaacttcatttaagatacataatgattaagtgggatattcataatcctttagaggttgtaaatgtgcaagctatatgtgtgtttaaattttagggccccatatacacaacgggtttctgtgtcaaagagaaccagagttctctgtgtctggcttcccggaatggagattctatgtgtgtctctcagagctctgaattttggctcctttttactctgtgacccatttaaccctccagcaatccctatgatgctttttcccccctcccccccgctattactagttaaaacagtagcattcctcccaggctgactgagatccaagtttcctcaagggccatttgtaaaagtacttaaaactattattcaaagcatttttctggctctaatctttcccttttttcaagcattgcccatatgatcagtaaatgttactcccaaaggaaaaaaaaataaaactgtggaaccagaactgaacaaagcctgcacatgcacacctccatgtttgtactgacaccatgcatttcgctcaagattctttgcttccccttatccttccagaaaaatcatagtcacccttcaaattccactggaaccttctccagcatcctttccgtttggtgaaccttatcctttccctgcacatgctctcaaatcatgttgtgcagacctcttgcacaacagtgatcacactgagttttactgtttgcttaggtactgtgagaagcctgaggtttagagtctgaagatgcgggctagactccccactctgcacttaccatattccattagggaagtcataaaccctctcaggcttctgattacctcatctacagaatgggtctaatagtacttaccttgccaggttgctatttagaaagagacaatgagtttctaattgctctctaacagttcctggaaaaaagcataaatgatccctcataaataaattactgtgcatctattcaggggaaaacacacagtcattagaaaaggatgatatatacttatattttttgacacagaactatctctatgatatattactaaagggaaaggatgttacaaaaatgcttaatgtcctgagatcattttatgtaaatacgaataaatacaaatgtaaaatgtacccatatatgcatgcacatctagaaggaagttcactaaaatgctattttaccaataagtggtggaattttagaagactttaaatttcttcagtattcttgaatactgcttgactaatggtaaagctatttgcaaaagaattttagagatactatgcataatatcaaaattaatttgaaaacttggaaaagaaagctgtgcagctagtagtttggtcaaatatttcaaagctgaataaaacaatgaccaatgggattggtgagcaagtaaactgacattagttcattgtgtcacatattaattgactttgggcaagtacttaatctatttatgttttgattttcccatctccaaaatagttttttattagatctacaagctcctctacaacactgacattttgtcattcatcaattcattaatttaacaaatattcacttattatatgagcacctaagcatcagggatatatggtgaagaggaaagatgaggcctttgacctcatgaagcttacactctagatgacatcaaataaggaaagaaagaaacagtgctttcagatggtgggcactgaggtccaaaacatgcgaagagctggtcatagggaatagtggggatccctcagatacagagaactcaagcactaaaacttggtgagagaccaggcatttttgaggagcaataagaccagggttggctggatcatacacctcttaaactattaccctaaactcatagaataagaaaatataaagctaaatgttaattactggtcaaaggaccaaaatatataggatgaatttactttatatgcatttccaagaaattttagatatttgctacttctaaattctaaacaaaagctattaccagttttagcaatgtagaatacatctaattttgacattgtatatgtatttgactataataaatagtaaatccaactcaaatcaaatacatttgcccaaaatcatatggatggtattgatgacgatgataacagtagtatcagatcctattttgattaggcattcattcttacagaaactctacgaaatagggactattatcccatttttgacttaaggaaattgaagctgagagagattaaatcaattgtctaagatctcactgcttttaagtggaagagctgggatgtttggattttaggttcctggccttttccactaaatatagaataaagattcaagccatcctctttctcacagaggctataaccagttagaagtagccatacattttagagaaaagggataagtcttaacccataaggtaaacagctatatgaggattgggccttgttaccttacctttttctgggaacctccagtggacataactcgaatgcagacaaacagtgctttacaatgtgatcaactattattgttgttattattactaattggtgcttagaaaaacaagttaaggatgcttaagctgtatctgatttgccctcacaaaaatgagtctcccaattaaattattagctttgattctgagaagagaccaatcatgaattgctatgagaccataacgaagcctagcattagcagctgttcaaagtaagaggtggtggtggttgcggtagtgtcagtggttagactttgggcaaagcatttggtttctctaagcttgaaggcagatccattaggctggatctagagggtgacaagtgatgctaatagtggatgccagctgggcccagtggctcacgcctgtaatcccagtactttgggaggccgaggcaggcggatcacgaggtcaagagatggaaaccatcctggtcaacatggtgaaactccatctctactaaaaatacaaaaattagctgggcttggtggcacatgcctgtagtcccagctactcgggaggctgaggtaggagaatcacttgaacctgggagggagaggttgcagtgagccgagatcgcgccactgcactccagcctaggtgacagagcaagactccgtctcaaaataaaataaaataaaataaaaaataaaaaaaagtggatgcctcttgcttacatttgtctagacttcttggctatcatctccaaagtgtagagatgctcattatttacttttaagacaaaagaatggaatggaccactcttcattatttgggaacttgccctgtgccttctattatgcctctggctctcaatttgcattgctcctaatctttaaggcctgctgccttttcaggacatccgggttctgctgttgcctaggtggcagcaaaccagagcggccaaaacttggcccaggagcaggatataactgagtccttcctaaactgtagaacctaggataattttctttatcttgctaaggtttcatagggattaaatgaaagaacaaatatacaatgtctatgatgtattagaaacccaatacatgttagctattattgttatcagcaacctacgcctttctcgtatactgtgttatattgtgtatccatcatgactctgatgcatcacgcatggagagccatcccttccttgagatcctctcctttatcctcaacagttctccatattatcttccctcttcttttttcttgttgttcttttctgtacccttcataagtatatctgttctatttaagaagtcttactagtatctttttaccaaatggctctataagaagccaaggtccataggatgaaatccagtctctttatacaaactcagaacaaagaaatgagagaaggttagcagcattacacagtcttctgcttaacggtgtttactgtgaaaggcccttggatgcaatcaggaggaggcctttgccctctttacaaattaatgaacaagtaaatgaaccagaagtgggagcttccagttcgagtttgtgcagataaatttctgtacacctcacacttctgctggcttgatatttacccagaaaccagagtgaaatagaccatgaaggggatctacaaaaatcacaaagctacagacttgagacttagaataattattcacaaccttttttcctcaggctttaccagactgcagtagaaatgagaaatcttgacaaccatagctaaaatgtcataaagcttctaaggcagaatttccagtcttctgtgaggtctcacctaagcattcctgggtgtcagatggggtatctcacacatagccatgaaaatgtacacttctgctcagggatatcaatgcttcatgaggggtactctggggatcactttgctggtctaccatctactgactcaaagcactgacaaatcccattgttttacagaagcattcagagtcttcttccattcagtttgtggaggacacatgcaataattaatgcctagaccatttctagagctcaggggctacaagggtagcctcttttcaccaccttgttaacaagcattataccaggagctagagaaacaagatgaacatggcattgcccctgccctaggggagatcatagcccaacagaagagcaggcaaccttgtcattgattacttaggaaaggaagtcatgggaacatggcattgatttgggaatctaaatcagataaatgggtcaaggaaggagatgtcaagagtagtaaatacttggatatgtgatttgaagaataagataagttagctagataacaaaagatcggatagaaaataatgtgaaactaacacataaacaaaggcgtgatttagtttgggacaccatggctaattcctatggtaggtattatttatcagactaaggatttctgctgctggatcagggtggggtggaaaggaaggaggtactagcttctctaaatttccttcaagggacaacatttaaacatatactattggctaatactgttgctaacttgagctaagcacttactaaaagtaaggatgacatcttcaattcttaaaaaaagaaaatccaaaagaaaaaaaggatgaaaaatttattgttctaagccatgacatgcttgctcaccaagactggaattgccagtagaccctgggagttttgtttcctaagaaaaccctcgtctggccccatgctagctcaggcttcatttgtacacactcatcaaagtcttgtactttcccttatcatagtttttttttaaatgtgtgtgtgatttaattaattgctgtctctcccactagacttaaattccaggaaaacagacttaatctgtgttttctctctgctgtatcattagtttctggcacaattctgatacagaatagatgcttgataaaaatgtgttgatatggctgctcctgtcattgtgtttgtgactttggctactagaattctgtctctatcgaacactcaggcattgtgttgtgagaaggaaaaagctgaagccatttgggctagccaatctggccccgtactgagggtcaccagaaaatttagagcattttgaaagctaaatgctgagtaagaggctgacacattgaacagtagctttcaattgacatctgggatggaaagagtaagagcaagtttattctaaaagacatgagctagggcatggatgcaggaccaaacacataatttgcagggtcaagtacaaaatgaaaatgtgatctcttgttaaatatttttaccgaatttcaagatggcagcatcagcgcggggccctgtgtgactgcacaggttgcacatccatgaagctgttcttgcaaacatctacagctaattttaaaaatctgaacagaagtttgcaattttgttttaaaaaattgagggtattttgtattaatgggggaaaagaggcttttaaatatctaggtgtgtttcttttccctgcacactgaggttgtcttcaaaagaaactggaccctctgtatctttattcagtggggctattcctatgtttccaaaagatttagtaaggcaggctggtttgcccctctgtgaacagtcctcaactcttgctatactgcaacatccaattgctcttcagccaagacctggcctagatttgaggctccacagtcggaaatgcatggattttgaagcccaaatgtgttcgaattccagtttcaccaattatagtttagtgacttaaagcaaattactcagtcttcctacagcctcaacttcctcatctataaaatggaagtgataatccctagacgcatagagtagctgggaggattaaataaggtaaaaagaaagggtttagtacaataagtgcacaacaaacgaggaacaggtgtccatatacacactgcattatctctctgctttagatcaaagctgaatggagaaaacgcagtgcccgtgagtcaggggacccccactccgacccctgctctctgtcactgaaccctataaatagcttagctaagtcactgtctcagtcactattcgttggggtgaggaatgagggagttgttgcaagtggctctttctggctatatcattcacagattttctattctttggggtttgggtctgaattttcagcatcctctctgaagaatcacccccacccagtgccggcgtgcgcccagccttcccccagccctttccagggcgctgccccctgcctgccctcactactccaggcgctggccgcgcagccccgccctggagctgcctccccgcctccttcctcctcctgcgggcgagcagaagcccgctcgcccgctgccgagtggcagtcacgactgtgaggtcgccggcgaggtggccgcgggcgcggcggggcggggcagggcgcactctcctccacgcccgcggaagtgccggggaggtgggcagggcggggagggagagggagcgaggctggaggagggcacgtcggcgcctcggcgaggatgggagtccccaggacccggagctgagcagcctggcgcgcggcgggcagggcgcgcaggacagaagcctcgctgttcctccgggagcccaacaccgttcccgcgcggccacgatgatccctccgagcagcccccgcgaggacggcgtggacgggctgcccaaggaggcggtgggcgccgagcaaccgccctctcctgcatccaccagcagccaggaatccaaggtaccgagcacgcttgcccccaagagaacacaaactcactctcctctcctgtcggtccagctttgtctctcctcctatctagcacgggcgtgggggtctgagacttgctagttagcccagggctgtaggacttgaacgtccggtaggacccgctgctcacgatgctggaccacgtccctgtggacccagccttcccgcccacacattcacacacgcaattcatggtggctccgggttcagagatcgatttcttgcggggtggtagcttggttttttttgtgctttgaacctgcttgtgtccaaagcacgtgtaggtaggtattaggtggcttctgaaggctgagggatggagacagccgagggatactcttccagaaaagcttgagtactgggccagaaaagcatgtatgtatcccaagggtctcagagaccttttgcttaacagggatcacccctaccttcagatactactcactaaaaaagaaaaagaaaaagaaagggtttgcctgcgtttgtctgaaagttgatgttcctcttgtgaaagttaatactctaagaacctatacttgcttttatgaaagttacactaacacgtatacaaaaaaccaagcccgcagcagttctcctgtcactgttacacttcctctgaaactcccgtgggtgccaggcacatgtttgaaaatcttggaagaggatagagtaaaatgtggctgctagcagtgcaatgccaaatggcaactcagctggtggtggaaatcctaagatggagtttgtagttatgtggattcttttaagtgtagagctcctggctctttattctgatttcattgtgcgatccccaggcatttggggaatgtgaggcagtccgtgtataccagcaaaggaaaggggttgccagtttataggatagggacaggccagatggggcaaggaagactgcgatcctgtctctcttcacatgcatccctggaagccattgatatgatcaggaggatgaaaatcacagcctgagtggctctggggatttggtgtgatactgggcactgtacatttcccagccccctgaagttaaccatcaatgatggtaatctaagcccgaaagctttacatcttatttatttttatttttttcctgttacttactggctgccagacctggggtatgtgtgtcaacttttctaaaactcggttggaaatgagggaaaaagccccaacttccagagacattgtgaggagtacatgagaggccctaatgtccacctggtatactgtaaggactcaatcatgtttatccttttccttcctgagataaagagatggaatctatctcatctcaaatgatccactccaaagcaatctgataacccatacacatgcactacctctcctcagtcaaaaagtttctgggtatcattgcctcccattgaacatcagtccccagagtgatataggttagtggccattttagaggaaagctagaattctataaatgaatgtagctgaactcaagagtaaaactagtattgaactttttgaattggcctgttgctctgcagtaggcgtgttctggaaagggcttagcatttgggcaaacagtggcatggttcaaatgcattatatggatttgctatttatagatgtcctaatggaaattatttggcagagcaaaagccacatatgtaatgcccataattatccaccaatttatctggcttatggttttgtacaaattagtttttctcaaagtggtctatacaccggatgtgtgtttctacattcctaaatttgatgtcatggcctcagtaagcttaattagtggagatgaactatggcagcccatgaaccctaggaaattgaatgcaatattgtatgcctacatgtgaatttttcttggcatagcattcatgatattctcaaagtgatccatgccccttaaaaaaggctaaactgctagtagggaggaacgtgtggtaaggtaagggagtaggatggcatgacactggaggagaggaaggctcaattcattctattctaggaaggccacatgttaaagcttactggcgtttacaaggatctttgaccctgagcatgagagcttggtgaggaaaatgtgaacaagacagtaatatgcattccatcttactcttccatgaagtggtcttgtttgtaaaatatcttgtgggacaaacatggttcaggcccccttggcattaaactctctcaaggaagacttaaagttactttttttaaagagttaggtttttttgtcttattataagagtaacaaatactctttgtagatatttgaacagtccagacataaatgatgaaaagaaaaataaattagctcttggtttaccatccagaagcatctactaataaaactttgatctatatctcatgtctttttaaatctgtttatatatttacatagttgagcgagaacaatagtgagcatctactgaatgtttactgtaagtcagatacaaccttaatcttcacaatagaagattctgttaatatttctattttatggatggggaagtggaagccaagaaaggttagatcattttcactgtgaaaatttattatggaaaattttaatatacacaaaagtagagaaaacagtataaagaactgtcatggacctaatcatgtggcttcacaattaattcatggacagtattgttttatgtattaccaccaccaccaccaccctacacatactggatcattttaaagcaaattccagacatgaaataacttcacccgtaaatatgctatcaggttacatctctcaaggataagggttattttcattttattttcataaacatgactataatcccaattagcacatatttcaggtgttttaagctaagggccactatattctttagaagcccacaaatagtctttggaaaatctgtgaacaacccgaaccagcattcaaagttgtccatgtacatgcatatatgcatcatctagggaaagaatttatagcttatctcaggttcacaaagggtctatagcttcaaaggttatcttaatgtcctttttctctttcttgaggaaattgaggcccaaaaaggggcagtgacttgcctgagatcacacagatagttactggcaatacccttacctacaaaccccgtcttggactttggtatcccagtacagtttcctcagagcaaatttctgtaagcacaagtcataatatagtttaatgtaattgtgggttttcttctttatgaaattagttgagttgaataagtttgaaagccactgatgtatcatacccttctatcttcccactaactatttcagaaagatgacagcctaatttattttttaagggcttgacagagaccattgaatataaacaaaaatttcatgtcccattatcccttatttcaatgaatatcttttctcctactgacttattgacaacatagaaagcttgctagtgtctaatgtgaaggtttgctataaatctctttgtcatcacttatatgacacaaggtcacattttgatgatattgaggaatcacacctcaatatcatcaatatcaaaggtgagattgacacacctctgtgaacatgcctaatacctcaaagcctcagcttcctcatggggatgctgatggggctgctactacccaattggtgtgctttttgtaaggcctaagaatatgtaatacacctaatatgtttgttataagcatacacaaacataaaccattatttattttctctatttgtttcaaatcagatgactgctaccaccagccaaccccaaatgtcatcattggaataatttcaataaccacaactgacattaccataatgtaactgagtttacctctttgggcttttagttatgctaattgattacaatgagacttcacttcagctattttgcatccccaagaagataagacatagactcaccagcatgtgatttagattttgaaatggtgctataagccacccagtgccctagtggagccacggaccaaagtgaccctcattcctggaggattatttctgaacctggaccacaatccaacctatgaaaaagaaatctctaaccatgaagacgtgccctgaatctcccagaaagatttctgtgtccatctatcagcaattatttattgagtgcctactttgtgcccagcatatctcatacatatatgtgaagctgttattaataaggaatttaacttctattcagggaagaagatgaaagaaaacgaaaccttggctttgcattgaaatcaccaagggaacccaggccataggctagaaccactaagttgaaatctctgagagagatctcaagcatcagtattttctatacagatgcccactgaaaacagaattagaatagtgtatacataaacccaagttttgctttttcttccacctaatgttatacgtagtcttcctatacttttaagtaaccaaccacacaaatattgaagatagcctaatattccatttcattgttctaccacatcaatttcagcagtcccttctgatttcatatttaggttctttcccagatttcatacatttaaaaaatattaaaatatacattccaatgcataaatatttgtatatgtttctgatcagtttcatgacaaatagaattaactaggtctgagtataaacacttctaaggtattttattctcataaccacagtgacctcagaaaaagttgtattatagtcttttttttagtaaacttttcatcaaagtacaacatcatccccaaaactgcacatattaaaagtttatagcttgatgaattttcaaaaagataaactcttgacctttgtgtgaccacctcataaatcacaaaaagaatattactgacaccccagaatctctctcatacccctttctaatcactaacctcctaaaggtaaatagtatcctcactctaacaacataaattatttgctcatttctgaacttttgataaattgaatcatacaatattttatgcctgacttctttcactcaacattatgttgaaattatctgtgccattgtaggtagcaatagttttcatttttattaccatataacattccattgtatgaatggaacacagtttatttacctactctactgatgatggacatttggattgtttcttgttttgggctgctataagccatactgctatgaacattccttatatatattctttgtggcacatatgaagctcttctattgggtatatacctagaagtggcatttctggcttatagggtatacacatgttcagctttaacatacttttcaaaatggctgtaccacttcatattcctgccagcaatgtataagacttcaatccactctttgtgctaccatcgtttcatattatctttctcattttggccatctaataagcaattaatggtattgcaatgtggttttaacttgtatttccccaatgactaataagcttagcagtttttacatgtttatggcatttgatgtcttcttatgtagttgttcaagtcttttgccatttttctattgggttatttgcttcttattaatttgtaggggttcttctcatattctggatatgagaacgttgagagaaaaaatgtattgcagatattctcttctacactgaaaaaaaaaaggcttaccttttttcttcttcactgaaattcctaatttaatgtagtctaattcttacatttttctcttctatggttgtgctttttgtgtactgcttatgaaatctttgcctattccaaagtcatttagatattctattattattttctagaattgttattatttgcctttcacaggtggatttacaattcatttggaattgcttttttggtatggtgtgaggtaagggtcaagattcattttgactatgccacttttgctatccataaataatttgactgtatatgtgcaagtttctattctgcccattggcctctttgtctaaccttctaccagtacagcactgtcttaaatgtaatgattttatttaaaaggtcttgatatctggtagcgtaagccctggagctttgctcttctttttcaaaacagatttgagttatttttgattccttgcatttccacgtgcactttggaatcacctgatcaatttgcacaaaaacacctgctgggattctgaatggaactgcattgaatctataaatccatgtggagagaatgggcatgttctcactccagagtatttgcttttgtcaagtcccctaagacatcattgagaggaaccaaattttgttactttttcagtttggggtttaccaaaccaacttttgctgtctaaattcaagcctcaaatctatgtgagggcagatccatgaataagaattccaagataaatattttatatttacttatttatttttgtccaccttaagactaaactaagatttctttatcatcaacctgagttggtaagaattttgtttctagttcatttttttccttcttttttagattctactccacgtagacatcaaaaccaacctaggtttttcttgactgtggtaaaatatgcgtaatgtaaagtttaccattttaaccatttttaagtgtacagttctacggcattaagtacattcacactgttgtgcagccataaccaccactcatctccagaacatctttatcatctccaactgtaactctgtacccattcaacattaattactaattccccatccccttctttccccagtctctggcaactaccattttcctttttatctatatgaatttgactattccgggtttaccatataagagaaatcatataatatttgtccttttgtgattgaattatttcagttagcataatgtcttcacagctcatctatgttgtggcatgtatcagaattcccttcttttttaagctgaataatatcccattgtatatatatactacattttgtttatccattaatgcatcagtgaatacttgggctgtttctaccttttagctactctgaataatgctgctatgaagtgggtgtgcaaatacttgttgaagtcccctctttcatttcttatgggtatataaccagaagtgcaattgctggatcatctggtgattctatgtttaattttttgagaaattgccatcctattttccacagtggtcgcacagttttggattctgacgagtaatgcacaaggattccagtttctctgcatcctcaccaatacttgttattttctgggttttgttgatcctgatgggtacaagatggtatctcatgtttagtgatgtagatcatgtttttatgtgcttataggttatttgtatatcttctttggagaaatatctagtcaaggccttcgtccattttaaaattagattgtttggtttttgttgttggattgtagtattatagctttctaaccagcaaatttgaatgatgcagaagtattgaattttattatcattttacttacatttattcatcgaaagggttatttttcatgcctttttattacttgtcttttttggtatgtgaattatctgttcatgtccttgtccattttaatactgttttttcatttcctattggttttaaaaaattatttataaatattaaattcaacctttcagatacattgctaacattttcccagattgaaatttgtcttttttcaattctattacattttcaatgtagaagtttccttttttatggttttaaatgtctcaaatttatttagctatgttttcttcttttcaattatatttagaaaggacttcccaaccctgagaacagaaaaataaaataacctgtatcatttctctagatcctcaatatgtactttttgcttttatcattttcatccatctggaatttatatcattatgtagtatgaagaaatctattttttcccaaatgatgaatcagtatttctaaaaccatttgttgaataatttattcttttttcactgatttgaaattttacgttttttatgtaataaatggtaatatgtattagattctcttttagagttatctgtcatattctaatgttttgtaactttatttttgcacttattattgtactgtactcttgcatgactattatgcttcaatttttgtagcttaataatagagtttgataattaataatacaagtaccctcttggaagttttatatttatctgcactcaacttttcgttttctaccaaattataaaaacaatattttgaaagcaatttcatgaaactcctaatattatttcagtgaaatctttacaattatgagatttcttatccaaaaacatagtatatctgtagttattgaaacgcctgtcttttatgcctctcataaatgcttgaaattgtcctcaaatatttcctgccaaaattctttgttagctattttccaactgtcttggtccattcaggctgctaaaacaaaatgtcataaactgggtttataaacaacagaaatgtatctgtcacagttgtagaagctggaaaatccaagatcaaggcatcagcagagggcctgtttcctggtttatagatggaatcctgtagctgtgttgtctcatggtggaaggggcaaggtagtgctctgaggcctctttataagggcactaatccgaatcatgaaggctctgccctcatgtcctaatcacctcccaaagccctcgccttttaataccgtcatactggtggattaattttcaacaaatgaatttcaggggaacacaaacattaagaacatagcacacagtattttatactctgacttactattatgaattaccatttttatattttttaactggtgatagctggcacataagaaattcatttttatattaattttataatctaaaatcatttatattccatttcttatccattagtaaagaaatacaatgttgcttactagttcagagcatgggcacagacacagccatgttcaaatcccattgtgccagtttaggatgccacttaacaagctttcctgtccctcacttcccagagattcactgtgctttccataaagtgagcataataatgtcctctgcagcattgccattcaagttaattagtgtatgtaaagtgcttaacacagagcctggcatatagcaagcaaattcagattatcataatatgtgaaataataattttgcctctgtaactataattctctttcatttgggggggaagggagtgcagtgggtagggacaggggtttattgctggagaacttccaaaagtatggtaaatattagagagataccaggctggcacatgacttaactttaaatgccactagtgttttactatacatgtagtattgtacagtattggtgctgacaggtggccttagctctcctgtaaaccactagccactctagaagccaccaaaagtacttatacagcctgagaaaaatcatgtggtgcactgcaaattcaacttaaagacaaatccatttccaactaagtcattccttaagatccccttctacacaaattccagacatcccactcatgttcacaattaaactaagacagtctttctcattttaaagataggtcgtgttcctagcttatgaagaatttccatcaggaatagatgtgaaattgtttcagatgactttttggcaagtatggaagtaatcatgtgatttttcttttctttttttttttttttttttttgtcctttggtctctttatctgatggattatattaatagatatcctaatattaaactcttattacagtcctggaacaagtcctgcttggccatggggattttcttttaataaactcccgggttttgattgccaatgctttattatttttacatccacatacataagggagattgttcgataactgtcacttttgtgttcttggtcagattttatttttaaggctatgccaagtttcagaaaatgaattgggaacatgtccatgaatgtttttattttgtttttgtatttttatgtatggaacattttatggaacccacaaataatactctctttgaatgtttaaaaaaatgccaataatatctaaacctgtcacctatcttaaaacaaaatttgaaaatttttttccattattaaattctattccttttttcctaaattggcttgagtcagatttgttaacttgtattttaccagaaaattatccattttacttaaatcttcataagatctccagatgggttataggaggacagccctgggaacttccttcagtctcgtcccatcttccctctctctggcaggattcccatgaattccatcatgttcataccctcttttatacttctctatttctgtgtaacactgattccttagatctggatttgaaatcagaagcattaagcacaagtgctcacatctccaccttaccaaaagaaaggatcccttgctccctctttcaatctctcactcttacttggttccccttttactgctatagaagttgctctttgatcccactggcaatctgtcctctgcccatctttcaaatattgttcttccccagcattctgtttttcacccgcagcccttctcatgcttcataatctctctgggctaaatcttacttcttatcatttcatccaccagctgaaaactcctaaatctgcatccaacccagacatcactctagtgatcgccagaccaatatatcctgctgccctttggacagtctctgttgatgcccacatcttaaattcaagctaccctcaatggaatttatcattcttgattcagctgtcaccccgtttcttcttctgtgctctctttgttgttaatttgttttttctcatgtgctcttctgctgatgagctcctccatagagaagcatcatccatggtgtcaaccaatccggaaaaccagaagcccttgatgatcctgagcggggcgggctaagcagggaagaagctgtttggcagcaggtagagagaagacaagatgtcttgcagctcccagagcatgcttcatttgtctgaaaatgaaacatatacctgttgcctgtttctaatggccctcatagctgaagttacagccagcatgtttttctcaggtctggaagcaattgaaggactgaggtcagacacaaagaaaggaataaagaaggaagacccagaacaccccaaggctcccaggaatgccactgctcccttgccctccaaactgatatcaggggagtgaaaagcagcaccagagttctgtatgccttgataagatcccacattccctcccctcccctctaacactctgttttatcagaacaaggtgacttggagaccttggaaaagattcccatcacaccactttcccagtgatgtcaatcactagaagcacaaggctgcaaggccccttcctctcatagtttcctctctgaacatatctgtacatctgctaatccagcccatcgtccaacctccctacaggtcgataccctccactctactctctagaattcactttttagcaaaatcttctttatcctcaagttcctctctgatgagtccttcacttcttatgctaatatctagtcctttcctttctttctttttttgagacagggtcttactgtgtcacctaggctggagtgcagtggtacagtcatggctcactgcagcctcagcctcccaggctcaagcaatcctcccacttcagcctcccaagtagttgggactacaggcacatacaatcatgcccagctaatttttatttatttatttatttacttacttatttatttatttagtagagatgaggtctccctatgttgcccagcctagtcttgaactcctaggctcaagcaattctctcacctcagcttcccaaagtgctggaattatagtcatgagccccatgcccggcccctgcagagctttcaggtgatggttgttttttccttcatcatgcctggtggccagagaggcagccttactgctgcctccagtttattgtctctcttcccttaaaactcacagctttaaaatccatgctctcagattcttccatttcctgctgttatcagcagtcacctcccaatcccagggaggtctcatctgctagagccaggcctactctaattcactccagcactattcctgttgtacataatcctttatgatttttcacacactgaagatgactcttccaaataccctgacctcctgagtccttaaacttttctcctcctatgatcttgtcttccaccctcttccatatcagccacccacttccatgagcattcccaagacttcattcaaacaagcattacaccctctctagaatctccctttcaagcttcccactctgtggctaccatctaattctctttagcctttctattccaatagtatttcagccacaccagagcataaaatccattaaatcagtgaatttaccctcctttcattattcctcacccattttaggttcttagattctacttttccttcattgtaattacttctttgcaaacaccctcaactcccttgctcctgtgtccctttgttcagcatcacctagaaaattcaatctacctaaagctcattttccacctactctgaaccggtgcttctggagaaagcagagaacacagatgataaacaaggtaaaaaaaatgcataacattattttaggcagtgataaagctaaatagaagagtacttgtggaatagggtagcataggaagctattttacgtagactgactgctatgggctgaatatgtgtgccctccaaaattatgttgaaactctaatctccaatgtgatagtgtttggacatcagcctttgggagataattaggttatgagggtgaaagcttcatgatgcaattggtggccttataaaaacagacaagagagagcttccttcttctctctgctctccctcatgtgagcgtgtagcagaaagcagccatccatgaaccaggaggaaggccctcagcaggaaattgatcatactggcaccctgatctcagacttccagcttccagagctgtgagaaataaatgttgattgcttaagccacccagtctgtggtattcttattacaacagctcaaactctctaagacagtgaccagaaaaggattctgtgaaaaagtaagttttgtttcagaaaccagaatggagtaagggcatgagttgtgtgaagatctaggggaagagaagaagctggcggtgggggagagatctgagcaaagcctcagaggtggaacaggcttgcatttgtgaagagcagctacaaatcttgggtgcttcttgttgagtaaacaacaggaaaaataacaggaggtgagtacagacacctaaactcacctacggagaggtgagtccagtggctggatcttcattgtccaatatggtagccattaaccacatgtggctagttaagtttatattgaaattaattgaaatttaaaaatcagttccttagtaacactagccatatttcaagtacttggtaagcacatgtggctaggggctactgtattaaacaccacagattagagaacattttcatgattgcacaaggttctagtgtacagtgctggctttgtcctatggacttcattgtctgtgctaaggaatttagatttttatccaagtttgaaagaaaaccactggggaaagccagggaggaggaggatctggacagtacattactcacattttacaaagattactgtggctgctgtatgcagtgggactacagcatagcaagagtaaaagtaagggggccagttagaaagctatggtagtccagattagggagaatctggtagcacatagtggacaatttaagaagtgatataggcccggcacagtggctcacacctgtaatcccagcactttgggaggctgaggcatgtggatcacctgaagtcaggagttagggaccagcctggccaacatggcaaaactctgtatctactaaaaatacaaaaattagccgggtgcggtggtgcacacctgtagtcccagctactcaggaggctgaggcaggagaatcgcttgaacctgggaggcggaggttgcatgccactacactccggcatgggcaacagagtaaaattctgtcaaaaaaaaaaaaggaatatatttgcattatattttagaaataaaatcaacaagagttcctatgaatgtatactgtgaggtgtgagggagagagataactcaggaatgacttttaaaaggttaataggagaatcaaaagatatatagatatatatatatatatatcaaaatattttatgatccaagaagccctgtgcaaatgtaagttggtagcagtcacagtaaccttcaaaaagattggatgtgaacttaatcttatggataactttgcaaagatagaaacaatgtaactgacttgactgaaattgcatactgggaagaaacagacaagaaagttgaagaggtcagatgaaggtcttggaaactgggcacagggatttagatttgaaaggtgaggataagagaagtcactaaggttgtaatagtgaagtgaaagatggattggcatggggagcacctaaagccagggaggtgagtagtccagtctttaaaagatgacagagagcaaatgagaagaaagagaaaagagcagacatgagaggaatttcgatgacaagtagaagtgtctgtttcctcctcagggagccatcttcacagagcctgcacaagaggtggaagttgggatcaggaggtcccttatctggctagagactacttggtcagagtgaatgaccagaatacatgaatagagattctaagatccgagccagaaatgaggagacaaggaaaattccaatggtggggtgagaaccaacagagcaaaaggggctaatgttagcagttagaagataagaagcaggatggaatgaggtacaaacaaagtcatcaagaattaaaagtgttagtctcactgcttatggaagctcttctcttctatgttgcttggtccatgtaggttatcagtcaaccttcagtcatagggactgactgtcagtcccagtaatctacatttaaatctcctcatgtagcaagaagatagcagcaagggccagaatcatccaacaagaaaacacattgatttttggcttctataagcatctctccacaaagtttaaaaaaaaaaaacaaaggtgagagtcaagtagaaagacattggattagaataatttacttcagtcctagagtctttctggtacataatatttacctctgcgatagagaaaactctctggtcatagttttcatcatagaaatttatttcctcctcctccagttaatcttattctaaaaacacaatgggagccccaccctggaattcaacaagcttagagattttcatattgatttctttttttatattttgttttagcagatattgaaccaaagttttatcaggcagagtatacatgacttagatatacatatgaaaaattaattataaattggatctctgtttattgaacaatatttttctactagtttcattaaaaaatttgagatgaagtttcttggaaaaataatattataaaaaataataaaaatcacaggatacaaatgcaataaatcttttacatcagatttatggttgaaaaatgctagggataattttctgataacacattattactactatacaaagttagtcactacttttttccagagttccatattttaggggaaattagtgctttccatctcacagaagtacagggatgcttcattggaatgctcaggaaaggagtcatccgggagaatcaagccatactaataatggggggcaagaaaatgttccaagcatttttcctgttgataattttgcttgtaaatctttctggcttacatttccctgcttttaaaagcagaatataccaaatgtaatttcattcccatataataacagcgttgcaaatgctttgtaaatttcaaagcaattttatcgtttttataatttccttctcctagttactcagaatcactcttctgaatgccagttattgaacttattatatgtagggtagttttttcctcgcactaatgactctatactgctgttctctcctagttcttgtgtctgattcttacattttactatctcctcccacacagagtctatccctctctctagtctactctaaggcttctaatttgcttctgctaatttgcgtttgtagtggaaaataaatcaccaaactagttggagttttttgttcctcaaaacaaaatggacactgagcctaatggactatcagaaaagtaaacacggttttgtcttttagtgttttgtgttttgtttttgttttttatttagtgattaatctggtagttcagactttttgtttatattttctgattcttggttatgtttcctataagtctttttgtcagatactgagttcctgatagatttgaaatttcttaactcttgtttagaagacaaatcaattaagctaaagttgctggtactgacttatttaattaatacatttttgctggttgcttaatgtgttgatcagtttactggtcattattttcgatggatctgaccttctaattaacattgaagaaataaattctcaaatataagatttcattattgtaaatatctgagtggatctttttaagctgccatattgggcactatctcttctattcagttatatatactgtaagtgaaaatgatcaaaataaatgtgtcatgaatatgttgcatgagaccaaaaaaatagcaaaagaagaaaaatccagtttacaaaaataaagcatacagtttatgcttcttcccatgaatacaagaaagaacatgatgtaaaatcaagaggcctcatgtcagaccaccactcagactactgaagcctccaaattgtgcagatatttaatcattgtgaaaaatcttccttccaggaggaataacttcaatccactttggatcacccaagtgctcttagaatttcaaggattttatgagcttgtctgaaaaagcaatataagttgtttcatatgttatttctttgttcgttcttgtggttaggattattttggcaaagtttatttcatagattgccgataggatgacttttgcatgcagcaggcagcaaaaaaaaaaaaacctaagctcaatttgtaatacattatagtgttgatgatgggagatatttaaaacttgtgtctgaggagccaagagcaaaatgccaagccatctagctccatggcaggatctttcctggctctcaattggaccttcactggtaagtttgtccatagcctggttggacagctaaatgaagagcctgaatctagctctctgagcccgtgcatctggttcccagactctgggcagcagctgtgaaacagaaggaagctcatgaagagagcagcaatttgacctcatcccctgatggtcagactaaaatgttacctgccagtttatgagctttgtagtaagactattttactgccatctatgaaggtatgttaaaaaagaaagaaagaaagaaagaaagcaagaaagaaagaaagaaagaaagaaagaaagaaagaaagaaagaaagaaaagaaagagagaaagaaagaaagagaggtaaagagaaagagagagggaaggaaggaaggaaggaaggaaggaaggaaggaaggaaggaaggaaggaaggaaggaaggagggaaggaagaaaggaaggagggaaggaagagaaaaagaaagagagagaaagaaagaaagagaggtaaagagaaagagagagggaaggaaggaaggaaggaaggaaggaaggaaggaaggaagaaaggaaggagggaaggaagagaaaaagagagagaaagaaagaaagaaagagaaagaaaggaaggaaggaaggaaagaaagaaagaaagaaaagaaagaaagaaagaaagagagaaagaaagaaaagagagaaggaagggagggagggaagaaaacagtcacccatcagatcatatcatctgacttgaaggagcctccttctgacatacaggttgctgttgctgtggaaggtattgagttcagattttctatcatcccttattcctcacctctagttgaggtctctaaaaagcagagcctgaggttcagaagcatataattcatggaaggtgtgctgtcaggagaaaaccctaggtaggatacagcaggagagagggctgaacaagaatgtggtctcacgtgaagtcttaccttggcctgacccacatggggtacagagtgcaccagagttgcccctcccttaaggaaatatggcaggactttttttttaactttgtgtcagctagtctttggctctagaaatggaagagggaggggagtacaatctcccaaaggggacagttcccattagttgagggtgattctctaaaggaagagagatctgcctgccaaagccactgggagacagggcaagggccccaacagggagggtctggattgggcacccacagcaccctctacagtgggttcctgtctgtgcctctttagccagagcagtcgtttcccttttccatgctccaatattcggaattttattacaatttttgcttcaaaagaagagtgctgcatttgacaatgggttgatagacacctgacataagtctataagggcttttggccctaggaactgggtggttacccctagcacgacactgagtaacatagcagaaagtgtgaactatagattttcagggagggtgtttcctctcagaaaacaccatttggaggggagggatagcacttggcaagatttcatttggccaatttaaagtgctgagtgatggaggacaggtggcccagctgccctgctctcctaagacagccttagtgatcttgtcccctcatatggccatccttcaatctaaaataactcaatttattaaaaaaccatggctctagggtaacttactcgagaatcttggaaaaatttcaattaaattgactcatatacattcagttttttaaaatggtctcccaactgacactgaagtcatagataaatcaaagcccagatctggagtcaacctggattgtgcctcaaggttaagccagctttgaccagccactgctaattctacgacttaggcagccccaggcaaaatggaggcactcatgtgcaagtgctttggaaaacactgaaggaaattaataaatggaaagaaaggattaaagtacttaaaagggggtgggttgatgccccggtcgaaagaggtacaagcagtaaagtaatagtgagtgacctgtggaagctttcctgctcaagacccagcactaaacactttgctttcaatgtctcatcccctgcgagtttctcagtttcacacaggataagtagttcgttgtcaaattcaggtcacctgactcccaaacctgggctactatgtttcagattcagatagataatagagagataaatggatagatacagagatagaaatatataaatagacacacagcacttgctgctcagctactgtcaaatggtcatttgtccacgtgttatataactattcgagagccttaatggagcattctgaatctcatttcactgaaaatataatgtaaaggaacatttgaaatcatcacagataaccccatgattttagggttgagggaactgaggctcacagagcttgaattattctcgcaataacacacacatactacaagcaaaatccacaagacagaatatttagacctatacgctgggttgggacattctataatgaccttcaagaatgttatagagcagttggctgcaaactgaagtgcatcagaatcacctagagggccaattgaaacacagattattggacttcatccccagagtttctgatctggtaggtactgggagagagctgagattttgcagttctgacaagtttctgctgatgctcgtgctagtaatacagagaccagactttgagcaccactgccatagaagtaaatacctactctgagtgcctgtgatatccatcctatttgtttattgctttgaccataattacgtgcaagtgttctcttgacccaggcttgtctgtagatattcccttcatatgaaagggctccgattatagcctctgtcactccatggatggccagaattaattcatgtagcaaggaggaaagtgccaggaccataatgggttagtccaacctttcatacaccatcccttcttccccagctgtggacttggttaaagaaggcaaaggatgtcggcttcatatggctgagattagctcactgaaacctccctataatgttttgtgtttattttgaaactactcaggagtcaagcctctaaaaatgtacctatgtttacattttggagtcactttttgtggaaaagagtctccattccttctggaaataaaggaacagatggtcagccaggtcatgaaagaggcaaagggaacctcccagctatgcatttccttggcagggatttcacattgaaggacacactcttgttcatccacagcatgagcctgccttttccagtatattcttagagggtttcttatgctcagtaaaatgctcattcttttaaaagtcattaacaaaaaggcaatgagttgctttatttccaaaaccttgcagaaagctaccttaaggacctcgatagaaaataaccagtgtgtcaaattggaactatagttagaaatgctgcagggaacccaaggaagcccgcactggctgctttaggaacttgggtagaaatcacactggaagagctgcagccatagacaggattccccagctgctgtccttgggcacctgggaacctgcttcctccctgtctactagcaagacagaaatatgaattgtttaatgaattgaatcacagaaggcagagccagatatataatttgcggggcccagtgcaaagggaaatcggagctccttgctcaaacattttgaagaaattcaagacagcaatagcaaaaagcactaaaccaaacttggggtccatctaagtgctgggccccatgtacccacacacagatctcatccacgaagcaggtctgcagcatgatcatcatggcacagtttggcagaacaagagaaagggaaggggaaaggggatggacatttcacttggacttgctgtgcaaggtgatttaggtacatcattttatttagtctcatttcacagatgacaaaactatagaggtggaggctgagaaaagtaaagccgcttgcccatggtcacatgcctgatatgtctacactgagattcatttctgactctaagtccctgtttgtttgtttgtttgtttttgttttaaacttttccacattcatattcctgaagcagtattggcttgtaggaaaagctcttacatatgtttttaacttctattccctacaaagccaaagaaagagtgaataatgtaatgaataagataattagaaaatggtccaaatcctggtataatgataataataaaagtagaaacaagacatggaggggaagaagaaggaaggaagggaaaagggaagggaagagcgaggaagaagatggggagaaagagggcggtgaggaagaaggaaggtgagcatgtgctggacagttactacatacgatcttgtatgcattattctgtttaatcatcacaacaaccctctcaaagaagccttggttttgtgcccactctacagatgcagagctagaagcttacagcacttagttaacttgctcaatgctaaaggctcaagatttctgtctaaacaacatctaacattagcctaggaagtcacccaaaatggatttaagggctaggcaagggaacagagtccaagataattctagacttcaaaagttgtaaactgcaagaaaataataataataaacagaaggcagctctatacaggaataataagaaggagtataaatgaaaacattcaaattccagagtaaaagcctccatacattggcatttgtgggagtctccatcctgcctgcttgatcccacccacgtatcctaaagcaaagttggcctgtccgtcttcccacctcagatggattcaggggaattatctactcagagtcttatctgcagaggaaactcattctagctacccatatgatcaagctagttattcacccttaaatatgaacagacaactaaagcataaaccaaaaggaccactgtgcacaaaccaaacagctaacccagagaaataagacgtaacacaaggattatggctagccttgaaaactttctaattgatatcttcagagagattcaagaagtattgtgaccatttcaaaggaactgttttttatttcttttaaaaaggtacaatcaatgcctaggaatgaattttttggaaaaatcagatttctgtctaatttttttgtcagttacaataagtaatttaaaaacaatcaatgcaaggcctgaaaaatagaatgaacaattctgaagactgaatcagataaatgaaagataaagttggaaaatctcccaatacatagaacaaacgacagataattaataaaagaaaggtcttgaaatattgaaagttgacacaggtcaaccagtcagtcatctccactgggaaaaaaacagtttgtttttttttaattctcaattttcttctatttttatttttaattatctcttcacctccattttagtggaaaattttttaatagaaaaaaattttaaaaattcagtagaaaaaaagttatatgttcaaattgaaaggactcaataaggaatgagcaatgaaagtaaaatagaagtgccacacagtaaaagcaaaaaatgtaaaaatgatatgtgaaaaaatgaaaaataaaatggaaagaattctgcatacacaattagtaaaatcatgtgacatttataaactacaaaaatagataaaatccttaatatttccagaaattaagaaacaggtgaccttatcatgatgaaactcagaggggcatcaaactgagagtaaaagtcaagggtgccatggtttcagattctgagcagaaagtctattcattctggaatctggaatccaatactgagtcatttgaatgactctgaaaaaaacaagtcatcaacatgtctcccaaaagagcatagatagaaattaaatcctggataaagcactaacaaagcaattttgcacagtgactctgacttgaaaggtattttatattttatcttgtaacacaactctgtatgctacaagctcaaaatacaaaacacaaattccattaaattcctttacaccaacaatacctatgacacacctatgaatatctctaacaagaaatatgtaggtcctatgtgaaaaaacatgcaagcattatggaaaaacaaataaggagatctaaacaaatggaaaaacatgacatttagatgagaagactcaatattgtaaagatgtcaatcaccctaaataaatatgtaagctcaagttgattccaatcatataccaacaagtcttttttaaaatgcaaattgacaaattcagtctaccattcttctgaggaaattaatggcagattacttaaactttctaaggcacattctcttcccgtgtagtattgggatcataatgaaacctatttcaaagggtaattgtgagaattaaatgagataatacatgcaaagcacttagcacaattaccagctgataatagcacccacaaatcttagtttacatcatattatgctcatgtatataaatactcatatgtatgataatgttcatgcagcagtatttataacagcaaaaattagtaaggcctcaaatttctatcagtatcataattataatgattaagtacaatatactatatcccacagcatggaaaaatattattaaaatttgttatgaatatgcctataatctgacatgaacaaagaaagtcacaaaacaacatgtgtacacattcatgtaaaaaatatataaaaattggtaaatagatgatagatgtttttaaataaaagtaaatatatgttagtaagttcacagaaatgtttctggaattatacgcaccaaactgttaccaattgtttgtgtatagaatacaaagattgatgatattataaattatataatatacagctattatatattctttattataaatgcatctattaggttggtgcaaaagtaattgtagtttttgtcatcactttaaatggcaaaaccacattacttttgtgccatcctaatatattatctgaaaaatttaaaatatcatacgattcttgtttactttaaaactatgaaataggaaaggacagtgttttcaggttgtagttgagcttcaggagatccctgtgccagcagggtcgccctcaatgaagaaggaggcttgcaccaagctgctggcctcaccttggggccacccatgcttaaacccgaatgcaaacccctcagccaccaattctctcttcagctttatctccattcctacctgagcttgctacccctgacttactgtgccacactccccaagtgttccaaccctccaccatgtgctctgaaaccttgagctgtgataatcatgctcccttgtattatgagggtgttcacagcttctctgtctgatgagtcactgaggccaggagttcccgaagacacacagcttcctgcagccctccccagtgaaagcttctcccagcactgtacctccaattttatggtaggaaggtggagaaggatctccttcatcatctagggctgtcgcttggcagttactccatccccagatacacaactgatcgctatttaaagaccctgcatgatctaacccttgcctccccgtcagctccatatatgatatagctaaatccccagccacacatgacagttcagcaactgtgaactactgaatccatcatgtgtttcttgcttccatttctttgcccttctaaccagatctcttctttcttcttttagagacaagagttttgctctgtcatccaggttggagtgcagtaacatgattatagcgcactgcagcctccaaatgcctgggctcaagcaattactgcttcagcctcccaagtagctgggactacaggcgcatgccaccatgcccgactgctttttagtttttattttgtagagatggggtctcactttgttgcccaggatggtcttgaactcctggattcaagcaattctcatgcctcagcctcccaaagttctgggattatacgcatgagccacaacaactagcagatctcttccttctgaccagaagactgtttcgtatttcccctacttcttgccccctctattagcatggtcccagtagtgctttaagacacaactttgatcaggaaacctttctcttcaaccctcagccccctccccacccagcagcctgggttaaatggcctgcttaggtctgcttcgctgcacagactctgagatggagaatcacatgcaggtagtttctgagaggcacttttgggaacaggccctggaagacaccagggaaagtgagaatgggctaagggagatgttaaactgcagtgcagttacagcaaaggccttggtctattgcatgaggagctctgaagctggagtggtccatcagagttgttccaaattggcaaaagagcatggggcctatactctcacatctaccagctgtgcctccaaggaaaggacatggtcttgattgaggctgccccattcactgcgaacctgcagccaacaatgcttcaacagcaagggaataaggctggtgatctgggctgtgcaccacagctcccgctgcgtgaccgttctctgcacttaccagcatgtgttataatgtgtcagtcttccctctagaccagagctgagcaagctacagtctgcaggagaaatccagcccactgcctgttttgtaaataaactttcattgaaacacagccatgttcattcattcacacattgtttatggttattttcatattataatgcagagttgagtagtagtgacagactatgttgacctgaaagcctgaaacagttactggctagcactttacagaaaaagtttaccaactcctgctctattatcttacacaatattcactattgcctggaaattaagttttagaggaataatcaatgaattaatgtatggatgaatgaatcacatggacttgggtttcattcttggctctgccactcaaaaggtatgatcttgggcaaatggattaaccgctctaaattcacgttcctcatcaacaaaatgagacctattacttcctttctagggttgtagtaaacattaaatggaaaagcgtatgtagactaatagcacattacctggcacatactatatgttcacttaagtgggagccagtaggtctattcaaaaagttatgttttactttaaggctgaaaaaggctgaattatgtccgtcttccctttatgagtaggccagatgttagtagtgcttgtcttatcaaaacaaaacaagaaacaaacaaaccaaaaaaaaatagataaacctttagcacctgccagaaacacaaggcctttcctgctgcgtaaatatgacagacaatcctggtggatctcagaggtatcatgctttatatttctggcccagatcctaattaattggtagaagccagatcccataaatgagaagtgccaaaatttaaggatgatgactaatttgtcatagccattcagaattccatttcattagcaggtagagccatgctttgggccagccccagaagattgtctccaaagcaagatttccagaggcaccagtcactgcacatttgatggggcttttaatgcttttatatgagccactttgttaatgacattgtatttagctaaggtaacactagacgctattaacctccaaagttcagtggtttagcacaaagaagaagtttatttctcattcatccaacagtccaaagtgggtgtattaattttctattgccatataacaaaaacaccaccaatttagcagcttaaagcaacacaaagttgttatctcacagtttttgtttgttacaagtctgggtataggttagctggattctcccttagtatcttatgaggtgggaattgaggtgtcaggatttcaatctcatctgaggcttggagtcctcttccaagttcactgcttgttggaagaattcacttccttgcagctgtatgtctgaggtcccagttttcatgttaaccacagtccaggaatgtgctcagtaactagaggccactgtaggcccttgccacatggcccccctcctctcacaacctagaagcttacttcttcaaggacaacaggatagtctcactccagtcagccagggtggactcttgtatacaataacaacgtagcaatcatcacagtgactatcccatcacttttcccatacgatgtaagctaatcaagggagttactatcccatcctctccataggccctgcccacactttaggggaggggactatgtactcctgctcccttaagtctttgttgtcttcttcctcctcttcttatacccttctttctgctcatctcctcctactcctaccactagcccagttattgtcattctccaccaggggtctctgtatgtttaggagaccctattgtttgcctaccccaaagccacttattcctctttttcctttctaataaaatgctagtattgctctgatatccactctactccatattaccatattctcagtccaaacatcaaagatgcaaatcctgattggtttaagcaatcatggttgttacaattctggccgatgagacctgaaggaaatctaatggtgaggctcctggaaaaggttttctagactgattagaacacatacaagagaaaatgccatcattcttctgcttctgaatagttgcaaacaggcagccattgtttgaccatgagagaagccagatttaaggctggaatgaggaaggcaaagtaaaagaatggagagaacctgagtccttagtgatgtcattctgctgctgaactaactgtccctagagtctctctgcattaagacctcttgttgtatcaaacaatattgtttagaccaggttgaaacttggtttcatatacctccagttgtaaacacctaaatgattgggtggatggtgtatcaatttttaattgtgataccctccacagagcacagcaaaattatgcaaaatattgtggtacccttacttcacataatatagtgggaaacattaatgatgatgatgataatgataacaccagcaacaaagtagacagaagctgcctctggtaaaggattgaagtcaaggtcacaaacatgaaatttgcaaaatcaattgcccctgattttcctgaacagcatctagaagtatataaacgtgggtttgacatattttctatagtcttccagatttagcattatccagtttgaaaacacagagtaagtgtgccagtgacagacttgagagaagctgttaatgagttgatattaaaagcttgattgaatgcccctttccaatccaaatcagtggagcagagtagtccaaatcagaattttgttgatttatgcttaacaaggttgtaaggaggtaaatagaattcatgctcaggctccattagcattgggtcaacagtcgatattcccaatataaaaatgcattctcagtgaggtttgcttgttttcgttgttgttttatttttgccataaccatgcatcccagccctatggatgacgtgaactgagtggttcttgacccagaaaaccaaatgaactcttgaggaatcatgtccatcaaaagtttagttggcctgtagtgctgagagcaacacaaatgattctgcacagtgacactgacttgaagatatcttgtatccactccatccatccacgtgcatcttggggaaaaatagaggaggcaagtcatgcattaaattatcaaggtaatatatttcaggtaagtggctccataaagccaaacagaatgaacattctactggcagtgtctagagaaatccgtcagccttatatttctatttatgtaaatccaataaacagatgagggaaagctagggcattttgcagaccttgagaggagatttgttcatgttcatcaagtcatattgcttggaataggttagcagtaggtctctacaagaatggagtttttattttcttttaaaggtgtatggaaatgagaatctaagccaaagatcatctggagtggcctatttttagagaaagtgatttgctgaatttgtcattcatcccactgtgagccatggcaggcatcagtagtaacagccagctcttacaagaaaaatctttccattcttgaaaagcattaaaaagaaatgttatcattacaaaggcaggtgagacaggaagtgagggaataagaaaatgtaacgcattttctgtgtatttgtgtacatattactatatatatagatttactagtgtgtgttcgcctgctcatatgcttatcagtgcacgagtgttaagttatgtgtttcgtgggtatgtgtgtctatatcccatgctctgtgaatgtaagtaataatagctaactaatgtttattgggttgatactgtgcctagactctgtgctaagagctttatgaggattctttctttaaattatctcaacagcctacgttttccattcaacaaagaggctaatagaactattagaatcagaaccaaaatttggatcccagcagcttgaccattttgggcaaacagctccccagggcccactgccattgatcaggttgccgtgctacatgctgactgtatttatatgcgtgtttggatattttctgtttgttttggagaaaagcttaaaggatatccgttctttttgctgtctatattaaataagtacatttactcaggctgagacaattaaccaaacacacacacccatattcttggtaacatattgatgtattcagcagcaaattgaaattgaaaaactaacatctgagggtgtttgtaattcctgattgatctttgtctttatcttcaaatattatatgtctcataatccacttagttcaatctggtgccttgccatctggcctctggctcatacaatcagtttgtgtgatgtttgggactatacatttacgggatttgaactctctttataccagatcttcacatggatgtctaatagtcaacacaaagttaacccataaaaagcaactgcccaatatctatccccttcatgtatcagacatgcttcttcacactgtctatcatctaagtaaatggccactccctccaatggcaactatagaaaccaaaaaacctggactcatccttggctactctcttttcctcaaaccccacatccaacccactaagaaatcctgtagactacaacttcaaaatatttccagaacataccacttcttaccatgtccactgccatacccctggcctaagccatcttctgtctatagaaatgctggttctttctataagtcataagtcagtacaaatctttttaatagtcaggtctcttagagtcaagtaatgatgttctataacactgagaataaatctagagtccttatcaagaatctgcatatgtaactttatctgtatcttctgcctcctcctctccctctcctagtctgctccagtcattgaagctcaactccttgatgttcctcaaacacacagaatatatttgcatctcagcttgagaaaatgaccaggatcaaagagtgctggtgggagaagttccaaactgactcttaaaagaagtgctcaggaaaggcagggagtattttgccaacaaattgcaccataggaattaagaccatagcatctaagcccaggagagactgttcttccatgatgaggtcttcaagagacaatgatgagaggtccccaggttgtaggtcccctaatggagattagaccaagggttgtaggctgtgaaggcagcacatatgtcctgtcatgagacaatatgagtgggtcacgagcatggcttttgaggtcttaggaaacctaaattcctgactccaccacttcctatcagcatgtaactgggggcagtcacttggcctttctgagtctcagtctcctgatatttcaaaattttgcagatttaacttctcacaataatattttggatttatcaaaaatctacatatgcccatgggagtatagcatatatgtgctataccagttaaatatattaactgtacaagttaaagataattttgactaaaagtaacagacagaaaaacctaacttacaataatttaagcaaatatgggtctgtttttcttacatagcaagaagtctggaggtgggaagtggctgtcttagttcaactactcagcaaagtcatgaagatcttcctttgctcagccaccttgtctggttggtttatgtactcttgcttattgcattgaaatggcaggagggctgctgtagcttttgacattacgcctatgttctggacaagaaggaaagaaagaaagggagggacaatcatgttctctcttttattaggaaagcaaaactctcgagaaatctacattggatgtacatttcattggccaaaactgtcacatggccatttctagctgtaaggaaagctggatacattgctgttccaagaaaaatagaggttttttttttaaagggaaagagaagtaggaattggaaattgggtatacaactaaaagagtctgcagtgggaggaaagaaagcctttcgggggaaaaaaagactgagaactgctttaagaaacatacaaagtgccaaagatattcttctacattgtcatttgtcagttttattctttcacatttagatttttaattcaactgtaaatttctgtgtggcatgaagagacaaaggaatccaattatcctaaaccattcttatactcacaaaattctacacacactcactcacctgtttcagggctctatgtttgattcaattccattgatatatatggttttacctaaaatattacgtatttttttaattcctatggttttgcagtatgtcttaaaatctggttgggatatcactatctttgctcctctttctaaatagacttaatccaatctacaaggaatttacaaatttggggtggtgaggcatacatttcgttatgtacccagtagtcattcaggagcaggttgttcagtttccatgtagttgagcagttttgagtgagtttcttaatcctgagttctagtttgattgcactgtggtctgagagacagtttgttataatttctgttcttttacatttgctgaggagtgctttacttccaactatgtggtcaattttggaataggtgcagtgtggtgctgagacgaatgtatattctgttgatttggggtggacggttctatagatgtctattaggtccacttggtgcagagctgagttcaattcctggatatccttgttaactttctgtctcattgatctgtctaatgttgacagtgaggtgttaagtctcccattattattgtgtgggagtctaggtctctttgtaggtctctaaggacttactttatgaatctgggtgttcctgtattgggtgcatatatatttaggatagttagctcttgctgttgaattgatccctttaccattatgtaatggccttctttgtctcttttgatctttgttggtttaaagtctgttttatcagagactaggattacaacccctgcttttttttgttttccatttgcttggtagatcttcctgcatccttttattttgagcctatgtatgtctctgcatgtgagatgggtttcccgaatacagcacactgatgggtcttgactctttatccaatttgccagtctgtgtcttttaattggagcatttagcccatttacatttaaggttaatattgttatgtgtgaatttgatcctgtcattatgatgttagctggttattttgctcattagttgatgcagtttcttcctagcatcaatagtctttacaatttggcatgcttttgcagtggctggtaccagttgctcctttccatgtttaatgcttccttcaggagctcttttagggcagggctggtggtgacaaaatctctcagcatttgcttgtctgtaaaggattttatttctttttcacttatgaagcttagtttgactggatatgaaattctgggttgaaaattcttttctttaagaatgttgaatattggcccccactctcttctggcttgtagagtttctgccaggagatcagctgttagtctgatgggctaccctttgtgggtaacccgacctttctctctggctgcccttaacattttttccttcatttcaactttggtaaatctgacaattatgtgtcttggagtttctcttctcaaggagtatctttgtggcattctctgtatttcctgaatttgaatgttgacctgccttgctaggttggggaagttctcctggataatatcctgcagagtgttttccaactgggttcaattctccccatcactttcaggtacaccaatcagacgtagatttggtcttttcacatagtcccatatttctcggaggatttgtttgtttctttttattcttttttctctaaacttatcttctcgcttcatttcattcatttgatcttccatcactgataccctttcttccagttgatcgaatgggctactgaagcttgtgcatgcatcacgtagttctcgtgccatggttttcagctccatcaggtcctttaaggactcctctgcattggttattctagttagccattcatctaatcttttttcaaggtttttaacttctttgcgatgggttcgaactttctcctttagctcggagaagtttgatcgtctgaagccctcttctctcaactcgtcattctctgtccagctttgttctgttgctggtaaggagctgcgttcctttggaggaggagaggtgctctgatttttagaattttcagtttttctgttctgttttttccccatctttgtggttttatctacctttggtctttgatgatggtgacatacagatggggctttggagtggatgtcctttctgtttgttagttttccttttaacactcaggaccctcagctgcaggtctgttggagtttgctagaggtccactccagaccctgtttgcctaggtatcagcagtggaggctgcagaacagcgaatattgctgaacagcaaatgttgctgtctgatcattcctctggaggtttcatctcacaggggtgcccagccgtgtgaggtgtcagtctgcccctactggggagtgcctcccagataggctactcggtgatcagggacccacttgaggaggcagtctgtcggttctcggatctcaagctgcgtactgggagaaccactactctcttcaaagctgtcagacagggacatttaagtctgcagaggtttctgctgcctttttttcagctatgccctgcccccagaggtggagtctacagaggcaggcaggcctccttgagctgcggtgggctccacccattccagcttcccagccactatgtttacctactcaagcctcagcaatggcaggcgcccctcccccagcctcgttgccaccttgcagttcaatctcagactgctgtgctagcaatgagcaaggctccgtgggcgtgggatataatctcctggtgtgctgtttgctaagaccattggaaaagcacagtattggggtgggagtgacccagttttccaggtgccatctgtcacagctttgcttggctatgaaagggaattccctgaccccctgcttcggctcaccgttggtgcactgcacccactgtccggcacccactgtctgacaagccccagtgagaggaacccggtacctcagttggaaatgcagaaatcacccatcttctgcgtcgctcacgttgggagctgtagattggagctgttcctatttggccatcttggaaccgccctagatatttaactcaactgtaaatttgtgtgtgacacaaggagaagaaggaatccaatttgtcctaaaccattctgatattcacaaaattctacatgcactcacccatctgtttcggagttctatgtttacattcaattccattgatatatatggttgtatatggtattttataaatatctatttattaaaaataagtatcatgtatttttaacattcttgtggctttctagtatgtcttaaaatctagttgggctattactctctttgctcctctttctaaataggacgttggctctttattctggttcctttattctgtaatataatttttattgcagatgttaatttgttcagtatcctttgggaattacttttaatttttatagtaacttggaaagaattgacttactaaaaatgttagtcaggccaagcatggtggctcatgcctataatcttagctactctggaagctggtgtgggaggatcacttgagcccaggacttcaagaccagcctgggaaacatagtgagacatggtatctccaaaatttttcttaaaattagccaaccatggtggcacatgcctgtagtcccagctacttaggaggctgaggtgggaggattgcttgagcccatgagtttgaggcttcagtgagccatgagcttgccactgcactctggtatatcattcataaacatggtataccttcctattattcaggtctctttatatacactttaataaaacattttaatcatctgcacaaagttatccttgctgctattcagtccttctcttgggctctttatatcaagtcttgtattttttatgcccatcatctccagtcggttccctgtgaaagattgcttattcttgcatcatgcctctgacattgccccttaattctttaggatatgtattatgcatatattaagtttatattctattctggcccaatcattgtcttctctatgccatgttattttttcctgagggctatattcccctgggagtatttgctgccttggctggtaatttgtatgtggtcagggaagcaaaagcacaagccattgagcatgtcccttgctcttatttgaggagtgagtaatgcaccaaagagcaggcttcctctggtactgttacctggattcaaccactccctgtttataacccccatcacccaaccaagtaatgctgcttttcaggaaacttccctgcattttcacattaggcacttttttttggccagggagaactttggggcaggtctttggcctactcctgatatatctgccccccatggcaccaggcatccaaagattctctgcggccccacagcctccagtgtgccccaaactggcattgctgcataaatgctctgcatggacaagagtgtaggaggcaatgaacttcctaaagccatgtaggagagggaagggccctccttaaaacatgataccctgtgtatgccatggtgctcagctctcttctaagtttaagatgtttttcccatataaatggaacccaaaggcctagtagtgtctctcttttcctgtgtccttggagccttcaaccttcttcctgtctatgtagcacatccaggaatggattcaggggaatcagcatagtttatgttcactcttcttacagtccagtgtacttatacacacacaaacactcacacaaacacacacacacgtatataaatttttctattgtttgctttacggtttacagccagagttctcagaacaatgtaaataatagtctttgttcctagaataaaccctatttgaccacagaatataattgaaaaacatatttatttggtttcctagtattttacttaaagtttctctttgtatttagaaaggaaattggtttgtagaatgtggatgtttctatatttctgttcacattctcttcaccgggttccagcaagggaatagtataggtttgaaaaaagatgaattggatctatgctatgggacagattatgtattatagaatttatgtgttccttaacattttggagaaacttgcccataaaaaaccagtccagccattcctttgcagataattatttaaaaatcattttccatattttctttgatgtttaagctaatcagctattctttcatttttaaattaattttagcaatttacattttcctagagaggttattttttaaggccaaatattcaagtatatgagtgaaggttctcaaatcatttgcatttgtggttataccacctttcttattctaaattttgttttagtgggatattttcttttcctattgattagactaagtaaatttttctattttaacatttttttcaataaactagttctttgatttatctattttatgatttttcggtatctctcctgatttcttaggccttcctttgtttttctttttataattttttagttgcttcttgcttcatcaatatgcactatttcctttgtaacaatgaactctttaatggctttgaagttactcttaaatacaactatgattgtatctcttaaagtttttacacttattattttcataactattttttaataccctgaaacagaagaggatgtgtgtgtgcatgcatacatgctaatgagaggtgaggattaatttccagttgtttaggtgttttaatgtttgcctttgggttattaaatgattccacagttctgtgctaatagaatgtggcttgtttaatcatctattctgaggaactcattgagaattcctttgtggtttctcataaggtaatttttggtgagtgtttcctaggcacttgaaaataaaatttatttactgaagtgtaaaaatcttaatactctcgattaaatcaatattataagttcaattgttcatatattttatactttcttttacagtgtgagattaaccatggattgaaggatatcaaagtattttactactgattcatttctttctatttcttcttatagtttaaaatatttatctttgacctgatgtggtggctcacgcctgtaatcccagcactttgggaggccgaggcgggcagatcacctgaggtcgggagatggaggccaccctgaccaacatggagaaaccctgtctctactaaaaatacaaaattagccagacatggtggtgcatgcctgtactcccagctacccgggaggctgaggcaggagaatggcttgaacctgagaggcggaggttgcagtgagccgagatcgcgccattgcactccagcctgggcaacgagagtgaaactccgactcaaaaaaaaaaaaaaaaagaaattatcttcaatagtctaatgtcatgttatttggtgcacaataacataattgtttaaacttcattttggattgtaccattcaccactaagtttgactctgtctcactaacttcttttaacttaaattcaattctatctaatattaatactgcaaagccctcctctttctcagcatttgtcattctccttcctaattctcttatttgttctttaggagttattttggctttagtgtggctctttgaaactgcattgtaaatttatttaattggaacataacccattaacgtttactatgcagaggcaaagggaaaaacctctccttcaccccctaaaggttcactgaaaaatcaacacacaaaaggcaaatgagtagaagaaatggcatacaaatttgttagtgtgtgtgtgggagaatcacagagtgattgtaccaccacacaatggggtaaagatggttatacacccttcttcttaggagaaagggagatgaggaagtgtggatgacataagggggcagcacatgatttttaggggaattcaacgggcttgaagaacatacaatggcctgacagaaagttttttggaccaccctcagagcagacaatggtttataacaaaagtctgttcaggtcagggaagaagaactgttttcttctttggcaggtccagactttaggcagataagaggacttcagaaaacaacctcatcctgtgctttggaaaacacagaggattgagagacaggagcaggggaaggcccgagacaccataaggctgcttcttcagctcagcctgtcaaagcaccatatttggggcataggtttctgtgccccaacaactgccatatgtttgattttgcctctgtcattttattttctatttctggagattatcatactccttgctatttttttgctttctttttaaattattctttgccatatgaacttttttcctgataaactgaagacaatctaatttgtaaaatatactaatggctacttttaaaattctatttaacactattgtaactatgtacctctacagtattagttagcactgagaatagaataacacatccttttcctcttctatcctaagtaagaataatgataggacctaccagatagtgtggatcagaagattaaaagaactgtaaagttctatgaactgtatctggcacatagaaagactcaaatgctagtgtaactgataccattgctgtagtcattgttactttttctccatataaaatgagcaaattcacataacctgacttcctttttcagtcccttgcttttctaatagtaagcattttcaccaggggtccccaacccctgggccacggactagtaccggtctgtagcctgttaggaaccgggctacacagcaggaggtgagtggcgggctagtgagcattaccgcctgagctctgcctcctgctagatcagcagtggcattagattctcaaaggagcacaaaccgtattgtgaactgtgcatgcgaggacgctaggttgtgcactccttatgagaatctaatacctgataatctgaggtggaacactttcatcctcaaaccatcccccctctacctcaatccacggaaaaactgtcttccatgaaactggtccctggtgccaaaaagactggggactgtttccctataccacttgtgttttgttactacaatttttggtacttttgtgattgttaaaacctttctaaacaatatgtcatctgtttcattaagtatttgtgatgagttaattttctttgtaaactatatctatactagtcattttaactcagccatgtttaaattattccaagcacaagtatttttgtgcctcatatttcccatatttcccaatgcttttgttttctctgatcataaatggtaatttgtctgctttaaaaatatgtaggttataactttgtcttacattgtttcatattgtggaagggaaatttgaagagatctaagatttctttctttgtagtttacccattttcctgtctatatgctttgatatccctccttccttttttcctctctgattctggaagtaatattataattcagttccacttattttttaaaagtagttttcttattacctccacaatgagtacattaactacattttcacatacagaaaacttggatacattcaactgtttacaagacatgcctccatatgtctacattcatgtgaagaatatgaacttatttaattgtatatatttgtaactcttacatattgtaccttttaaaataactaacatgtaacatgcttatttcctaaataatcatctatgattatttaaggtgaggagagtctcttttgaagaattacaatagttgtagtcatactatgagaattcaataatttttggtactgtaaacttctgacaggatactttaacatgctggtaggaaaagagatgtctcttttcaccacacgacctgacacatgatgattcccccaccgacagatttgggtcttctttcttcatttaacccagaagctctctcttatcttgtttttgaacagtgcttatgccatagtcattctgaagtcttcttcgggatccaattattcatttatatcttcctgaatttctttaatgattttcaacttattgtacctttactgtgcattccatgaaagcttcccaaacatacccacacataaccagattacctttctgcagacagtctcactttcacctttcctactgtttcaaattttactatgccattatattactggttgctacaaattctttcctgaactcttcaagacccctacttttctaatctagtttggtcatctcagctttcataccttattttgaagattatgtttattcatatttattgagagaaaaaaagtagagagtatataaaatttactttttattccaatagtaagcattttcatagttatgttcctctttactacctgagtgttatgatcctgacttcattttatgtttcagaagttttcactggcactagagcattgattgctttttatgttaatttatttctaaatgaaaaaagagtttcccaagatctacactttgtgcctaaatatagtgagaaaagtctcctatgatgactttagtattcatatggatgttttaagagtcatgttattcttgatcttactttccaggtctaggaaaaaaattttttaatcaaaattaaaaaataaatttcaaaggagtcatattattttttaagctataagagatgtcagtgtaagtacatatcaccagttgggtgatgaaacaacctcagagatcaaaagaataagcaaattataagccttcaataaatgctggccattgtcagccttagcatcaccattaataaatataacttcataaaaattttattataaactcatccactaaacatattcaatgactaatgtcaaagatgaatgacaaacagaaaaatattccacaaaatgacaattttttaataaatatgtaaaacatttacgtatataaaaatatctataacctactacaaaaaatgattatgttttgagcattagtctctgccaacagaggccacataaacttatttataaacatataaaaacatatttagccccactgataagaaattaaaagtttttttaagttgctgtgtcatttttacctatgtaatcagcaaatattttaaaaattaattgtaacaagcactagttaaggtatatcaaaaaagacactccttataccagccaatggtatttgtgtatgcaaatatgtaggtacaaaatgttcattccagtattgtttgtaatagaaaatatactagtgagggaaaggataagctgctataacaaagaaaccaaatgaatgttcactggctcaaaaaatatagatatttattcctctctcacataggtttcaaggcaaactgtttaggttagcaaaaggagtagttgtactccttttggttatctgaagacccaagataccgttcatctgtttccctgggacatctcataatctccatggttgaatggggtctccaccatagccatagtgcagccagtgtgaaaaaggaagagagaatgaagtaggcatatacacaggcttaaggccgaatttcagaagtgatacacagcatttcactgtattccattagcaaaaacacagtcttgtttctgcctttatcagccagaagcttagaaacatataatctaaccacataccgaggaagaaaattaaaatggattttggtgaagaactacaggtctctgccttaagaaaatggaataattaattattctgctgcctccattcaatgaaatattaggcttcaataagaaataaattaaatctcccgtgctactagatacatataataaaaagatccccagtatatattatgaaatgtaaaatcatgatacagaaaaatatacattgtatattagatgcgtgttttttaaaagaggcaatctatacacttatacacaggcatacagacagaacagtgctggaagaagaaactattcatagaggttttatcctcagttgaactagagacctgatgtgagaagacttacttttcgataagtttctttttttgtactgtattttgtttaccatgtgtgtatcattattaatattataggatgtaaatatataagtatgagcaaattcttcccttgcttaacacattcagcaattatctgttgctacaagatgttttcaggcttattaacacattatcgagctcttttcctgtcttaggctttgaacttgaagctcccttcctcctcatctttcttcttttgctcataaataatctattgtcctaaaatgtgcctccaaaaatgatgctgccctatattttaatttttttctcacaagactgagtttaatgccatataatgaatataatggatctgttcatgtatcctctccccaaatgagtgaaaacttgaggacaaggggcatgttgttgcttctccttgtccccagcaaaatggatgacaggcagcatgtagctgataagtatttgtggaaatgaaaagatccccccactcacttaatttaacaaacatttatcaagtgactatatggctgctcttttaagtagattctctgttcttcatgtttttttccaatttctctcttttgccctgtgtattttctccgaaaaaaaaaaacaaaactgttctctcttcctctagtatagtttaaaggacacttgttttagagtccagccatgtaaatatcaatcagagagcaatgaagtttattttaataaagaagagaatgcattgatatgaacccttggtttttaatatttctacagatagattgatataaaaatatagatacatacatataggtgtatgtgtagtcatttatatattccctagctctgtccactaagagatctggaatttcagagcccaaaattaatgccaccccagtagcaataagtgcatctagtgcgcagacatctcagtttctaaatgccattccccaataaaactaaccagcttccttgaagaaatagatggttgcaagaacaggacaggaaaaatacaagataagcctggaaaaatcttgtagtgttaaaaagtagggaagtgttcaaaactgactggggaaaggggcatgccaaaaacgatgtaggtaccaactaaaaggagctctgaatgagcaaacctgggacaatttgagcaacaaaataaataatgataatgaggaattgtaacccatagaataaagcaagtatctatcattccatactgatagaaatgaataacttaatgaataaataaataaataaatgaagggtaattatgcaataggattctaataaatacagaatgactaatagaaatagaacaccactattaggcagacagcaggtaataagtttgaaggcaaaaattcattaatggatgatgaaattagagggcaagtatatgataagtacaggatatttgccatctcaaagtctcatagtcacattttgaaatgacgtatgggatgattttttaaaaagtcttatagtcacatgatatttattatgaaggggaaagaggtaactttacagtggagcaacccagaaaatactactttgacccagtgacaaaagttaatcaccagtaatggaagacgttgacatcaggtgtttcctaatatgatgaaccaagaagagcatatcgcttttgtcctagtcttatgaaaaatacataaccttgatataataatcagaaaacatcagacaaacccaacatgaaagataatctagaaaataactggccggtagtcttcaaaaggctcaaggttatgaaaggcaaagtaagactgaccgaggacctgatacagattggaggaaactaaagaaagaacaattcattgcaatatggaatcctggattggatcctggaccagaaaaggataatatgagacaaccaattctgataaggcaaaattctactaagatctgtaaataagctgatagttttatatcagtgttaatttcctggttgtaatcaatttactgtggttatacaaggtgttaagcaggggaagctggatgaaaggtgtgtatgaactctatcctgcaacttttctttatgactaatattattttaaaagaaaatgttagaaaaagaaatattcttggctgggagtggtggctcatccctgtaatcccagcactttgggaggccaacgcaggggggatggcttgagctcaggagtttgaaactaggctgggcaacatggtgagaccctgtctctaccaaaaatacaaaaacgaaatagcaaggaatggtgatgtgtgcttgtggtcccagccactcaggaagctgaggtggcaggatcactggagcccggtggggcagaggttgcagtaagctgagattgtaccactgcactccagcctgagtgacagcaagaccctctctctcaaaaaacaaaaaacaaaacaaaacaaaacaaaacaaaaaaagagtatttcagataatgtattactgggttgctctttcatagataaaaggaatccagagccctcctgaattgaaaaattcagaataattctccaacacctgacagctaatgtttaacatcaatagttttctttttctcacttgatataatctaactctagggtttttcttaattattaggaggaagcaaagtctccctgttcatttggcaaaggaaactgcccttatcttatctcttgctagatagattataaaaatcaaggaaagcatcagatgaggctctaaacagagttgggattgtacttgctgctctaattctccaagcagcctttaaagctgcaagctatttaatcaaaaaccatttactaagttcctataaatctaacatgtagctttagcagtatactgcagtggtttgaaaattaaaagtcaaggattatacacattgtttgaaatacacaaagtattctgcatataaattgttgtcttaatctgttagctacttttttcaagccagagatttttcttaagccaatacaatacagaaaagcagaaccagactagaggaaaggtctccagacgtgacttagaagcttgggttcaagttctaaccccctactaattttaacatcaaattctataacgtatatgaaaacaagtttttaaataaggatagggtcactagtttattaagtgggctgaactcagaaggttaccctcagctattagctttatttttctctcatcacactcttctaacatggttggttggttggaattctgttcatcacctctcgacattttgtgaaggtctcatggctttcattgttggtcataagggtctcatttttaggtattaaaaatccaacccatctaaagcaaaatgtaagtgtgacagctaattcattgcccttcaactcatctccaccaacagcctccttcttgcctcatccacaaacaccccagctaaggcctaacccttgggttgagaacctgtgttgggaaaatgaactgtggtctgttctttcagttagcctccacctttctcacttccaagtccacagggaattttgcaaacaagagctctaggaggtctcaatcatgtcccactctggataaatgatgagcagagcagaactttctccatgcttttggggctattgtgactccatgaagaacactgtgagcctgtgaaacacctcgaccttctttcacatcccaatatgcatcatatatgaattcttgtatgtgaaatctttgcaagttctcctccaaccaggattgccacaggcccctaatgcagtgtcccctctgggccagccttggaaataagtgccagagagctctgagccatttatgtgctttgttctgtctccccaaagtgtctacaggctgcctggcatgctataactgctcaagaatatgtaagatagggacattttcctggaattctctgggagatgctgtggtaagcagttcatctagtagttaagtctacctgggctttagagtcaatcacttctagattcaccagattcacttccagattcactagattctagattcagtctttcagctaatatttattgagcatctaacatgtgccaggctcagtttgagattctgagagacagaagttaatagagcagtgaaaattccctacccttgtggaaactacattctagcttgcaaagcagatattcaacaaagaaacaaataaatgaggatataatataaagaaatcatatacctcctaataatgatgtacccagagggacacagcatcacttctatgatatttctaccaaaaatatgtgtaacctgacagaactgtgaagaaacatcagcaagcccacactgaggaacattctacgagacaattattctgtactctttaaaaatgtcacaaaaaacaatgaaaagctgacactatttcaaattaaatgagaataaaaatacctgaaaactaaaagcaatgcataatcctagattagaccctgaagcagattttttaatgctatgaaaggtgttattagttctgctcaagttctgctctgctcatctcttgtccagagtgggatgtaattgaggccccctagagctcttctttgtaaaatttgagtatgagttgcattaacatgttacattaatgttaatttactatgttgtatttacataaaaatatggttattcttgagagagacagactgaatgaagtttttgggaataagagatcctgatgcttgcagtttattcccaaacagatcagtgatgataacaatagcaatgacaataacaaatcacaataatatctggatgtcagaaagaacaataaaaaacaaatagtccaaaatattaatagttgttgaatctgggtgaaggctataccagcattcatggaactattattgccaattttcaatatgcttacaagtcttcaaaataaaaagttaagaaacaaaatcaaatagtaataagtgctctgaagaggaaatggggatagagcacagggatcggggaagtctcgtgtgaatgacctttgagtagagacctgaaggaagtgagaagtgagaagaccatgggaagggaagagcattacaggaagtcagaacaacaggggtgaaggccctgacgtagcagttttctggtgtgtttgtgatcagcaaggaggccagagggactggtgcagagtgagtgatgaaggagaatggtaagaatgatcagaggtcagatcacggaaaggatattagattttattgtaactacagagaaactatgctaaggttttgagcagagtagtaaaatggtctgacttccatcttaagtaatcactcttggccactttgaaggaagtatggagcatacagcaagaaatagaatatagttaatatattcagttagggagaccttgaggatggcggttgtacaggtgagaccagatgtcagattgggataatgataacagaggtagtatgaagtaggtggattctgcatatattttgaaagtctcattgactaatgtattggctaatggactgaatgtgaagaggaagggagaaattggagtcaaggatgattccaaggtttgaggtctattaactagataaaatgctatgccctttactaacttagagtctgtgaaatgaggaagtaagctggaggactgcttcctagaggccctcaaggacacaccagtcaggaattcaggagcctttctctgtaagaatccaactgtttcatttgaccttttcagatcccactatgaacctctggtccttgtgctgccccagagaacacatgaggggcgccagagcagagagagatattccttatgactgccgatgtgtttctgcacccatctaggccttgtccactgtaggaggagacctgggagtggtggggaacaggttggaacttgctcagagccttcacatttctctctctctgtccataagggctgacatatgtagcatggaagatgcttcctccccttgcatgtccctgggccacctcaagcctatacacttgttttctggattgaacacactcttcggtattgcctggccaccatggtagctcttcagccttgagtatgtgcccccacttctccttgcctcctcggaattgagttgtataactctacctttggtttcaggcctcagggtccacaggaacattgttatctgtttcactctgctccaactccttacactatactggcttgataccttcacgtacccacatggtttcttgaatctagcttaccctgcctgacccaggctgctggaagataagactgcaagaataaattataaaggaaaactggaggtcataacacaggtgaaaagggtcggagtcttggagaggagagatgaatacaggagatatttttaaggaaagggagattagccttggttactggtagaaaatggggttcaagatgagagaagggaggactcaaagagtcttctaggccagaacattgttctaggccagaagattgaagggatgattcatctgtcattttcttcccactaaatttggggaattcaaacatgtaaggcaggcaatccattcattcaattactcaacatagaatgcctatcctatgccaaagcctgtacctgcatgttggagatccaaagatgaaaagaatagtccttgacctcagcgtatagaataagagtatgtagaatgtcagttgtggtgacgtactgctgcaggttatggtagaatgatagggcacctgcatgcatagaatattgagctctatgtggagaagtcagggagagcctgaggcagggcattagaagcaatattggagctgagacttagataatgagcagtaggtctccaggaacatatctgagagaagatgtcccagacaatacagcacggacaagacaatctgcccaggtttccatctttattaaccagtggagcatatgctaaatacatttgcctgtgcaacagtagaaatactacagaaatatcctcagtgcagctctttcttattgcaattgatgttttaggagcacaatatttgcctcagagggcttttatggagcactatattaatttgctagagctgccataacagagtaccacagactgggtggcataaacaacagaaatttattttcttgcagctctagaggctagaagtccaagatcaaggtattggtttcttctggggcctttctccttgccttgtagataatcaccttctcactgtgtcctcacatgatttttcctctgtgtgtccaaatttcctcttcttacaaggacaccagtcagatcggactagggtacaccctaatgacatcattttaaactacctctgcaaaagccctgtctccaaataaaatcatattctgaggtactggggattaaggcatcaacataagaatttgaggagggatacaattcacccggtagcaaatacccactatttgcacggtattatgagaagcagtacttgataaatgaaacctagcatagtactgaatgtaaatccttttgttctgctgtccatcacttaatttctagaactacttgatgtatcaatcagaatctagagagctctatactgtaaaatcctcactgctctcaacagtttttctaccttttagacagccagccagccatcatatttccatcttctctttcattgaccttcctagggcccagcactctctttgttctcgggggaaaacaccagtgtggtccctgggactgtacactttctccccactgtcacacagcaacaggagcagcaactcagaatgcagagtggggagtggccactgccgcccgtgttgggctttatggccatggcatcagacagcttggcatgactcctacctgaggagctggatggctcagaacccatactctcagttgcaacctcagtgccacctgggcaggcaggggctctctctgacaggattccagatctgaggagcgtgctctgaaacttgccatacaatccattataatgcaggtgctaactctctgaactcacttcttcattctccctgaaaaggaggcctcttgcccaaaacatcaatgagcaatgtactaaatttactgaagaatttgaggaggaaaaaaagggagagaggtttataaagcacacttccgtcagtagttctcttactcaaaaatctctgcctccataccaccccagaatttgtttcctccctgctctttctggcacaactccctcatggcagcctcccctcacccccaactccttttctattactgcttgtcatcttgtagttcagatcttacatctgcaaacttcacttcctctcagtattcagtagaaaaaagggctattatttttaaattgagattggtccttggaaccatcttccctagccaggtagctactcaaagtatttcttctgaatatatacagttctgtttcctaagaggaatctttgaatcagctctgaaggtgataacaatcatcctgtattgttacagcggcatccacatgcctcaccagatatggcagaggtgtggtggggattttgagaagtcagagttatgaagtagcccttgagtgccagacaccttgccagatactttagatgctttattttatttaatcctcacaacaaatctgcagggaacctattattactcctattttatggacggggaatttgggactcagagaagttaaataactttcctacactcacactgctggagaccagcagagctgggaagggcagcaaagccattctgaccccaaagtcttcactgtgtctcttcctcaggtatgaaaggctcctctatctctgcacacaaagggagccttaaaacttttgctttaggcctggcgtggtggctcacacctgtaatctcagcacttccggaggccgaggcaggtggatcacctgaggtcaggagttcaagaccagcctggccaacatggtgaaactccgtctctactaaaaatacaaaaattagctgggtatggtagtgggtgcctataatctcagctactcgggaggccgaggcagggcaaatttcttgagcccaggaggcggaggttgcagtgagccaagatcgtgccactgcactccagtctgggtgacagagtgagactccgtctcaaaaaaaaaaaaaaactgtcgctttattaagcatcttaaagcatctcatcttctatggacttcaggcatctttcggacccattttctcaatctataagatttgggcacattatttaacttctttctaccaccctctccttatccataaaatagggacaataatagtactgcctcatagggttagcttgacaatcaaaagataacccgtgtaaagtccttaggatagagcctggtgtataataagagtacaataactacttggtagtaaattaatataattactatgtaccagtcactgtgcttcctgttggaagtggcttcatggtctgcagcagagccccagggcaggaggtaggaagggtgataacatattacacatgctgcatactgggggtcacgtaggagggaccatccagaagcacctgcaaggaggaccaggctagactccacagagaagttaaagttaggtgaaccaggcatgttccagatacaccgaatgagacacagacctcccaggaagaacaaaccaaggcacttaaggtttatgtatcattggaaaactggggcctgctcttagtttatctaggtgcatggggtgcaggaggggatgactagaaataatactggacaggtggatggccgtaatccagcaggaaggatcccatttcccacagtaaggaacctggtataacctagaactgagggatgccatcagagcacttaaacagttgaattatatgttttaacattgattcatacttcaagatttgaaagaatgcctctgactatttcagcctccattgatagctcctgtttctgacatattagagtaggcagtgattaaaacactcaacttcacttgttaatataaatatagggcttgtgtcaccctcagaaagttttatgcattgctatttgtctccagaattagatcttagacttcctaaaagtggagactatttaaagtcttttgtattttctcaccatgctgacttctcagagctggaagggaactttgcagccactgagctcatcctctatatttactggtagaacctaagccaaggagcttgagagacttgcccaagaccacacatttcagcagtggcagagcatgcaatcaatcttatctaataactgttgctttaccaatatagtcattaataactggtttttggagctggctatgacagagccaggtagatgtaagaagaatatttcaacttcgaagttaccatccaaactaaagcaaatcagtacctggaatgtattgtacttaatgtaaaagaaatcaagctgtgagtggggtaaaactgttggtgagaaatttaatcctcatactaaacactacatttctaaagacccccaatgctcactctctgcccattgagttcacatgtaaaatgttagaggtgaatgtggaaagtgctttgacaaactacaccatcagccaaacttggaatagatgaggtgaatctgcatggcggctggagtgtgaagggagctggcttcgagagtcaatgcacgagggctattaggccacaatatgacaggtatttcctcaattcttagatgtcatcatttaatggtttaatatcttctcagaaaaacgaaaatagtgagcatttcaatgctctttattcaatgaacaaggcataactattttagaaaagttaaaaggtaaaaaagaaaaaatgtccatttaaaaatcaaagatgtagaccacatgtgagtagcaaggaggaaacatttgcttgtcaaaggttccctgatgacttcatttcaactcagaagtaaaagccagtgcattattggtacagtgttaaatagccaaggaaatgtctgtatagtggcaactgactttatggttaaatgtcaacgggcaggaaactgagttgatatggtgactgtgcctcctaatttaccgcctgtgtgggcagactctttgcatcagaaccacccctttcccatatagcatggactttagatcctggcagaaatgatcaggggcacactggttaattaacttgatgtgccgctgtggaacagactggtaaatcaatacacctgctattacattcaccttcaggctgcaattctgtgttccagtgctctcatgactcccaatttctgcattccctgactaattgccatataagtagtgttgctcaacctggcaaccacatggattattgctgaaattccagcaggcaccagaaaacaaaacacactaagcagagaaattttactaagagcacatcaagggtgggataccttatgaaagtccatttggctttaagagctttggagacagagagatctgtatgcagatcttcattctgtaacttgctagccatttaactttgggcaagttgccatttttctgttttctcatctgtaaaatgaggaaataacctaaaatgaacactctgagctaccttcccatcctaccacggtacattactctagtccattcaccctcccctgtctctgaaatggttattccacatctccctctttcaactctggacatctcctccctccacctcccactgtctctgactcaggagacagactttttctctttattcactgagaataaagaagcaatcaaaagagaaaagccacatccagccaataccaattccaccaactcttctccatctttctccttatggtggcctgcctcactccaatttaaaggcaacccttcttctcaactacccacggacatggctccagcatgcccctttctctcttatgcatcgtcagatttaatacatgctggagtaagctcctgtatttaaacaaaacatgacagaaaaaaaaaactccctggatgctacatttcccttcagatattgcctcttttcactaatcttctttatagcaaagcttctcaaaacaactgtccatgttcattacctctgctcacttttcttccagccgtcctctcctgaaacctcctcagttaggttttcacactcaccacttcactgaatctactattattaaggtcctccaaagacattcccattaccaaatacaataaccaattcctaaacctctccttacttgacgttattatttaagattcatttcatgcttttggctattctctcttctttgaatcattttcttccctcagcttctaacacactcctctctttgagtcttctccttcctcaccagcctttccttctcaagtccctttgcttgtccttaccaatcttcttgtcctctaaatactggaatgccccagagttctgtcctcagatcacttctcctccatgtctgcacttcactgcctgtgtagtgatttcatctagtctcatggttttaaataccatcaatatgctaattactcccaaggtattactccagcttggacctttccctggaatcccagaatcatatatccagctgcttaactggcagtgccacttgaattccaaataagcatttcaaacttattcaaaactcaactccaaattcagccgtatcttaccataactatacaaggccaagctaaaattacttctgatcaggattatcgcaagagtctcctctcccaacttgtctccctgtttccatcttgccttcctacagtcagtattccacacagctgctagagtgacccttttaaataaaagtcagagcctgtcacttccctgttcaaaaccatcacccttaggataaattccaaagcccatgccatgacctacaaggtccagcaagaagctacccttgacatctctgctctttctctcccccatcgttcttaaccagacgcaccgacctcccagtgcttctcagataccctgcccttgatctcttgttggggccactgcccacaatgctcttctccagcatagctcaaacactcactgcttacttcatgtctctgttccattgtcactggttagagaagccttccttgtcaccttctaatgcccagctctagccttattttcctttgtacctcctctccctgtccaaatttatattatttaccactctgattatctacctataatctatctccacccactagaccttaaaattgacaaatgggacctaattaaactaaagagcttctgcacagcaaaacaaactaccatcagagtgaacaggcaacctacaaaatggaagaaaatttccgcaacctactcatctgacaaagggctaatatccagaatctacaatgaactcaaacaaatttacaagaaaaaaacaaacaaccccatcaaaaagtgggcaaaggacatgaacagacacttctcaaaagaagacatttatgcagccaaaaaacacatgaaaaaatgctcaccatcactggccatcagagaaatgcaaatcaaaaccacaatgagataccatctcacaccagtgagaatggcgatcattaaaaagtcaggaaacaacaggtgctggagaggatgtggagaaacaggaacacttttacactgttggtgggactgtaaactagttcaaccattgtggaagtcagtgtggcgattcctcagggatctagaactagaaataccatttgacccagccatcccattactgggtatatacccaaaggattataaatcatgctgctataaagacacatgcacacgtatgtttattgcggcactattcacaatagcaaagacttggaaccaaccaaaatgtccaacaatgttagactggattaagaaaatgtggcacatatacaccatggaatactatgcagccataaaaaatgatgagttcatgtcctttgtagggacatggatgaaattggaaatcatcattctcagtaaactaccgcaaggacaaaaaaaccaaacaccacatgttctcactcataggtgggaattgaacaatgagaacacatggacacaggaaggggaacatcacactctggggactgttgtggggtggggggaggggggagggatagcattaggagatatacctaatgctaaatgacgagttaatgggttcagcaccccagcatggcacatgtatacatatgtaactaacctgcacattgtgcacatgtaccctaaaacttaaggtataataataatacaataaaaaaataaaaataaaaaaactcacttattaaaagacaaaaaaaaaaccttaaaaggaaggttttaatcctctttttactgccgtagcccccaaatcaaggtctatgcctagctcagagcagtacccatgatattcattgagttattattattattattattattattattattatttagatgagtttgcccgggctggagtgcaatggtgtgatcttggttcactgcaaccttgcctcccaggttcaagcaattctcctgcctcagcctcctgagtagctgggattataggcatgtgccaccacacccagctaattttgtatttttagtagagacagggtttctccatgttggtcaggctggtctcgaactcccaacctcaggtgatccgcccacctccctaagtgctgggatgacaggcgtgagccaccgcacccggcctgattgaattatttaatgaatgaatgataccctatccacaaggttgctaggatgattacatgaagtaaatgatatagagtagtttcaagtacatggtaaggttctgaagaatatctgtttcttttaccattattattataaacaaaatggagctgggccatggcactggtacatggaagctaatcattttgtaacatctgtaacattttgtaacatcagggtttgcttctatttctgcatttcatatgttctcatctggcctctgctcttttagggataattagagaaagcatgttcctttgagttcatgtctggggcttaatttaacttgtaggtatttcttttaagattcccacttgaacaagtcacattaacttccaaaacaaattctccagctctagaggcaggcagggtccgatggcttcatacaatttccaagccacatcccccagagcaagaaaaatgtggcaggtttcctggcatcatacttgaacatcatacataaacttccagggaacacagaacaccacaccacatatgacgaagggtttgaaaggagaagtaaagcacatgagcacaggagggagacaagattggatgtgtgtaagcatcctccccgtcactttccctgtcctggcagcagaggccaagcagtgacatttgatgctttcctttgataaacagggcatgcatgctcttttatcactttttagaaatttgaaatatataaaatgaaagaaatagttccccaaaaagcagatttgctttcctgctccacatcctcactgatggccagaagtattgtcatctccctggaggtgggtgatgactctcctccactcctccatccatcccctaaagacccaccagcagtggaaagagcatggggacggggattggaggaaggcagattcaatttgaaccctggtcttgattcacagaatctgtgtgaccttaggcaagttgcttaaccaccctcagcttccatttctccaggggtaaaattgcatcttcactgaatggttgggaggattaagataggtcgcctggtgaagcacttagctcagctccgtattcctagctccttggttccccacttttgtcccccatcatccaccatccacttatatcctgtggagttctcagagggctctcccacacattatcctctgtgtccttcatgacagggtgggtgttattctgattttgagacatgagtagtcaatttattgaatcatctgaactcagtagggagcaaacagtaaatgattttgatttttctgtgtgatggtgtttactttgataaacctctccctgagttgcacatcccatgacaaaaccttggcagattctttaccttcctgttcattttaatgtattaaatgtccttctaaaataaaactccagtcttacctcctgtgtaagcctcccttcctccagcatcagtccagtttatagcctgaaggacttgaagtgaagagggtctgtactgctcctttgctgcatccaggtcctcacctcaaagtggctcaatctcaatgaatgattgtctcatagccccttctcacttagctttttcagagatgaggtgtcctcttcaaaaccaatgctatgctcccaaggacacaggactcactgccctgtatccatcaagatacactagcttatgcctcagcaacaagcaactccacaataactcagggacacctccttcttcccccttctttgacagttctgactcctctgttagtttgagctgtagggcagagggaaagggacaaaagtcttagctggctcactctttctgacctttctgcaggttgttacagcgtctctggctagccttttctagctgatgttgccctattagcagccctagtggggcttttcagagggctttgcagggcctcttttttgtatggctccctgaagtggacagctggcttcacacaaccacacctgacttcaggagggcaaataagtacaatcccaccacatgcatagcatgcaggagggtggggagaacagcattgtaccagttatctattgctgtgtacacgcaatagatacctaatttaatgacttagaacaccagtcatctttttagttgaagagtgtgtgggttgacaatttgacaaggactcagctggacagtacttctggtccatctagactcccttatgcctgcaggacagcagggtggctctgcttctggactctatcctagagtggcagggaattgactggaccatgtgtctcataatccttcaggctacattgggcagtttggtaggtttctagagggaggacagaagtatgcaaggcctcttaaggcctgggcttggaactgccttaaaattacttctgctgccttctattggttaaatttcagaaatcaacaatattcaaggagtgggaaactaggctccacttttgatagattgagatgcaaattcacattgcaaagtgcctggataagggaaaggggagagaactgcagtctttttgtagtctaccccaaacactaatgaccaccatatcttcctggacttttgaagtggaacttagggggttaagacagaggtggctgggcttggcaaggccatgtaaacttgcctgatatattgtgtagggggagtctgaccacacttatggagacccttattagacaagagtactgagcaccatttgtttctttttctctttttaaattacttttatgattttatttttaattgacataaaataattgtacctatttatggagtacatagtgattttgtaacacatgtaaagtatagtgatcacatcagggtaattagcatatccataacatcaaacatttatcatttttttgtgttgggaacattcaaaagtatcctccttctagctatttgaaactatataatgtattgttgttaactatagttatcctacagtgctatagagcactagaacttattcttcctatctagctgtcattttttagtaaaaaatctctccctatcctcccttctccctgtgcttgccagtctctagtatcctctgttctacttttaacttctacgagatcaactttttttagcttccacatatgagtgagaacatgcagcatttaactttcttttcctggcttattttatttaacataatgtcctcctgtcccatccatgttgccacaaatgacagagtttcattcttttttatggctgaatagtatttcatcatgtacatgtaccatatttcctttatccattcattgtgttgttggacccatagattgactccatatcttggctattgtgaatagtgctacaattaacatgggggtgcagatgtctcctcagtataatgattccctttcctttagataaattcccagcagtgggattgctgaatcacatggtagttctatttgtagcttttagaggaacccccatactgttcttcatagtggttgcactagtttacattcccacaaacaaaatgtctatgagttcccttttctctgcatttgttatttttgtctttttgataacagccattgtaactggagtgagatgatacttcactgtggttttgatttgcatttccctgatgattagtgatgttgaacttttaaaatatatttgtcagccatttgtatgtcttcttttgagaaatgtctgttcagatcattttctcatttttaaattggattgtttggaggtttgtgttttttttgccattgagatgcttgagtttcttgtatattctagatattaatctcctgtctgatgcatattgtgcaaatactttttcccattctataggttgtctcttcactctgtgtcagtggggatagtgccatgcacacagcagatctcacccccacagcctggatctgcatgatccattgatcataagagagactggtccatcattgcattgcagttctagaaactaaaacgatcactttctttcaagaccaagagtttatggagcaaaagtgctgacagcttcttccagtttcctttgctgtgtagaagctttttagtttgatatctgagcatcttttttctgcagctctgggccatacatgtttattccaggcaaaagaaagaactcccatggatattcaattacaaaaagaaaccaccttaaaggtgaagtgacttgttgctgggtgaaaagaaaaactatgtactaaggactagggatgagaaagcagagtaaacaggagagacttttaaaaggccactgtggggatggacagagcaaggtgcaccatggtgcaagctgtcatcagagtccagaatcttccagttcctggagccagaatagaggggtagattaaactcaaacccagtcctgccagaatcttgtgcttttccaaacctgttttggtgcttttttataagtcccagaggcaaaggagaaatggtctagtttgtcatggccaaaacaagagggagggcagcaggaagagcagataaagtcaaaaggataatacaatatgtcctatgtcctacacacacacacacacacacacacacacacacacacacacacacacacacacacacacacacagaggttacttatccatatgcttcagacccaagcagacttgagagttcctggtttgtgtcctgtggatagtttagcgagatggattttgagccagacaatagactcttctgctttgctgtgtgcagagacaagtggctgttaagtgatcataagagagaaaggccagctttacacatgtagcctttgagcccatgagtttgtatacttaatatttccaatgattcaaattcaaaaggcaaattatatcaaaatccaatgtggtgggacacttttacagcacactggtaggactttaaggaggcaggggaggaggagcaggggcagaatcaaaggcaaaataggacctctttctgctcatctggcttagtggcaggggcgggggaaattccctctttactaggcactgccatcaccccacccacacagggacatttatgagcctcctcaagacggagggtgtcagtggggactgtgtagtgcacacagcagaccttacccccacagcctaggtctgcttgatccattgatcgtaagagagactgttctgtcattgcattgcagctccagaaactaaaacgatcactttctttcaagaccaagagtttacggagcaaaagtgctgacaacttcttccagcgaaccaacagcgaagacatgaaactgcaagcacacatggtggctgagatcagccccagctccagcccactccctgctccaggaagcctgacgtccacacccgccagggctggtctgcatccaggtggcaaggctcatgcctttcaggaatacatcttcaagaagcccactttctgtgatgtctgcaaccacatgatagtgggtaaggcctcccacccctttctccagatcccagcacccccggaaagctgagtgagagtggtgtgccacgggtccaggtacctacggacagatgctaggcctcagagatttacatgtgggaagatcattcaggagtgctttggggaacaatatttgtgagaaggtaagggaagcagcactgggtagtgggagaagttgggttgtgatatagttgtaatcaggacttcagctgatcccctgtagatccctaaagccctttagcgtgttcttgcattgaggctcgaggtctgggtctttgaacacctgcatcagcctgtcactgtatatgggcaacaagtgagacctggaatgcttgttgcttccccaaaaaaaagccgatgtctgtcatatgtgcatggtcatatcagtgacatccaatatggcctggaagtcagggttctgcagttctccttaccctttgccaaggctcagttaaggggtaggatattcaaaatggtgggcaatattaacccttcttacaatcacacacaaggcttgttcttgttttcagaaaacctttatgtactcatgttctcatggtctagtccctatgactcattttcttcttttaaatggccacatttaggaacagtgcttgtatcggtcaaagatttccaccagaaagttgcctaaaagccaccctaaaaagtagttttaaagtgctgaaaagtttagaagttctttaaaaatggccatgttttactctcactcaggcatcttcagatcagctgagatttggctgatccagactcagctttgttattgcatcttctctctactccttatctcctgctctctccttgaaccagtgggctagtcacatcatgcacttctcatggcgaggacaactgggagcatgcaaagcctcttaaggccttgggccggaggtggcacactgtgacttagtctactggcatttcgttagccgaattaagttatgtggccaaatccatagtcaagacaggggcaaccccctagcccccacctgccgtctctagtagcaaggactgcaagccacctgacaaagggcttggatacagggaggggtggaaaatgggctcaatatgtaatctaccatttaggatgctctctggattactgatctttttttgtttggtagagtctgctaagtcttggcgctcccacccttctacttcacatctccatacggacttaatgcctagcatctgactgtcagcttggggttgctgggccgggggcgatggagggtctcatcacgtctcatgctcaacaatacttcagacacttcagcctctaacttagtttctgtgcctgcctggcttctgaatctgtgtcactttcaatttccacacacatttccaccaggccttttcaaggcagtgttattcataaataacccttaaataggtgatgatgagcctctattttagatctcattgtgatgagtgtgaaaagacagaggatgtgtttttaaaaatgagtaacagaaatgagttcacctctgaggaatgtcatagtcattaccctaaagaggattctaggtacatctcaagtacaacaacaattttgaaagactctattttgaatatcactaaaaaaaatgtcctatgctaaagagagttgcactgcacttttctcttgtcagaaataaatttacattgcagctgccattttatctttataaagaaagaaaaaaaagaatcaacgagtctcactgctcttttcaaggacagaaacaaaataaaccaaatattaggctcctttcaggaaagaacaaaggggtttagaaaggggatatggagcagaagggaaggggagagaaagaaaaggcgggaggaaggaggtgagaagaggaaaagaaatggagatgaagtaggggctggtgtatgctctaacttcctaaaacaataaatagggtattttaattatctgataatggagcacaattgatctgcctctctcgctttcttgacccttcagacatagcattctgtctccatatagattacctaaagatttctttccttcaagccacacgttatcctcatattctagattttagggaaagactacctgctattatccccttagaatgacatcccagaaaagatattaaagctgtttgttttttcctttctactgggaaccaaaggctgtataatgatagccaagaagaatcaaacctcatctgtgcactttccagctgacagatacttctttaaaaataaaatgaacctgacaccctccgtgtacactcacagttcagtttacaaggactcacatttgcgccttcccaacacctgtgccttgaagatggaaaggccacacccttgccataagatccctgatcaataaaagtagaccaggaccccagtctcatccagtgcccatccatttctaattttcttagcttcttattgccagctaggcccttgcccttggacttgatgcctgaaactgctacttaccaggctctcagacctgttgtgttaagcaggcaccgtggcatgccctccagctaacctaaccttgccttcaacacactgctaccctttatgatcatctcttaagctatcccttcccagaaactttggtcacctaagcaagccaaagatgctcaacccagctcttcatggagacatgagagaaataggcagttaggtgtgtctgtcagcttcaatgctgaatgcccctgcctttgagtcaccaggactccatactgagtcttagtctaagagacttctgagctgtctcttgtacttggctagaggaacatacttcctccaccaagcagatccactcttaggccttgacaatcagttaggggtgggagaactcagcttcactgtgtatcacctaaatgtattccatttatggcattctatcttacattgaattaactgtctacaatgactcatttcaggaaagcattaaatctgtgtgataatctgcatctcactgaaatttcaaagacttcaacaagtcaacatgtactattaatataactaactcaatgcatgagtctacttcatcaaataaggagatgtttctaagggactccattctgtttattgccagatatcttgtttcaaaaactatttttaaattaactaaatgtttttaattgaaattcacttagaagacacagcatattaaatggagtcgtatttcctaaacagatatttcgaaaaatgtatttcattgcctaaaatttcaagtttcttcatacagttgctacacaaagaatcattcacttccataacggcatccattgggggaaataataatgacaatgtcttaggaaagcatccctagaagtagggcctgagatggggtgtcttatgaaagggatttgttgtggggagtgccctcagcagaaggagagtcaaagaagcaggagaggcaggctaagtagctaagcaagggtgtggtctcagctggaatctgcttccgactgattccaccgagtggtcctaccttcagacaaaggactagcctttgtacatttctgtccctcagtcattggctatgtctgcccccaggaagtagtgagagtgcagcattccaggcaaggagcatccctcttggccaaggacagctccctggaaaaaaaaggggggcatctgtgagtcattggctgccaacactcacagcactagaatggtaaataagatcaagacaagggtacactatatctgtgaacatactttaatgctacaagatgaagtataaaacactccccactaggaacaaatttaaaatgcagatgaaccttgcaattgctgtacctaaaacattatattgccattataatgaataatatatcatgagaaaatactacattacactgagtcccagaccttcctgctgggctgttgtttgaccattaggttgttttctgacctattctgacctcatcccattgctcaacaaagccataagccattaatcaaaccttgaatggaaaaactatatatatgtatacacaccacacacacacacacacacacacacacacacacacaaagacattgaactaaaaagacaaagcaatgtttgctcatcagtgaagttgtctcttggcaagaaaggccaaagatcaaggggaatattaaaaagtaaatgtcaactctgggcattcttagaatgaaattgaatctctgaggttctgtccatcatttaattgaagttgttttaggaggtgtacagcttgtaaataataaaatacaaatgctctctaaaacttttatttttaatgtttcacatagatcctctcctttgggccatagtgtgtttccattttaaaatgcagcacccagaactcagtagtttgcccagtgcaattattaatctctggtgtccagaactttgctgctactttactactacaggacaaaaaatgcagtgtaatgtctggtccaacagatgcaaatagttcctttctcttctttgcacattcggcccacttgaaagaatcctactaattatggtcacagaattttattttattttattttattttattttactttattttactttattttattttactttatttaactttatttatttatttgagatggagtcttgctctgtcgcccaggctggagtgcaatggtgcaatctcagctcactgcaacctccgtctcctgggttcaagcaattctcctgcctcagcctcccaagtagctgggattacaggcaggtgccactgtccctggctaatttttgtatttttagtagagacggggtttcgcatgttggccaggctggtcttgaactcctgacctcaagtgatctgcccacctcggcctcccacagtgcttgaattacaggcatgagccaccgcacccagcctggtcacggaattttaagtgaaaataagtaaagctggaacatagtcatgctaaggagatggtgacccagcagataaggaatgtttgcaggaggtggcaatgtttggcctggaaaagactttgaaaactgttatcttcaaatagttgaaaagatctcatctggaagaacgtttaaactcacttggagtcccaagtgcaaaatgacagatgatactgtgaggcagagttcaaaacactaaaaagaggagtttcttaaagcagtttcagaagtaagctccactggcacagtagcttgcacctgtaatctcagctactgggaagggtaaggtaagaggatagcttgaggctaggagcttaagaccagcctgggcaaaacagtgaacccccccccccactcccgacccagtctctaaaaaaaaaataaaatgagtaaaattaaatagaataaagttagccaggcatagtagcacacacctgtagtctcagctattcaggaggctaaggcagaaggatcacttgagcccaggagttcgaggctacgatgagctatgatcacaccactgcactccagcctgggcaacggagtgagacttcatctcttaaaaaaaaattaagaaagaagatgtaggctctgtggattagaggaggggataaactatgtgcttggaaaatgctgtctagcctaccccctttggatattcacagcacacattagcattttgaagtcctgccatcctgaaaacaacccaggtgttctcagtggagaacagaggcagtgggacgaatggattgtaactaaggagttctctatcaacagctacttttccgtaattccatttggctgctattgaacacaatttggcgtgtatctccttaatatacataattcagagagaatttctaacactcgcaagggcagattcattaaagagttgttaagacttcaatataaggtccatccagtgttctcacagagattattaattataaatgacacacatgaacatgtggcttgtacacagcacctttcaactaaaaaaagcacaacatacttttaagttagtgtctgctattatttttctgaaattttatgcctgctgccaagtactgtgtattttaagaaatctctcattgaaaattacttaaatgaaacagtaacccacaatccttccagcaaagattgagcaaaaattgatgctggtagacttcaaggaggacgtatcctagagtctcaaacagaaatggaagtgacactctttaggggatactgttgtgctctggagcattgcgtgtcatcttaaaaaatccttgagctgccatcaaaagagaagacaggacaagaggaagtgaggaggcctgctcttgttcccatatttcccactgctctcccacaagtattcacttctccatggaatgtcctaatagtattttctgggcccatttttagccatttggctcttcctactggaacatctgaatgcccttccttcctactctatctttctatcaatccagtcctacatctatcaagacccaactaaaatgctttctgcagttctatggtgatcacttattttctctgaatttccatgttatttacagtgtagactttggtaagctccttgaagacacagccagctctaatttatgtgcctattcccactgaagctacacagcatacacctggcacacagtgattatttttaaaacagtcattagtaaatgggaaaaaaaatagtttgccttcaaataaaaacaacagaaatagaagcaaacttaagcaaaaatagaagaacaacatggaaacattttctgatttttctaaaagtcactcccaagtatatcaaggctccagcctgcccaaaaggcagcctgacacagataccctcttccctcatctgtcatctttctcttgatttctcctttgtgttgcatattttaatgcaaagacacttggtgcacaaaggtcataataaggatatcttcactgtgaattatatccatacccaaataaaatggcatcctatccagagtctcgctctgtcacccaggctggagtgcagtggcacaatcttggctcactgcaacctccaccttccaggttcaagcgattctcctgcctcagcctcccgagcagctgggattacaggtgcccgccaccatgcctggctaacttttatatttttagtagagatgggtttcaccatgttggccaggctggtttcaaactcccaaattcgggtgatccacctacctcggcctcccaaagtcccgggattacaggtgtgagccactgcacccggtcagtggcatctcatcccatttaaagcttctgtcattaattctactttaataataagatttccaccttagtttttttcatgtttgtttgataggcctttatctacatttacactcagccttttttgtcatgttctgtaagtgcttcttttgaaaataaacagaatttgtttttagatttcttttttgcccaacctgaatttttattctcaaacagaagaggatttgcatttcttgccatgagtgaaatatttggctttccttctgtcttatgatttacatgctttctagcttgtgtttccttccattttgtgtgtgtgtactgtgtttcacatgtggtttctgtgttctttctttttaatagcttctcatctttcggcagatatataatatgttcttctactaataattacctctgagagtttcaaaaaacattctttattctacatttctcaaattattaaaaagtaaaaataaatatggtattttgttcccctatgatttcagataaatttaccaaacttttcatctcaactcccacctccctagcaacagtatttctccttcctgtttttgcagattaatccagattttaaaaatcaattcagatttttattgttatttcagtgttttataattcatacttttgattgagaataaatcttaagatatatacaaattttataacaagatttatacatcttgttagatatttctagctttaaccagtttcaatattcaccaccattctattctattactatataacttcccaattctttttcttcttttctttccttttcattgatacataataattgtacctatttatgagttacatgtgttattttgatacatgcatacagtgtttaatgatcaaatcaggatatttaagttatccatcacttcaaacattcatcatttctttgtgttgggaatatttcaaatcttctcttctagctgtacttaacttcccttttcttaagctctttgttttgtttctcagttgttcaaagtttattttcagtaatattttatcaagaagaaaacgtgagtagcaaatacataagggagcaaattgtgatggatcccacttgtttagctaatgagtctcttgcaggtgggggcagattggtgagcagagattaactcagggctttctgctggctttactcagatccactctttagcattgtttccctgtctgctttgctctcactgaagttactagcacattcttgccttttatattagtctataaaacctaaagacctgggcactgctgctttatgttagcaattaaatcagctgcagtatcaggtctgtccttcactgcctctaagaaggatttggattgtgagattttattttttgcttccctataccccacacatcatttcagcatatttttaaaatttcttcttttgattcctttatcatactatctgattctcttgtattttattgccaaccacaagcagatgctatttataattgccttttgtttaatatagtataacctttcaaggcatgtctttccttatggcattgtctaaaggggtaaaggagacaggttgtgtaatgcagtcacatagactggcacatcgcaaatgtgacaacataaattccagagggcagacaccatggtgtgctgtgttctctgtgttctctggagtgtccttagcactaagcccgggacctatttaatagttggccaatatgaatttgttaagtgagtgaatgagtgttcaaccagcaagaaatattatcattagaaatatggttatgatcatttttatgatacataaggcaaaataccaagaattaagaaggtagaattgcagataactcaaataatcatttatccatcacacatggactaagcaccaactgtgtgaggggccctatactgatatctgggaacgccaagtctgacatcatcataaattcaagtgagagactgggaagtagcaaaggaaaggggaatagacattacctagaaagtggcagaaaggaggagcccctgccactataagccgaaggcctgtggggcctccttccatgactgactcttcagttgtaggtgggcaaggtgggctcaacaagccttctggtgctctccctggccttccaaggccatcccacccagacccctatccaggtgatcagaccggaatgtcctaaagccaaattgctaatgggaggatatctgaaccccattttgggtaccagtttgtggaagttgggaagccaaaggaactgttggagtctagtttatctcaatgactttggtcatcgtactaccacatatttctctaaatctgtttttcttactatgcatatgagaggtgacagcgtgctggcagtcctcacagcccttgctcgctcccggcgcctcctctgcctgggctcctactttggcggcacttgaggagcccttcagcccgccgctgcactgtgggggccccattctgggctggccaaggccggagccagctccctcagcttgcggcgaggtgtggagggagaggcgtgggcgggaaccggggctgcgcgcggtgcttgcgggccagcgtgagttccgggtgggcgtgggcttggcagaccccgccctcggagaggccggccggccccaccggccccgggcagtgagggtcttagcacctgggccagcagctgctgtgctcaatttctcgcggggccttagctgccttcccgcggggcagggctggggacctgcagcccgccatgcctgagcctcccaccccctccgtgggttcctgtgcggctggagcctccctgacgagcgccgccccctgctccacggcgcccaatcccatcgaccacccaagggctgaggagtgctggcgcagggcgcgggactggcaggcagctccacctgcagccccggtgcgggatccactgggtgaagccagctgggctcctgagtctggtggggacgtggagaacctttatgtctggctaggggattgtaaacacaccgatcggcactctgcatctagctcaaggtttgtaaacacaccaatcagcatcctgtgtctagctcagggtttgtgaatgcaccaattgacactctgtatctagctactctggtggggacttggagaacctttgtgtccacactctttatctagctaatctggtggggacgtggagaacctttgtgtctagctcagggattgtaaacacaccaatcagcgccctgtcaaaacagaccctctgggctctaccaatcagcaggatgtgggtggggccaaataagagaataaaagcaggctgccctagccagcagtagcaacccgctcggatcctcttccacgctgtggaagctttgttctttcgctctttgcaataaatcttgctacagctaactctttgggtccacactgcccttatgagctgtaacactcactgcaaaggtctgcagcttctctcttgaagccagcaagaccacgagcccaccgggaggaaggaacaactccagacgcgtcgccttaagagctgtaacactcaccacgaacgtctgcagcttcactcctgagccagcgagaccacgaacccaccagaaggaagaaactccgaacacatccgaacatcagaaggaacaaactccggacacgccaccattaagaactgtaacactcaccgcgagggtccgaggcttcattcttgaagtcagtgagaccaagaacccaccaattccagacacacatatatgctaatcttagaaagacatggatactatctcccctctccactccatccttaaacatctcatgactattaagaatgagaaagggaccaagtggcaagagaacatcttcatatgcatacaactttccagaaaataaaaatttgccaagttgtcagacactgcttgtatcttatcagtgtaagaaaaaaaaatacagaacttccttcctgtaaactgtttattttactattaatagtaattgactgaagtcttatatgatcaaattcagggaggggggaatattttttaagtcagccaaaggaaagaggctgtctctctcaaattacagctcatgatgtttgcaagtgctttggtgatttcttgaaccactgtgtagagatgatctttcaggaaagtaatgtttttcctgcccctaaaaagagacttgtattgtaggagccttttcagatcataccttagcagaaagaagtgacccacagaaacatattttcagtgactaaataatagaccagaaaggggagagtgtctgatcatttaaggtggtcttttgttatatttttagtcattccctagagttcaccaaattgacactatttagtaatatcacagcacatatattctgaatacatattttcacgttcttctgagacaagttgtgtttcatatattttatccctgttccatccaggaagaaatagaaatattgcccaggtcagaaggacaggaggagaaattatctgaggtggagttttggtgaagtttgaggtggacagaaagtagacacagcaatgaatcctggatgcacttaagagttttctttacttgaagctgcaaagccttttcctgcctgtgatattgctgattcctgccttcctgcctaaggttcagaccaagccatgacagacaaagttgagaggctgcctgccttttgactcattcttacttctgtgtgtaaaggctaggaatccacaggaataggacatctgcagctataaacacaaagaagatggagaccagttggaaaatgtcatcctgcactatcattcagctgccataacagggaatgctccactgacctactttagaatggtcctctttgttgtgcagccacagtggataccacatcataaaatgacagaactgggccggtagtataaaatagggccgtcctttgtaaatgtctgggactcagtgaaacaggcaggtgtgtgtgtgtgtgtgtgtgtgtgtgtctacattgtgacccacttattaaggatagagggaagagaaatatatggttaaatcctgttaaagtgttttctccatagcttatcaaacactatctgattgttcaaccacagaaacaaagcaagtatcattctatcacatgttaagcatagcttgggaagaaaatgcagaagcatatggcaaccctgcagcccctgcctcaacaacattataataaataaacataggaaggcccatacatacacatgtacatgtatgtgcatcacatacacacacgtgcgcacacacacacacacactcctgcctccagtcagggaagtatgtttctgttgtcatagcaagactgtggtttaaagggttcatatccacttcagcctgtaccagatcctttgcaatctaagatccagacaccatcccttcatttataatgtcataaagagaagtgccaagaatcacatataattcaaactgatgaaggacgatgaacgagcctgactctgttgacctgaaagaactatatcactttgcctgatgttatcctaatatttctgtttgtacggagatttcaaggaattccttctgagtatctattttcttattttaaaaaatagaaaaaagacacctatctaataggtgtgttgtcaagtttaaatgagccagtacccaaatgcagtcgtgctcagttattagtaactttcaaggcactttgcttcttccctgtcttaatgccttgctccctgctgtatagggaccatgcgaagctgctgtgggcctccctgctgtctggaggtctagtctcttacatcaactgccagaagtttgctgcccagatgccttcttggtgccaaaatgcttaaatacatccacagtgagacaaagcatctcctccctcagtaaaacttgccacttcactgatgttctctctcctctgagggcagatggcacctcatcctcagctacctggcccctttattgataaatcccttccatgaccacagtgtcagtgctacttctgtggcttttctctcattggcacccacttatcttccccacagctcccaccctgattcaagctttagtacatttcatacaaactctttcaagaacttcctaaattatgttatttccctctgtctatatctcctcatccacttaatatactgctgacatatctcttctggaaacaaactgacgtcacattactgcttttctcaagaatatttgcactacctcattgcccgaagaattacgatcatgctgcctagtttgacttgctcaaacctccggtaactaacaaaggttaagtaaaaactttgtctcattggattcatagaaagtaaaactttgttcagtgcccctaacagtcatcaacagtgccacaggtgatcatcagcaaatggatcatcacaaacaaacaaactcaaaatatagacctgcaagagacaggagagaggcaggatcatgccaaggagtcagagggttggtggatcaagtggtcttggacaactgatttaccttctctcaatctaagtgtctttaaaatgagagcagaaataacaatacctacatcatagaatttactgacaactacagtaatacatgtgaaagcattttgtggactataagacttaaaacctgttcactattattaaagctatctttatgtgtgaaaagcaggttgatattaaccgtatatcaaattcctaggaaaggagtctggaaatagggaaaaggggttgagcatgaattggccagtccattctttggagacctgaggatcaatacaaattcttcagccttgagctagaagagcaattctgaagcaagcacatgaaattgtgaacactgcagacttcagaaaagaggagaagaagacagcatagcagatattattaataccgggatcagggatggcaagtccagatgtttcccagatggtcgtgagaaaatgatcatccaggaggatacctcctcctaaaactttaagcaaaacacacaaaagagaagaaaagcctaccagccatggtattaggatgtgaaccagtgacccagagggcaaaggctgtggactccaaccacaaggccctcagccaacctaactctatttgctatttttaaagccaagtgcgggtgaggggcgggggaagtagaaagagtttttccactagtagtcaggaaccgaaataggaaagatcaacagaggcatttataaacaatgaatgccattaatttttttaaagctaagacagggttggaaaagatgtagtagagcaaggagtggggaacataggcagggaaagatggccctggggtcttcacatttttaaagggtcctttctgcttgcttgatggcatttcaaaagtcactgctgaattactatattattgaatttcctggaaaacttggaaaccatcttgttcaactgaacttggactaggggagagatggaatgggttatttttcattgaggccccatactagagttcaactgtgatagaaaatatgctccctttcttccccttaaatagaaaattttgtaactattgagagatatctaaagtttaggggcagtttaagttgtaatgatctaactccaaatatcaagctctttctaaaatatcacaatgagaagacagtgacaagtaatctaggtctcccgttgggatgatgagaaagagggcatttgtaagccctggttcgagccatgtctgcttaacttcccagcgtggtgtgacaagaagaccataagaccatgaggctggagattagtattttaattccagctctgcgtgaaggaacagtgtgatatctaccaaatcactttgcttctctgagccctagtttatcggtaaaatgagagggttggctagatctgggagggcaaaccaacttccatactaattgattgaaagtgcctcaccaaagaagcttctaaagctgcacctcaatttagagaaaaaattgtcatggattagagatgtttgtcatgtaccccaaatgaaggacttcaacacgtatgtatttgcatttcctaggctgctgatctataagccaggacatctcagaaatttagtgagtatctaagtcacccggaagtcttgttagaatacacaattctgatttagtggatctggttaggccctgagattctgcattcctaacagggtctcaggtaatgctagtgatgctagtccatgaactacacttttagttgcaaggctttaacatatctccctgacaaaattctctgaaactaaaattcagcaagtaacttataagagttatgtgaaaggcattaggtactggggagagagaaaaggaaatacaaaattagttgagaaaagaactaattttagtttttaataacatctttacttagtttcttgcatacatattcatctaattatttctttttttccccacagatgcttcatatatacagattatcctggtaaataattggggatacacataaaaacacctgaaccaaagcatatacaaagtactagggaaagccacaagtggaaacaatagttctacctcaggaggaagaggtcaatgaaagttccatgaagaatgtagtatttgagttgggtattgaaggatgaataggagttaatgactctctaccaaactatctacagttcttagcagcaatatcctgttgtgtaccaagaatcaaaacatcccatattttctttaaaataaaagcatgacagaatcaatttttaattttccagaagttaatacatagtgtacagattgctctagcttaaccattgtctctcttttaatgaactcctcatttaggaggcaccatatccaaaaggaaaatcaaatggtttcatgatttggttttcgtcagaaacagtattttaaaagacttctcggccagtttattcttttattcctgatttccaaattatgatagatcaaagaactggtatcttggcaaaaccagaaaatctagctagaaggtttcaggtaaggctagttgatgaaagagggggagaataactaagtaaaggacaccagacagaaatgcaatgtcaggtatgcattaagtcagacctcctttaggattctagctctaccactcactaactagttaatctagtaacattgtttaaactctctgatcctcaattttccatctgttaagtgaggaataatagctaacttcaaagaaccatgttagagaaagtgtatgcagtctctacttggcaaccttgagcacagtcctgtgtcaagtgaccttgatctttattatctctcagtttcaacccttcaggaataaagatgaatagttcttctatgcaaaggaaagaagagggaatctgtaatcaggatacctgtgttcagatctcatctctgccccattcttgccctatagccttagaccaagcacttccctcagcttggaagaacctgaggaacctcaagccaggttcctcagctattaaaaaaaatagctgaaaacaacttttgctctacattgctggttttcaactggagcaatttgcctcatactttagcaaataaaaagatacaacacccagttaaatttgaaattcagataaacgacaaatttttttaataggtcactggcaatatttgggacacacttgtcccatgcaatatttgggaaacactaacacacaaaaaaatttattatatgaaattaaaatctaattgaactttctgtattttatctggcaaccctacccccaggggacatttggcaatttctggagatatttatggttgttacaactgtaggagaaggggtgctgccggcattagtgggtagaggccagggatgctgctaactatgcacagggcagccctgcacacatacacagaacaaagaattaccaggcctcagtgtcagtagtgcagaggctggaaaacctcggtcagaaaatgtggattaaaaaacatgctttgaagtttataaagcattgaaaactaactaatatggttaaaagtccatactacccaaagcgatttacagattcaatgcaatccctatcaaaattttcaaatgtctttctcatagatgtataaaacacaattctaaaattcataggaaaccacaaaaaaatcctgaatagccaattcttcaaaaataataacatttcctttcaaaaatatgtagtgttttatttcttaatataagaaaatatgctcactatggaaaatgaggaaatatgagtaagcaaaaacaagaacaagaggaattacaattccacaatccagatagacatattattaacatcttggtgtgtgccctgctagacttttttacatgtatgtatatgcatattttgaatgagagttttctaaatattttgcatgtacttttcaatatttatttttagaatcattttatgaagttccccacccaaatcccattgatatttcaactcgaattctggtaaatctgcagaaccacttgaaaattggcatcccttcaagaaatgtttttcttatttaataagcatgctgagtattattaatatcagacacctttgcattttttcaaacttaaataggaattcattcagcaaatacttatggagtatctcctcttgtgctaaaccctgttctgaacacttgggatgcatcaatgaacaaaccaggcaaagatcttcgctctcaaagagttgacattttaactggggagacgatggatggatgatggatgaatggatggatagagatgaatagataggtaagaaggtgattgatgataggtagatagataattttctaaggtgataaatgatatggaaagaaggaaaatgtaaaacaaacaagaagagaaagaagtgcagaggcagggggcaggttgcagtatcacatgaggtggtcagaatgagagtcatcaagaagataatatgagtaaattttgcagaaaatgaaggaactcctgggaagaagcattccaagtgaatgaaacagctagagcaaacctcaaagcagagcatacttggtgtctttaagtaacagccacaggccagtgtgggtctaaaacagagagaataaagaatacagagtaaaggagcagagagatcttgtgcaactctgtaggccactgcaaggactttggcttttattctgtagggtaattaacaggacatggatctaattatacttgcaaatggttggtgttgctgttatgtgaaaaatagacttcaatggcgtgggggcgaggattgacgcaagcagaacagttaggaggctattacagtaattcaggtaagagataaaggtacagcaggaagaatagagacagggtcagattgttcatatattttgaatgactccaacaggattgattttctacatgttggctgtatgggaaaaataggagatggggatgcttccaaggtttctggactaagcaacttgaaaaatggagtttccatcaacttagatagggaaactgtctactataagttttggagtacgtgaagttgtgtagattctggagtatgcattgggggaaaattcagtgttagtcacgttaaaattgaaatgtttatttgacagccaagccaaaagaaataagtgtcaagcagtcaggtgtataagtaggtctggagtttgagagtcttgtctagattagagatataattttgaaataatcatcatataaatagtatttaaaggcataagacctttggatatgagccagggagtaagtatagacagagaagaggaccaatgactgagccctggagccctccaatgttaaaaagttgggtagaagaggaggaactagcaaagggactgggaaggagtgaccagtgtggtaggtgtaagccaagaaaatgtgttgtcttcaaagccaaaaaggaaaatagattgaggagagaatgatcagccttgtcaaatgttgttgatagctcaattatgggaaagactttgactgtggcacttagccaagtggatcatggtgtctagtaaccttgatgagagcaatttttgtggatggtaaggaagagattctaatgtttccacattacatatcatagaaatttatttcacatgtgtattccttattataatagggaagtacccttctgtcccatatttagtcacagtttatgtcagaatgagaagtctatttatatgattgttataatataacaattttatatgattgttaggttgacagctatttttcataataagtgatctttgcattcctgggaaaaaaaacctgacaagatcatgtgactcttctttctgtacaaggtggactttgttttgctaacattggatttaaaatttttacacttataagtaagattgatctgtagtttctcttctttgcttcgagaaattttggtttcatttttagtgcaacttataaaattaattaagaagcttttttgttatattgtgcaacttcatagaagggaattctctcaatgatttgataaaaagctattcttacaattgtgtagacaaggtaccttttggcaggggttcctgaaataatttttcttttaatttcatcctcagtcattaggctagtaaagtcttctctctgtcctccttgcacctttgatggaatatattggagccgggctttgaatccaggaatgtgtggctctaaaatccatccaaaatcctgaaacacaagaagcatacgtctgtgtctataacaaaatctctcattttaattttttttaattttttttggtagtttttctttttttttttaattatactttaagttttcgggtacatgtatgtgcacatcgtgcaggttagttacatatatatacatgtgccatgttggtgtgctgaacccattaactcgtcattcaacattaggtatatctccaaatgctatccctcccccctccccccaccccacaacaggccccagtgtgcgatgttccccttcctgtgtccatgtgatctcattgttcaattcccacctatgagtgagaacatgcggtgtttggttttttgtccttgcgatagtttactgagaatgatggtttccagcttcatccatgtccctccctacaaaggacatgaactcatccttttttatggctgcatagtattccatgatgtatatgtgccacattctcttaatccagtctatcattgttggacatttgggttggttccaagtctttgctattgtgaatagtgccacagtaaacatacgtgtgcatgtgtctttatagcagcatgatttataatcctttgggtatatacccagtaatgggattgctgggtcaaatggtatttctagttctagatccctgaggaatcgccacactgacttgcacaatggttgaactagtttacagtcccaccaacagtgtaaaagtgttcctatttatgcacatcctctccagcacctgttgtttcctgactctttaatgatcgccattctaactggtgtgagatggtatctcattgtggttttgatttgcatttctctgatggccagtgatgatgagcattttttcatgtgtcttttggctgcataaatgtcttcttttgagaagtgtctgttcatattatttgcccactttttgatggggttgtttgtttttttcttgtaaacttgttggagttcattgtagattctggacattagcactttgtcagattatttttaatttatttttttatttcaatagattttcagggaacaggtggctttggttacataataagttctttagtggtgatttctgagattttggtgtacctattacttgagcagtgtacactgtaccaatgtgccgtcctttatccctcacccctgcaaactctttcccccaagtccccgaagtccaatgtatctttcttatgcctttgccttttcaaagcttagctcccacatattagtgagatcatatgatgtttggttttccattcctgagttatttccattcctgagttattggaacaatagtctccgattccatccaggttgctatgaatgacattattttgttcctttttatggttgagtagtattccatggtgtgtgtgtgtgtgtgtatttttttttttacacattttctttatccactagttgattgatgggcatttgggctggtcccacatttttgcagttgtgacttgtgcttctgtaaacatgcatgtgcacgtgtctttttcgtatcatgacttttcctcagggtaaatagccagtactgggattgctgaatcaagcagtacatctacttttagttctttacagagtctccacagttttccatagtgtttgtactcatttacattcctaccaacagtgtaaaagtgttcccttttcactacatccataccaacatctattttttaaatgtttttattatgaccattcttgcaggagtgaggtggtatcacattgtggttttgatttgcatttccctgataattagtgatgttgaacattttttcatatgtttgttggccatttctatatcttctctagagagctgtctattcatgtccttaaccgactttttgatgagattgtttattttcttcctgatttgtttgagttccttgtagattctggatattagtcctttgttggaggtatacattgtgaagattttctcccattctgtgggctgtgtgttaactctgatgattatttatgttgctgtgaagaagctttttagtttaactaagtcccatctatttatctttgtttttgctgcatttgcttttgggttcttggtcatgaagtctttgcctaagccaatatctagaagggtttttccaatgttattttctagaatattgtattactcagggttctcttagagggacagaactaacagtactaaaggggaatttattaaatattaacttacatgatcacaaggtcccacaacaggctgtctgcaagctgaggtgcaaggagagccactctgagtcccaaaactgaagaacttggagaccgatgtttgagggcaggaagcatccagcatgggagaaagaggtaggctgggaggctaggcccatctctcttttacaaatttttctgcctgatttatattcactggaagctgattagattgtgcccaccagattaagggtggatctaccttcccccgcccactgattcaaatgttaatctcttttggcaacacccacccagacacacccaggattaatactttgtatccctcaatccaatcaagctgacactcacattcagtattaatcatcataaatatttatggtttcaggtcttagatttaaatatttgatccatcttaagttgatttttgtataaggtgagagatgaggatccaatttcattcttctacatgtgacttgcaattatcccagcaccatttgttgaataggatgtcttttctccactgtatgtttttctttgctttgtcacagagatcaagtggctgtaagtatatggctttatttctgggttctatattctgtttcattggtctatgtgcctatttttataccagtaccatgctgttttggtgactatggctttatagtatagttggaagttgggtaatatgatgcttccagatttgttctttttgcttagtcttgctttgtctatgtgggctcttttttggtttcatatgaattctaggattgtttttttctagttctgtgaagaatggtgttggtattttaatgggaattgcattgaatttatagattgcttttggcaatatggtcattttcccaatattgattaaacccattcatgaacatgagatgtgtttccatttgtttgtgtcatctatgatttctttcagcagtgctttgtagtttttcttgcagctattctggaatggattgagttctttacttgattctcagcttggtcactgttggtatatagcagagctattgatttgggtacattaggtttgtatcctaaaactttgctggattcatttatcaattctaggagctttttggatgactctttagggttttctaggtataggattgtatcatcagcaaatagcgacagtttgacttcctttttactgatttggatgccctttatttctttctcttgtctgattgctctggctaggtcttccactactatgttgaatagaaatgttgaaagtgggcatcctagtcttgttccagttctcggggggaatgctttcaactttcccttgttcaatataaatgtgggctgtgtgtcataaatggcttttattaccttaaggtatgtcccttctatgcttactttgctgagggttttaatcataaagtgatgctggattttgtcaaatgcattttctgtgtctattgagatgatcgtgtaattttcatttttaattctgtttatgtggtgtatcacatttattgacttacatatgttaaaccatccctgcatccctggtatgaaacctacttgatcatggtaaattatctttttaatatactgttggatctggttcactagtattttgttgaagatttttgcatctatattcatcagggatattggtctgtagttttctttatttgttacattcttccctggttttggtattggggtgattctggattcatagaatgatttagggagaatttactgtttctccgtcttttggaatagtgtcaataggattggtaccaattctttgaatgtctctgatagaattcagctatgaatctgtgcggttctggactttttttgttggcaatttttttgttgccatttcagtctcactgcttgttaattggtctgttcagaggttttatattttcctggtttaatctaagagggttgtatatttccaggaatttatccatctcctctaggttttctagattatccacataaaggcattcatagtaaccttgaataatcttttgtatttctgtggtatcagttgtcatatctcctgtatcataggcaattgagcttatttggatcttttttcttggctaatctcgctaatgctctatcaattttatttattttttcaaagagccagctttttgtttcatttaccttttgtattgttttgttaatattgttatttcagtttcatttagttctgctctgatctttgttatttcttttcttttgctgtgtttgggttcagatttttcttgtttctccagttccttgagttgtgacctcagattgtctatttgggctctatcagactttttgatgtaggtatttaaatgctatgaactttcctcttagcaccacttttgctgtatcccagaggttttgataggttgtgtcactattgtcattaagttcaaataattttttaatttccatcttgatttcattgttgacccaacaatcattcaggagcaggttatttaatttccctgtatttgcatggtttcaagggttccttttggagttgatttctaaaatcaactgtgatccactgtgatctgagagagtacttgatatagttttaattttattgcactgtgatctgagagagtacttgatataattttaattttcttaaatttactgagacttgttttgtggcctatcatatggtctatcctggagaatgttccatgtgctgatgaacagaatgtatattctgtagttgttgggtagaatgttctgtaaatatctgttaaggccatttgttgtaggatatagtttaagtccattgtttctttgttgactttctgtcttaatggcctgtctagtgttgtcagtggagtattaaagtctcccattattattgtgttgctgtctatctcatttattaggtctagtagtaattgttttataaatgtgggagctcctgtgttaggtgcacatatatttatatatatatttatatatttataggtgcatatatatttatatgcacctgctgttatatttaggattgtgatactttcctgttggactagtccttttatcattatatatataaaatacatatatatgtatatatatataaaatacatatatgtgtgtgtgtgtgtgtgtgtgtttgtgtgtgtttatatttagaattgtgatattttcctgttggactagttcttttatcattatataatgttcctcttcttcttttttaactgcatttgctttaaagtttgttttgtcttatgtaagaatagctactcttgctcacttttggtgtccaattgcatgtaaaatctttttccacccctttaccttaagtttatgtgagtccttatgtattagctgagtctcctgaagacagcagaaacttggttggtaaattctaatccattctcccattctgtatattttaagtggagcatttaggtcatttacattcaatgttggtattgagatgtgagattctattctattcatcgtgctatttgttgactgaataccttttttttcattgtgttattgttatataggtcctgtgagatttatgatgtaaggaggttctattttggtgtatttcaatgatttgtttcaggattgagaggtccttttagcagttcttgcagtgctggcttggtagtggctaattctcagcatttgtttgcctggaaagactgtatctttccttcatttatgaagcttagttttgctggataaaaaattactggctgataattgttctgtttaaggaggctacaaataggaccttaatcccttccagcttataagatttgggctgagaaatctgctgttaatctgataggttttcatttataggttatctgatgtttttgactcaaggattctttcctttgtcttgactttacataaactgatgacaatgtgcccaggcaatgatcttttgtgatgaatttcccaggtgttctttgagcttcttgtattcagatgtctagatctctagcaaggccagggaagttttccttgattattccctcaaatatgctttctaaacttgtagatttctcttcttccccgggaagcccaattactttcaggtttggatgtcccaaacttcttggagtctttgttcattttttttttatttttttttatttttctttgatggattgggttaattcgaaagccttgtcttcaagctctgaaattctttcttgtgcttgtttgattctattgtcaagactttccagtgcattttgcatttttttaagtgtccttgattttcagaagttgtgattgtttttcatttatgctacctatttcactgaacaattttgcattcatatcctgtatcatgttttttatttctttaagttggagtgaacctttctctggtgcctccttgattagcttaataattgacctgaattttttttctggcaattcagagatttcatcttggtttagattcattaccagtgagctggtatgatcttttggaggtgttaaagaaccttgttttgtcatattaccagaattgtttttctggttctttctcatttgagtagactatgtcagaggggagatttaggattcaagggctgctgtgagattcttttgtcccacggggtgctcccttgatgtggtattctcctgtttcccctaggaatggggcttcctgaaagccaaacagtagtgatcatttttgcttttctgagtctagtcagccagcagagctaccaggctccaagctggtactggggagtatctggaaagagtcctgtgacgtgatccatcttcggtctttcagctatggattccagcaccggctccagtggaggtagctggggagtgaagcggactctgagtccttggttatgtttctgtttattgcactggttttgtgttggttggcctccagccaggaggtggcaccttcaagagcacatcagctttcatcagtttttcatgtgtcagggagtctgtagcagtgatccagtttcttcgaaaggtctattgattctctcagctttcctggtatgctcctgtggtagttcttagagcaaaagttcatgatgtgagtctgcacaagctgctgtctccccaagtgggatctgcaagctagtcctgcctcctgtctgccatcttcaaaatctcccattttaaatgctatcaaaaatgactgccaatgatttctcccaagaggctgatcttgccagattttgaagttcatgaagtatggccagaattcttgatttggtgcaaaaattttcacgttacctacttttatgtttaaagtgaacttttataaagcaaggatcaacttaattgcttataaattaagatataagggaggaatttggaagttgtttatagtggagagtagagtgctgtctatagacctgttgtattagtccattttcatgatgctgataaagacatacccgaaactgggaagaaaaagaggtttaattggacttacagttccacatggctggggaagcctcagaatcatggcaggaggcaaaaggcacttcttacatggcagcagcaagagagaatgaggaggaagaaaaagcagaaacccctgataaacctatcagttctcgtgagacttattcactatcacaagaatagcaagagaaagaccagcccccatgtttcaattacctcccacttggtccctcccacaacacatgggaattctgggagatacaattcaagttgagatttggatgtgagcacagccaaaccatatcattccacccctaaccccttccaaatctcatgtcctcacatttcaaaaccaatcatgctttcccaacagtcccccaaagtcttcactcatttcagcattaacccaaaagtccacagttcaaagtctcatctgagacaaggcaagtcccttccgcctatgagcctgtaaaatcaaaagggagctagttacttcctataatgggggtacaggtgttaggtaaatatagctgttccagatgggagaaattggccaaaacaaaggagttaagggcccatgcaagtccaaaattcagtggggctgtcaaattttaaagctccaaaatgatctcctttgactccaagtctcatatccaggccatgctgatgcaagaggtgggttcccatggtcttgggcagctctgcccctgtgggtatgcagagtacaccctccctcccagctgctttcataggctggcattcagtgtctgctacttttccaggcacacggtgcaagctgtcagtggatctaccattctggagtcttgaggatggtggccctcttctcacagctccactaggcagtgccccagtagggactctgtgtgggactctgtgtggggtctcccaccccacatttcccttctgcattgccctggctgaggttctccataagggccccgcccctgcagcaaacttttgcctgcacatccaggcgtttccctacatcttctgaaatctaggcggaggttcccaaacctcagttcttgacttctgtgcacccacaggctcaacaccacatagaagctgccacggcttggggcttccaccctctgaaaccacagcccaagctctacattggcccctttcagccatggctggagtgactgggacacagggcaccaagtccctagcgtgggggccctgggcccggcccacgaaaccacttcttcttcctgtgcctccaggcctgtgatgggaggggctgccatgaagacctctgatatgccctggagacattttccccatggtcttgggaattaacactgggatccttgctacttaagcaaatttcaacagccagcttgaatttctccccagaaaatgggtttttcttttctatagcatagtgcggctgcacattttctgaactttgatgctgtttcccttttaaaactgaatgcttttaacagcacccaagtcacctcttgaatgctttgctgcttagaaacttcttccaccagataccctaaatcatctttctcaagctcaaagttccacagatctctagggcaggggcaaaatgccacccagtctctttgctaaaacataacaaaagtcacctttgctccagttcccaacaagttcctcatctccacctgagaccacctcagcctggatcttattatccatatcgctatcagcattttgggcaaagccattcaacaagtctttaggaagttccaaactttcccaccttttcttgtcttcttctgagccctccaaactgttccagcctctgcctattatgcagttccaaagtcactcccacattttcaggtatcttttcagcaatgccccactctactggtaccaatttactgtattagtctgttttcatgctgctgataaagacatacctgaaactggaaacaaaaagagatttaattggacttatagttccacatggctggagaagcctcagaatcatggcgggaggcaaaaggcacttcttacatggcagcaacaagagaaaatgaggaggaagccaaagcagaaacccctgataaacccatcagatctcatgagacttattcactatcacaagaatagcacaggaaagaccggctgcatgattcaattacctccccctgggtccttcccacaacacatgggaattctgggagatacaattcaagttgagatttgggtgggggcacaggcaaaccatatagcctgtgctttatctgaggtcatgcctgatcacaggtgacatacctgagttagctatgtgcagttcagcctaaagaatctggaaatcatgacctcaggaaaatcactatggggaattgcagatgatacaccctctagccatcacaccacttacttttgcatggagatgtatgttttccaaagagacggccccttcattttcccattttgtgctcatgacagcctttctcagatgcacagactgaggctcagagatcaagtgcctggttcaaagtctcagagctgaatactattacctaagtttgttgatgccttaagcatgacttttaccactccgccatggtgtctttataaactatatatgtatgtacatacacatacatattcacatatgaacacccaaatataatataatttatacatagaggttttaaaaattggtaaaactgttatcctactttttttacttctgtattcctacatttgaacttcgtcaccctggcttcactcttcgaagcttttaaaagaatcaacaaagccgagaacattgtttttattaaataaggactttcatcaatatcattttaaaaaacaaaaataagcccctgaataggtaggtgtgtgacaaaactagaaagagcagcatacacttacattggctactgcatctgcacctttaacttctaatatgttagtgatagtgtatgtaatcaccagcttggagggcttagcaatagcgtgtgcatgctacatattttcaaaggcctatactgggctgtagtatatatagtgggctgtagaaccttataggaatctattatgggtacccacatccctacagcagctggccaccctgaaaattcctgttcacatttgtcaactatgagaccccatatgtaacccatcacaaatgtgatgagaatcacatttctcttccaaagagacaaatgtcccttccaaagagggtattgggccaggatagttgcagccccagaatcttctaaggtaaacttttggcacctgcaaactcttgctacttctctctcaacttcatcctcattgaccatggttacatatacatattttaattttatctttatcatagacagtgttgagagacccacagatgccctttcactttcagtggaagaaatctagaccagaacagagtagagatctctcagcgtgcagatggctggcagaggcaatgaggagaagggaagtgagctgggcttcagagttgtgtagacccagaccctagtcctgttcctgtcctcactagctgcatattgttgggccttcatacacaacctataaaaataaagcaatggaaatgccacacagactgctgagatcataagaggagagaaaagtttcaatatgagctccacagccagtgaattatatacccatcccaactcaacatttattcattctttccaatgaagttatctattatccctacttccctgttataataatattttaactataaaaggtaatgttcttttattaataaagcgaggaagcatccaggaaattgcctaatggtgcataagagttcaatcatttttaatcccttcctaccttttttccttcctattcaaatgtaagaatacagaagtaaaaaagtagaatcaggatgaaaattcaagtttctgacttctcatacaatggcttttctcgtgtgtgtgtgtgtgcgcgcgcgcacgcatgtgtgtttgtatatccactgacaaactctttcaaacttagtttgattttttcctcaattcattttttttctttcaaattaccctttgtctatatgagaaggggaaaaatcatgctcagtggcttcatttggtttagctagctttgtgtgatttcagaatcttagaaattgtctccacatcattacttcacatcaaagagaagtagcatgtgaaagtaatgaaaatacatcatgttatttttttttttaattctactatggagcattgacttcttcaaatcatcgtgatttcttagattttgaagccacagatttcaataatggcactaaggatgtataatttatgcattcctttgattgtggaactcaatattccaaacatgtgatcattcaggccattatttatgtgtttagtcagttgcctttgcattgaatcactacatgaaactatggctaaattgttatgcttccacactcctattattacatgtgtttaggtatatgatggcaggcatttctgggttatatatgtgaggtaaaagcagtaacagaaatctgaagcatctgtcaggataactaagcattcacagaggctgtcgtgggtcacccggggaggcatggtgaaaactcattctataaggaggaggcagaggccaacacaagctattaatagggagagaagtccacaagcaaaattataaaggtcaagaggcacagctaacttagttcttgtccagatagatttcaacatctactttgaggagagtaggaggatatgaagagccagtagcagagacagagagagtggctcccagaatcagctttcagccagcatcctaggtcaggcaggagtctgatggaacagtatctggcctgcacttcagggtacctgggaggttggagagttctagatgcagtcacattagaacattggaataaaaagcaaggctagccagctggaagcccatacataaagacctgtaggcagacttgaacctggtggtcatgcaggcctccaggagtcaggggccacgtaaagaagtccatgtctttccatagaattaaaggggcgaagccccagtattctcttggcctggacatttgtcctgcccaggcctgggtaggctaatctttcctgatggacagtgatgtactttgtaccaagcacttcactgaccacagggacccagaggtaaagaaaccaccatttcatgtcaagtcccacataatagaagaggagatgtcctgttgtaataggtgctctgagaacgatgaggggacagagaagagtggtgggttccctgtggagggaaggagggtgtgtgtgcaggaggctttggaaagtacttagaggtggttcatagaaagtaagactgtttaccagtcaaacaagaaaggcagggaaggcagcatgagccgccctcaagaggcgtgacccagccacccttaccagaaaccataaatgatctgataaagcaaaggaggaacccaaggtttcatgttgaaaatgaagcaaggaaagtagggaggggttgcatggtggagacctgcttcagtgatctccatgtgattctgtttcttccttgtgttagtgtatattcaaggacaaaccgctgatgaatagagctaactgcattattaggcctgtttttattgtctagcaccagttttgttatagcctttagtttaaaagtactgactctgtcatcattattactgtttgcatcatccttagcccttaaattcctcttgtctgccttggcactgaaaattatccattgcttttgctctcctctctccagctttaagacccttctgtgacatgatcatttgaccttctctgggctctgcacaacttttgatgcaggcatccctcacagcctcctctccgagccatgcccctgtactggtggacgttgagaggagtccaatagctaaacctggaaaagcagaggcctagaaattctttggactatcttgcctgtatttaccttagaatcacttatagatactttatataatctaagtaatatttatggacatttctatatatgtagttacagatttttaaaaaattttttcttaaatcatagtaaagagtcttttttctctaatttatactaatttcatcaaataaattataggactaattttatacttgtgtaatctggaagcagactaattattaacaagaattttaactgttgttcattgttgatctaagtactgtactgattacatttcttttcttatacaagtttatgtttactcattctccaaattatttttgtagttaagtaatctcaatagtaaatcaccattttatcctgttttatctttaactctgacatttatgaaattggattgaggattaagcaatgcttcaatggcaaaatcttatcaaaatgagtccagccaattattttacagatatatgtaattaatttcattttttaaaaaaaaaaagttgatgcatgctatttagtgtagtaggttcagccaccagcactgagaaaagcttttcaatattttcttccaacatttatgtacagatgtctttgtgctccaatatttggctctctgtggacagcttgcttaagcatagtggtaaatgataccacgctcataaaagagcccactgcctacctcctaatcagtgttgtattggattacattgatccattccaaactctatttgaacatcgtgactaaaatttttaataattttcagctgtaactcataaaactgttttaatttagcccagaacttcaaatgccccgggaagaactgatgacttatgtgatgagctagccccatgttttcgcaacatctccgtatccaaagagccacatcattccaagggatgacttgaccctgtttccagagacttcattttttaatctgctttttgtgacagtagttcatgagaatagtttaaaggcagatagtactgaaagttctacaacagaaactgtctcgtcccagattcgcgtctgaaaggcaaccacttttgtcctctttcattgcttcttctgtcatttatttcagcattcctaaatgctgtgcttctgctgctgtttattgattttgttggcctcctgctacagaagatgagggttgagctctcacatctccagcaacaccctttgtttctttcttccttgttgtcaccttccacaaagagtcatatcacaatctttgctcccttacttccatcttcccaagagttttatcacaattttgtgatacatggccaatttatgccctattgtgactattgttaacttctgattcaagtattgtacatttcttacaatcttaaacatattttatttttcctcaaattaaaaattgccttttttacttcctaaacatttcatgtatctataattatttttttcatatgccttcacagatttgtcaaatgacatatcatatactcaaaggtatcaataaacttttatttatttatttacttattttattgagacggaatctcactccgtcactgaggcaggagtgcagtggcacaatctcagctcactgcagcctctgtctcctgggttcaagtgattctcatgcctcagtctcccgagtaactgggactacaggcacacgtaacgatgcccggctaatttttgaatatttagtagagatgggttttttggccaggctggtttcaaactcctgacctcaagtgatctgcccacctcagcttcccaaagtgctgggattacaggcatgaaccaccgcacccggctagtttttgaatttgtagtagagatggagtttcaccatgttgcccagactggtctctaactcctggcctcaaactcctggcctccacccatcttggcctcccaaagtcctgggattatacacatgaaccactgtgtctggctatcaataaacttttaagtgctatttttttccaagtctgctgccttacttcttttgacgctccagtgtacaggtactacagagttatcatagtgggataccgcttacctttcctcagtgtcagttgtcagttcttctgttatgtactggatctgatattttcctctgtcttgatttagtctctcatttttctgagtcatattctctagaaatttcctaagaaaacgtatgtgtaaagtaaatattctgaacccctcaagattggaaaatatctttattctaccttcatacatgttaataatttggctgggtataaaattctgggttgcaaatctttttttttctcagaaaattttaacagcttctgaaatttcatcttcttctagtttccaagttgctactgagaaattcaatcttcctatcatctattaagttgcttaccgtatctccacttgccttttatcttccaaatatatgttaaactctcatctactcttgctatttctcccaataactttgttcttcagagtatatgctttgtttttaaattcctggactgtaattttagtagggtgttggtaggactaagtgggaaatttatatgaacagtccaccattgtttacccaaagttcagtggcatctttgtttccaggtatttaaacccatgcaatccttttgcataaattatcatactattctattagcaactctgagagtaggtagtactagtcccatttaatgatttagctgaggttccagaaatactagtagttttcttaaatttaaagagccagactgagacagattcaaatttaaaactatgttttttcctactctactcaggcataagggtcacttgcagcaatgactttgtgatggggatcactagtgataaaacaagtcagaccatggcttctccatatcttgctacaataaactaatgccactgctgtgatgtgaattattcctttgaactattctctgagctgcagaacacaagctttcctcttcaatcattcttgttattccagagtggacattgaaacatcagaaaccaaataattgctggtagtctggttcatacaaacagtgtactacatgtataagaacagacaaggaaactgaaatcatggtgtttgggtctgaataaaatatatatattttaacatataatgatgctatttcagagtccagcacacaatgaaataacttcctctttgaagcttttacttaaattcccacatagagcacaaatagcattctctaatttgaaaacgaaaagtaagtaattgctttcaaagtccagtcttttaaaaacatagcagtctttcagctaagtagttattctcaaaaaggaaaagggacttttcaatgagtatttataaacaagcatacatgcccaataatttatagtgtgtttatgtgtcacttcaactttctgtgaagtgattatgacagcagacacacatcatgttaaatgatgccatcctgaagaaagttttcaggtaacatacctcctgaagggttttaaactcttttctcattcagaggtttgcctgttgcttttccaggttgcatgccaggttcttacccccccttattttatcatccagttagccccaacgtcatcttcatgtaggttaaacaacccaaataaaaggaggaaatatttaggacaagcaatgaaagagtgaaactaggcaggaccttctccaacctggggcaaatcttctaccacttggacccttaggtatctcatctttgaaatgaaataatacaaatagatcttcaagttccccctttcagctcttgaatactatttatgcatcgttgattaatcaacttccacgaattatctcaaaccagccaccactgcttcagttcatgagtgaccatgaaaaatgttttcatcaggcatcatgctcaagagctgggaatatcgaggcaaattaacagacacagtccttagcctcattgagttcatggtccagagggaaaggcagactaaaacaaactttcaaataaataataattgtgataaatgatgtgaaagataaccacagagtgttgggagaaaaagtaagaggaaaaggataatttagacaggggtgggaaatgttttcaagaaagcttcattgaaatgccaagagatccacagactgaggggttgctagccaactgaagagtgatggaaacagcattccaagcatatgaagcagcatgtgtagagagctgaggaattaaagagctcgagtattcaaggaactataagaagaccacatggctaaagcatggagggattggcctgagattaagttaaaggtgggctcccaaagcctgcagagcctcgccagtatgatgagcaccttataatacatcagaaaggcagagagaacctgctgaaagatgtttaagcaagaaatagagatgatttgattacatttttaaaacattaccccaccactgcacacacattgagttggaggaggacaaaaagagatgaagcagtgagactggctagatggtgaagcaattgtagagaagagggtggattttgtaatcttgggacatcctcactttgggtctgtggatggctgtgctgtacagtggggtatcttgacttcatgtctcatactacctggacatattcattcctgtatctcccctctaaagagacttactttgttgaaatcctgttgtctctccaggttgtcatcttgcatagcattctacataatccatatctgatccatgagaatcacatacttgttggactcaccaacccttttcctaacaatcttttggagtgcaggccttgttcacacagctgtctcctcagtaggctgacaggacccctggccacccacgtctcttatttttagttttttccaagaatgggtatggccacagccatatgtcccacagactcacataggtcaagctgttaaaatagtctccttgaaaccctctcaggactgaggagacaacagagcacaccccatccttctcatcatggtaaaggaggagggataagactgatagtgcctcaacaactctgcaaagaaatactctctccactacctcacctttcttcctcttttctaatacatgagatgcttggtcatctaagagtggcaaaaatacattttggcacctttttgagacttgcctgggaacctaccatcttactttgggatatcagagcagatggcattctcttgtctgtgactagatgaaggcagaacacacccattttaacatccgtcttaagctttatccagccactttctgaaataatgaacaccggtgtgcagcacctgccatcttcctgaagcccccacaccctgccctcttattaggcctcccagttcctctccagtgctcctgccttgggcctttgtgcatgaagataccaggatggctctctgccttttcttctcagccttctttcttctcactccatgatagcaccctgtcccaagaagctaagtgactcaccgcagccacaatttcattatcattcgcatcttcttcctctttccccaggctggggttggcatctgattgagtcctctctccccttctttagaagactgtcagccccactctcacacagacctgcccttcccccttaatcagtcattttcctgagaatttatccaacggctcagttcctgtgatagaaatacagaagaaaatacatcaaatttcgggacttgcactactcagtaagacacagaaaagtagaattgagtaacctacatgaaaagcaaagaaaatggaattcactagcttgaattgagagaacaaagggcatggaggaggcttagagttcctggagtagtgaataggaaagatggagataaaccagagtgtataccttaggtagaaaatgcaggagaaagcaaaagaatctaccatatatattttttttctattttgaaagcttcatgaaaaagttgtaggaaagaattacctggggaacctcattttctgtgattttagactaatcagcaggaaatggcaggttgtatcctaaccaaagtttgccatgtacctgacaggaacaaatgctaagcatggactgcgctgcaaagcctgtaagatgagcatccaccacaagtgcacagatggcctggcaccccagcggtgcatgggcaagctggtaagggcttgtgccaggagtgaggcccacacctctctgctagggcacttgcctgctgcagtgagatcaccccctccaaaatccttccctgaaaccctgagcaaagcaccccagaactggctgccagcttggcttcctaattggcgtaatcagaaaacaaggacaagggctttgtcaacccaatcaacaatgccccaccttgaaagggagtcagggtcattaacagagtgaccaacttctcccaggttggcactttctcagttttaatactgaaagtcccacatcctgggtctgttcaggttttaaaagtgaaagtcatgcatctcaggaaccccctaagtcccaggcaaactaatggttggtcactctagtgcttccttggtggtcagctcagtgggtagcaagagaggacaagagctaagcccccacaaaagaggagagagtaataaatatctgcaccactttaacagaatctcccaaaccaagggagattgaatggcccttgagatggctgatcataccatctcaggaggatgggcttcagtcctggtgccacatattgattaagaggcaattcaagccaggcacaatggctcacgcctataatcccaacactttggacaccaaggtgggttgatcccttaagcccaggagttcgagaccagcctgggcaacatggcatgaccctgtctctacaaaaatttaaaaattagctgagtgtggtggtgtgtgcctgtagttccagctactcaggaggctgagattagaggatcgcttgagcccagaaggcagaggtttcagtaagccattattgcgcaactgtactctagcttgggtgacagtgagaacctgtctcaaaaattttttttcaaaaagcaatccagagcgcatttgagggtgtttgaaactaggatggccaaagaattgtagaaaggacgaagaatgtctaccctagagaataattagacaggacatcaacagctgtcttcaacaattttagacctaaaatttagaagagtaactccattgtcctttgaggctcctggggaaagacctaagatcagtggatactaagtcttaacaataaaagataatgtcttgcttccagggttagtgaatgctccttcaccccctcccatcactgacagtgtaacgacaagggacaccactttccaggaacattagacaggattctggaattctagaagggactgggccaccaagttcccatccagtaatggagtacagtcaagtccaggttcttagtttatctatttactctgatttgcaatgtctcttttctcaaacctctgcctcccctgcttccccttctccttctccagtggtgattcccataagccaagacagaccatgaaggagaggtcagaaaaacagagaatagaatccagattacagagcaaatgattctggctaaagctcttcagatatacaggagcttttaggcctccctctgaggtccacttacccatgcccaggccttttatttatattattttaacaaaccacaataacaaactgtggtgaaataatatgtggcagtccacttgtaatccaggaggcaatgaggatctgggatgcaaaggaggctgcagtgcactgcaggaggaggacagacacgactggggaggccagggccaggaccttgttttctggatagagtgtaacttgctagttgccactattcctccctgcctctgtgtccctgctgggattaaattgtggaattataggataagtcggcatgttaatgggagacaggagggtgctcctggagaaaccaattggttttatttagggagctcttgtatggttttctccatctccagtgacattaaccccttgccttcctcattctctctccagccaaaggggtttcggcgttactacagctcccccttgctcattcatgaacagtttggctgcattaaagaagttatgcccattggtgagttgggacattgatgggttgagttgagtttgaagcagcaaagttaacattaatggctactgtcctcccatggctgcaaaacccgtggggtatctctgtgtgtttgtttggtggctatttggggtatgactgtgtgttttgctggaagggaaacataaagtggaccaaattctccaggaattttcatcctctccctgatgaagctcagaaaacacctaaatcccaaaggctactgattagtaattccaccatcagcagcatggtggagtggaaagaacacggagaatggcttcccccagaccaggctctaagcccagctccctattgacaactgtgtgtctttgaacaagttacttgacctgtcaacccccacaaaatgagaacagcaattgctgcttttcataattgctataaaaaataaatataggttattcacccatgcttagtaggagctcagtgaatatattattctctaatgcagatcaaaagatgccctctatttattgatagctttggcttggattcttctctaacaatatctttcagtttacttctattattttttttctctctctgaaaatctcgacatctatttttgctttttttagggggggcaagttttaaactagaaatttataagttagaaagcttttaattagaaattaatgaagcccagtagtgacaagttatttctaaaacagttgcctcctactgcaaactttgtgtctcaagtctttgtaccttggtgagcacagcctcccagtagaggagataaagctgatccctgcaagaacctggaaatcagagaggaataacgaaagaggaaattcaatcaggaagaattcgggagcagagtactagctggtacatggcaggacctgcaaatgggagcatgctgggtgggggtgcatctgtgaggaacacttggccatgaaagccctgtctacccagaggctaagttcctctgcacagagcctgcttctcaggcgctgttcacccaggagatgtggtaggcagttggctgggtcctctcagatgagcttcctcagatgaactttctcttctgttgcagcctgtggcaataaggtggaccctgtctacgagaccctccgcttcggcacctccctggcccagaggacaaagaagggcagctccggcagtggctctgactcacctcacagaacctctgtaattatcctcttccttcctcggtttgtctgtggtggtcttgggcagagcgggcctcaggcactgcagtatggggtattccacctgactgcctcatgagggcaggtctgcagggagtcaggcacctgccaaagagaaacccaaagtgctttgagccactaaggattaacttcctgttgtcaacaccaagggattattttactttcctgtccaaagaccatccccttggcctcatgctccttgacccttcccatggaccccctctcctttaccctcccaccaacattagataacatatgagtcaacatacagaaatgtttggctcaaacaatggtcaggaacttggaaatcctggctatttccagttttccgtttagctacattccagttcaaagacacagctatttctcacatcttttgtcttttctctctaagagagggcacacctcttgattgcacacaaaaactgcactctcaaagttacttgaactgtgactctgtgggacactcactcttccaagcacctctcctaagttctatctgacttaaactgagtgttccatgcatctctgtgacctgttatcatcatcttgtctctggttgtttcaatcagaatttctataaatgctccaagatgccatacaactctgcagcccatgctgaaagccaccattcctccagcaaagaggcaaggaccttccagttcacatggccacttaggatagccagctcctagtttccatttccattgttgcagcccctgctggactggaagcttctaggcaagacacagatgagccttcaaatggtctgccccactgagtcctctcaacatcaagtgactaggtggattgtgggaagaggggcagggcacatgcctgggaggggttctcagagactgagttgaagcagcttcctcattgggtgcaggttaagccacaagattgtaggtaggtgaataggaatgtaggtcgggtaggcaagtaggtgggtttataggtcctctattgggtgcagtttaagccacaagattgtaggtaggtgaataggtcgggtaggcaagtaggtaggattataggtcctctgcctgatgccatgtggctatcctcaaagccatctttaaactcactgaaagccctgttcttcatgcatccactgatttctaagaggaaagaactaaaaataatttttactctttttccttactgtacataaaattgacatcagatagttctttcttctactcagttagcagacatgaatgaagggcctacagtttactagcactgtaggggacacaaaagaagaggaagtcatagcttttacccttagaattcacaacttatttctgaagaccaaaccaatagcgaagaaatttgacaatggtggcattgtttaccatttttaaaaaaatacacttttatatgtcttatcccattttattaagattgagaacgtaacatacacgtgttaaggatattataatgactgtgtcatatgagtactgaagcatttcatagtaaagatgaaaaatgtttcacttcggtagacattgcctcaaagcagtgaggggataatgtgtgtcattttaagatacctgatgacctccttagggaggagatcattgttatttggcatccacaagataatgctaattcttttactgaaagaaggataaaaatggtgctaaatgtgatgaaaatatacaaagcatacatgggtaggatttatatgtaaataaaggctgcttaggttgggtaacaataatatacataaagtgtttagcacagggcctgacataattgacactcaatgaatggaaattgttactgttctatattttaattcatttaaaaatattttttgagagatggggtcttgctctattgcccaggctggcctcaaactcctggagtcaaatgatcctcctgtctgagtgtactgagtagctgggattacaggtgcatgccactgcacccagctgtttcattttcattacgcatctagccttaacagtgttttctttgaacctgaattattgtgaagttaaacaaggaagtaatccattaacaaggcaaatatgttacctgagaagggcatttcccagagccactcatgcttgggcagtgttagaaacccctgacttactcgagggtaacttcgctgttctgctcagcccatctccttctctgatgtgtcctcctgtaactccttaagttggagtgttcccaggggtctgcttttgcttggtcttcttattctactctctttggttgatctctgtcacattcctttagttcaagcaccgtctctacattgatgactcccttaggtatttcctcttgcccaagcaccaaaccagtcctacagatattgcaaatcagcagattcagactaaactcatattccacgagtgattaggtcctataattcaaaactgagaaataatatcaaagatacccttagtatttatcaccagtactagaggtttgaacctcattatctctcacctagattattataaagaaataaccgtgctacccttttcagcctacccttgacagtaccccctgatttatcgacccttaaagaaaggctttgcgccacttccctaattaaaatcctctattaagttgcttatgtcagaacaacgatgcccaaactcttaggcatgggatatgagtcctgccattaccctaaaaacccactttcccctgaactccccaagccctataacatatccattccttagaacatgttgctccaccgagttgaaattttttaagacccactctatttttatacaaacaatgaagagtccccagactcccccatgcatggtgagttgctcctcccacaagccttcaagaattcctttcttatagaatatatatgattgcattgtaatcatctgcttttgtgtctattccctgaataaatactgagtatctagtgagtatctaggtcccgttccttattcatctcattacatcagggactcatagagtgcctggcacatagtgaatactcaagaaatgtgtgaagaatgaggaagaattaacaagggacttttgaagactgacctcagaatcctccgggatccgcacaacacttcatttctcacaccttaagctctgggcacagtttgccgttttctgcatagccatgctctgtccagacattcaaactatctccacctctgtcagacaacatctgtccaagcttctgggtctggttgggcacccacctcttccctggtgccccggagcatccagttcattaatccattagttatatattgcttagtaattttcacttttttgtttgatttttctctcactttcccagtcctctcctcaattagactaacctccttaaatgcaaggattcttttattcacagctttgtgttttcattactttataccagtgattctcaaatgctggggcatatcagaatcccctggagaattctgtaacactataaaggcccaggttctgccagccctttgtagagtgtcaatacatatgtggtgagtgcacgaatcaatgaatgaatgagcaccctcctcagtcaaaactgcctaaacttctgtaatagagggctggcaatgagctaaatcagtggttctcagtgtgtggtctccggatctgcagcatcagcatcacctggaaacttgttagaaatgcaaatttgggtttctgtctctcagaactgcaaaatctgaaaatctgatttggggagccgaacgatttccattttaaaaacccctccaggtgattctgatgcacattaaagttggagaattactgagttaaattaaaaactaaagtttgcttccaaagaaatcagccctctgtctctctcctcttcacctttgctcttactccctctctgtgtgaacagcatttgagtgacacatttacagtggccacaagcctggatctgaagtttgaaacagagatccaagaatgctaatcatctccctaaccccacgtaccacgttgcatctcctttctcaggggagtgaggagggccattgctgtcaatgagttgcttccccaaagccacacagagctcactctcagcttgcaaccatctccccttacaagtcaagactgtttgtagatgccacccagcaatcaaaggaaaagcacaaacaaaactggtcagagtagagagatctctgtccactttgaccagcattctgaacaagcctttctcaaatctttgatgagagccagtaggtcatctcacttcagtgcaagcctcttccatgcttgtgggaggctggcattggtggaagggcaactgaaaagccagcacatagaggcaattgcagagagacggctccacagagatggctctgatctatctgcacgagcagtagatggctgctcctgtggttctgagctttgctgacctatgacaaacagacctccttggaaacattccatagtaggcaatgaacatgtcagcctcctcatttgaggctgatgctaagaagcagcaagaccaccagagggacaattggggatgtcccagtttgctttcatctctaatatagctttgtctttagcaacatctggaccctacagactggttttaggagcaaaaagcatagttttctgaatgtcaaagggatgtccatttatcaccgtccacttatactggcactggttccaccagtagatatttgttggagtttagctctgtgaaggcattgttctgagagctgcagggagacaaagacaaaccaaattgtacttaaagatctgtcacttcactctttccccaaagtccaaccatcctcaaaggaagaaaatagaaacattgattggtattttaaagtgattttgcttcctgccagcaggtcagtaataatgaacttcagcatcctgcattttttattttatttttagtattcttatgtcctaaagttaacatatgcctgcatagcaaagctttgttccacagctttattttcttccaaggctgccgaggcatttgttttacattgttgagaagtcactgcctggctgtttccaaattgttatgttttcctcaatgtactttcaaatgttctaaaatataaaaggcttgatggctttgggaaagctaaaagaaaccaaattcaaacaacattctcggagttagttggctagtttatgaataatcttcagtttcataagattaaattaacaaatgaaattctgtacaaaccaacttctgtacagaaattgtgagcttcaaagggagcaggacatgagtgacttagagaccctgtgacttttttttcttctttctgctgtgtcatgatagtagcagtgtttgaaaaaaaatcttaaagctaaattgtaacaaaaatcagtctctggagggtggtgctaaagggctctagagctggctaggagagctaagaagataatttgtccctctccgataagatgtaaataaataattttttaaaatatgactgtcaggccaggtctggtggctcacgcctataatcccagcactttgggaggctgaggcaggcagatcacctgaggtcaggagttcgagataagcctggccaacacagtgaaatcctgtctctaccaaaaatacaaaaattagccaggcatggtggtgcatgcctgtaatcctggctacttgagaagctgaggcacaagaatcgcttgaacccaggaaatggagctgagattgcaccactgcactccagcctgggtgacagagcaagactccatctcaagaaaaaaaaaaaaaaaaaaaaaaaaaaatatatatatatatatatatatatatatatatatatgtgactgtcctcagaggccccctaaattcctcttgtgaagaggatagagccagttagactgaagctgggtcacgtggccctttgaaagaggcattcagtgtggtatgctagtaaatgtttaacaaccaagtcagaactggaccctgatttgaagcgtttgccagttccatggagtaaaactcctgtggtgatccatttcatgccaccagtgtgataaccatgagactctcaccagcccacaaagatgctttagcacaccaatgaataaagcacaatgcttaagagcacgagctctggaggcaacgcctgtgattcacagccccagctccaccatgtattaactatggggcctcaaacagagctactgattctctccgggcttcagattcctctctgaaaaattggtctatcataggattaatttggggaataaatgagatggtatctataaagtccttaaaaacattacatggtaagtgatcaggaagcattagctatttagagtgtgttattgttattattgttgtttttgttcttgttatttctgtaacctaagtggaagaatgattgtgactcactttaaaaagagagtcaggatacatattataaaaacaattaattttgcagcagtggaaacagtatttaacttgtacctaagtagtgcatccctccatagtgcatcccattctctaaaactaatatttaaaacacctgtagaaagagctagcgttttattgaaagttttaagtgacaggatatggacaggcattctgatttctctttgttgcctattcctgggaagaagcctggctgtggcctttgcttctagacattcatgaatattcaatactcactggatacctaccatcaccaagcctgagcctgctatagacacctgaagggaggtacagtgcccacgagtggacatagcttctctgaagttagccaaacagccaagacagcaatcactgggtccttatgtgtcatgcaaattctacctaagctctcttacaccaaagtatctgctcaattgaccacagatataacattgttcatcccatgctctttcttctttcctccaagacttcagatcttgtggaggttcctgaggaagccaatgggccaggaggcgggtatgacctaaggaaacgcagcaacagcggtgagtgagggagttggcacagcacaaatgtgatcacatgagtcagggtcagtgggcaggccaagttgatttccagtccccttgctttctctgctagctctggaatttaatcagggcgagtgttcaatgttctggagagaatgtgagcattgtttctggtggatttcagtgatttgctctaatatgttcctgagttctatatcctgagttctcatactttatgagagtatatttactcttatgagagtatatatacatatatatatatataaactgagctgtattggggtttaagagtcgcttccagaactttttgtgaatacgtcattttctccactgagctagattagattacattagcaaaccgtaccacagagaagctaatttgtgctacaccttaggtacctgaaaccaagtggtggtggggcccaggagagaagtgtgggcctcacatttggctccttccccagcagagacaactaagaagctcaaaaaactgatatgtacaatccagccaaacattctatattaaaattatttaatctaataatttaagcctttgttataataatttctaaagtatttattaaatgctaacttcatacttccacttgctgacattaagaaagagccacctctggccgggcgcggtggctcacgcttgtaatcccagcactttgggaggccgaggcgggcggatcacgaggtcaggagatcgagaccatcctggctaacacggtgaaaccccgtctctactaaaaatacaaaaaaaattagccgggcgtgatggtgggcgcctgtagtcccagctactcgggaggctgaggcaggagaatggcgtgaaccctggaggcggagcttgcagtgagccgagatcgcgccactgcactcccgcctgggccacagagcgagactccgtctcaaaaaaaaaaaaaaaaaaaaaaagaaagagccacctcgtaatccagagcttaaagacatgtgaccagatccttatggatgcattcttgctaggccttttggacatcaataactacttaaccttcactagtttatcaaaaaatatttatgaagcatttactatcattagcaaaagtgtattagtcaaagtcctgcaggacctgagttgcattgttaacttgagctgaatgcattctcatggcagaagttatccctccaaactccactccaagccctgccttttccagcctggatgcagaaattcctcattcgataccacatagcagttttgtcaacagctgtctgatgaggtatcacttttacttccttcactctgggaattcatttatggctcttctttagttaggactatgcctgtgtgattcccacaaggcaccatgtgctcagctgccccaggattttccttcctaaataagtgccagtgttcaccatgcccccccttgccagacccacacacatctactaaagctcaccactggggtaaggattctttggcatcacatgagggaaactgtacttttagataatgcaaacaaccactgagcacttagcagtgccattagagagacaaattagagggtattggcttcgaggggaacttcatagcaggtcagcagcacagcagggccatcccagcccaactgtctggcactgcaagaccagcaactgaatttaaacagcaaccctaaagtttctcaatatctgactcaccagagacttgcatgataatgctttaagtgtgatcagctgctcagtcctgagtctgacctctgctttcccctttcccctgacactcttctcatcaacatcactgctggccttctcctcactaactgcgctggaaacatttggtccttggcccattgttgctctggaagcagagtgctagacttcacttaatgctcatgtgatcccaaagcagtgacctagcctctctctgcttcaatcacctcatctctaaaatgaagataataacaccaaatccatagggttcttatgatctttggatgacataatgaatgtaaatactatccatacattgatgattcaaacttcatcttcagtattaggcttccttgctgcctccagatgcctatcacctattggacattgccatctgaatgcagaatagtcatctttaagttaacctacccaaactttactcttgatcccctcacccagccacacattcagactggctcttcccacagttgtctctgctcagtaaataggaacttcattcaaccagttgattaggccaaagtctttgacatcagccctgactccctcttcctctcacacctcagacgtaatccatcagcaaactctatctgctgcttctcaaaattatgcccagcatgtgctcactgcttaactctctgcctcagccatcctggcctggctctgtctatgctgttgctcaccaattccttgaggagttagaacacaatttacactgagggtttcttctctcaaaaggtggtcttaataggattttaaaataggaagggctatatttagcaatcattgctatgtagcatcactgctattagcaaagccatcatacagtcataaagtgtcagagatgcaggtagagcctcactaccctaaatgtggctcatggacaactcacgtgagcatcacttgaaagcctgttagaaatagcaagtttcaggccattccacacctgctgaatcaggatctgcatatgaatctgtggttcataggctcattaaagtttaagaagtaggactagaggtcacttagtccaattccctccccttcaatacacacacatgcacacaatatcccccgtatagataaggaaactaagtcacagagtagtacacacaaagacatcaagttgacaattttccatctcttctgtgttaaggggcattttcacagcctttctcaaagagatctggtgaaagaactgagcaagcaataaactcccaaaaagtgttggagatgtattaacaactcttttgatcagcaatagctttctctacaatgcaccctgagaagctaggtggattaattatgcagcaatttgcttcaaaacactttcccttgattggctttaatgtcctgtccatgcagtttgagaaaccacatggagaaaacaccctacatatgtggtccaagttcccacagatcttctcactcatgcaaggagggtgttgctgttcagaagcagtgtctaggattacagtcacaaccagttctgcattacatgttcatttatgtcttaaaaaatgcagtgcatacaggtgtcatttcttccagccagctattatgtcaaattccttgaggaatatctccaaagccaccttggaaggaagtacaattcatactaatttctttactgctaagagtacagtctctcctttctctcttataaatgatccttggcaggtctgagtatttatggttgttgttttgaacactattcctggatgcatcataaatatacatggaggaaattgttggtcttcacctttggcttaactgctagaagcttcactcataacaaagtaacaagcaaagagagaagtaaaatctcgcctgaagtaaaatctggcctgcctatttcagctccaaatgccaaataataatgttattggctgccttcagtaattgcatttcagaatgactctgtgtgatcataattttcctggaagagagacagaagaggacataagcaatacaaattcctagaattttcttcaaaaagggctgggttaaccacagccacttaaggatattacaaaatcgaatattacctcactttgcactaaagcaattttattctaaaaaaaaaaaggcaagctcagatctggaaaatatatcctagcctttagcatgtactaattcaatatctcaaattttaaggtgtcaaaaagagcagatattttcctggttaagttggcagatgcccctggttttggtaccactccagtggatatttctacattacagatgcaaatatttgtggtatgtttctgcaacacatgctttgtatcaagttcaggtaaagatctttttaaagttgaacagaagattccctttccagcattgtggagaactggacattcagaggaatttttcccagtttagcactcctaaaactgttaagagaaagaattgttctaaaaaaaattctagttaatgcatggctgagctggcagcaaaataaggcaattccttagagtctaggaatggcaataaaacatgaattcagagatacaagcaggtaaaggatttactatgcacatccctagagccttagcttgggaaataataggccccatttatgaacaatagacaataaaatggggagtggccagggtattaggttggatgaaagacccttttgaaacatattaataccccaaaagatacccttaggatcactggacaaacaggattccctgcagaggaatatgctataccagccttaactcaggtggaaaagaatggaaacaaaaaagtggagaggaaaggaaagaaagaaagaaagacaggcagaaaaaaggaagggagggagagaagaaaggaaagaaaggaggaaagaaagaaacagtcttcttacttggattttagggcctgaattcatactacctgtatgggcaaataatataataatatgaaattttagtttaatgtagtttaaagtggcccaggtacagtaagatcaccaggcatttggcagaaacaaatataaaccctctctagaggaagaaaattttaaaccagacctcaaaaacttctcagaaatgaacactcaaagaacacaagctaacaatcaaaattcaccaaacacatgagaaaatgagccgtgatgagtaagtattagcagaaacaaccaactttatggtcagattttcaagactgtacatgtaagaattatcaaattaagaaatatataactatataattgtatacatttaaaatgttaaaaatggaccataaaacataacaaaggaaaaagagactatcagaagtaaacaggcaagcttgaggaaagtcaaatagaacttcgagaattttttttaagtagaaatttgattgatgggtttaacaacatattaggcataaagagagaattagttccctaaaatatagaaccaaagaaatgttagggtatagttaggaagccaaagcagtagaatttgtgagattaaaagtgacatgaaagatgaataagtccaacatgcatctaagtgacaatttagaagtacataaagagagaatggggccccaggcacagtggctcacgcctgtaatctcaccactttgggaggccgagataggagaattgcttgagcccgggagtttgagaccagcttgggaaacattgtgaaactccatctttacaaaaaatacaaaattagccaggcgtggtggtgcctgtctgtaatcccagctagctgggaggctgaggtaggagaattacttgaacctgggagtttgaggctgcagtgagccatgattatgccactgtactccagcctgggagagacagcaccagaccctgtctcaaaaagagagagagagaaagagaatgagagagagacaatatgtaagaacatacttgtggagaattttccagaattgattaaagacaccattactcaaatttagaaatctatacctagacgtaggttgctgaaactgcagaatttcaaagataaaagaaaacataaaatgcagtataaaagactgattacctacaaagaaatgaaaattagactgttacttcttacaaattacagtataagtgaaataacagtagaatgctatcttgagtttgctgaaagaaaagtgattcttaacctagaattgtaaatgaagcaaaactatctttcaataatatatttttcagacaaaaattgtatttacagttcaattaagaaagacctatattcaaaacattttaaaaagatgtacttcaaagaggaaaatatgacctcaatggaaagacggaaatgtaagaagaaataaagagcaaagaaagtggtaaacatgtggttaaatctaagcaaacactggacacattttttaaaataatgtttttaaaaagttgttaataaaacattagctgaaatactgactttatgtgggaaatgggcattcagagattatgtattgcttgggaggcgattaaatatactatttcactttctattttgttaaaacatatctcataaaatttctaagatgactgctaaaggaataaaaatagactcaacttaccaaaccagaaagggaaccaaactgaaagatgagaaggagaaaaaaatcaatcaattcaaaagaaagaagggatggaaagtggcaaaatagaagaaaaagcatagaaaatttgggacaaatacaaaataaaatgttaggaaggaatcccaatttatcagtaatcaaaataaatgtaaactgatttaagcactctagataaaagaaagattttcagactagattttttaaatgacctatatactatttataaatatctaaaacataaggatgtagaaaatttaaaaaaacaaaagtttttttttaactttctgcagggggaagaaagaaaaacataggcagaataaataacttttcagacatagaaaccaaggggcaaccacaggcaaatattaagcaaaaaaaaatatatagctgtattaatgtgtgaaaaattgactttaagaccaagaaagcattactagaatttaaaagtgttatttacatggtcatgttcacttcatctgaagatataaattctaaacttgcatatacctgatacatagcctgaaaaatgatagaaactcaaggagaaattgacaaaattattccaaattcttgagtgattttaagatgcctctcagttattggcaaaccagatagacaaaaatattctgtacagatatagaggatttgatgacacatttgacaatcctaatctaatttacctaaaaaggacactccatgtaacaagtagaagatgcacattccttttaagaacacatgtggtacatatacaccatggaatactatgcagccataaaaatgaatgagatcatgtcctttgcaggaacatggatggagctagaagccattatcctaaacaaaccaatgcagaaacagaaaaccaaacactgcatgttctcacttataagtaggagctgaacaatgagaacacatggacccagggaggggaacaacacacactggggcccgtcaggcgaaggaggtaggggagggagagtattaggaaaaatagctaatgcatgctgggcttaatgcctagatgatgggttgatagatacagcaaaccaccatggcacatgtttacatgtgtaacaaacctgcacatgtaccccagaattaaaattaaaattaattttaaaaagaacacatggaattatttaaaatactgatcacccactaggtcataaagccaatttcatgaatttcaaataattattattatatagaatacatctttctgaccacagtgcaaattagatagaaatcaatagtcaaaagataactaggaaaaccaataatttgtaaaataaaaacacttctaaaatttttatagcttggctgggcatggtggctcacacctataatcccagcactttgggaggccaaggttggaggaccatttgatgccaggagttcaagcccagcctaggcaacttagggagactctgtctctacacagaatttaagaaaattagccgggcagggtggcatatgtctatagtccagctactgtggaagcttagggggaaggatcacttgagcctggaaggtcgaggctgcagtgagctataattgtgccactgctctccagcctgggcgacagaacaagaccttgtctcaaaaacaaagaaaaaacaaaatcatatgttaaagggattcataataaagactggaatatatttaaagctaaataagaatgaaaacatatcaaaacaacacgtatccaaagtgctaaagttgggatttgagtatttagctttaaaatgagtgttaaaaaaataagaaagtctgaaaagtaatatctaaacactatacttaaggaaaataaaatagaataaactcagaaaagcagaaggcaataataaagacaagagcagaaattattaaattacaaagatagatcaataaatcttgagtgttttttaaacaaaattacaatctctaatgattttttaagataaaagagatgaaacaaaaataaatacaaaaaagagaaacataacagagattgaaaagaaaaccaaagaattttataaccaacttcatgccaatgtactttaaaacatttttaaataggcagatataaagatagatatcaacgattaaagcctgactcaagaataaatagaaataggaaacatgaattttcttataatatttatagaagctgaatcaatattttaaattttgcacaatgacaatactaggcctgaaaaactttataagtaaattctacgaaacatttaaggaagagaaaattttcagattacataagctctttcagagaaacaagaagtagcaaggaggaaggacagcagcattctccaactcagtttatgaggctagaaatatactgacttgaaacccaaacaaggatatcatgaaaaaggaaaatcactggccagtctttctcttgaatacagatgcagaaatctcaagcaaaatctcagtaagaacccataaagtatttttaaaagacattgtgtaattacccagttgaacttattccagggatgcaaatttggattcacatcagataatccagtaatgtaacttgctgcattactaggttaaaaaaataataatctaactaaaaaacacagtggtcttgggcctcacaggtctgcaaggtaaaaaacaaaagacagcatataggataggaaaagaagaaagttctttggggatgtggtaagaactaaaggttcattttgcttctgtaacattagaaactatgcctacataatagacatattctttgaattcttgttatgggtgaaataaacgaccaagttatttttcatgaaataatttaaagcaccaaaaataaaaggtgtatgatatgttttcggtagttacctttcttttctccgctttcattaactcaaagtcttataaatggttggaataggtttaaaaattatttttgcaaccttccatttcttcttgcaaccatacatgaaaacatatatagggtcacttcaaatatttttcagcaaagtttacaaagatgatacacattttgagccagatggccagagggagattcaatacaaaaattaaaacaatgtgaaattacaaaattgtaaaatcaatccacactgaacattgtatatgcactttatgtagacgcccttttaggccaaatcaagaattttctaggaagattctctttacatttccattcaaatatttaatattctttcagaggtgtccagttttatacttagggaatcaagtgtttacagcaggatttcagacagtcatacattaccagaaaaaggttttgctaatctctactctttttagactggtagacatcaagttgagtggccaaatattgaggcagacaagattcatagaaccgggccttcgttttctggttacttacaaaccagagctccaccaatgactgcatattggcttcctagggataatggaattgcatccataaactctggaactataagccaagaagaatagatatttgataagcatcagtacatttacagaggctcttgttctgaagcacgttttctatatcactgttgttgaggctattttaagaacagtaaagactgtcagtgcactaatgaaataggttatagagctttctgtggtgatcccctccctctactgacatttctttgataatctgaagggaaatcaaagagaagaataaagcagcaatgtataatctaaaaatttcaagtcatcaaaatggtagagtaatttaaagaacaaagctttattatataaacttggaaatatttaccacatttttgtttaaggaaaatacatatgatgagaatgataaagctatgacataagttatggatgtaggttaggctgaccaaactagataaggcagaagtcccattatccatcaggaacctcccacagctgggtatgtgaacaatgaaaactcttgctcattttgtttattgttttttgtttttttgtttttgtttttgttttttagatggagtctcactctatcacccaggctggagtgcagtggtgtgatcttaccttactgcaacctccaccttgcaccaggcttaagcgattctcttgtctcagcctcccaagtagctgggattacaggcacatgccaccatgctcagctaatttttgtattttagtagagatggggtttcaccaagttggccaagctggtcttgaactcctgacctcaagtgatctacccgcctcggcctcccaaactgctgggattataggtgtgagccaccgtgcccagccttcctgcccattttgtgaagacttgtccactatcaaaggctacagagtggatacttaaatacaaaaggaagaaaattatacttcccaagaataaactaaaagaaaaaccaaatagtagccccaatgcactgacaataagaaatcaaggaaatattttgaagtttaaaactaaagctttaatcttcaaaatataatgtagatatcttcaagaaactacaatcaagataccgaatatagattaaagaatcatatttagaagaggcagctcaaatacaactaaattggactatatctcaaccaccaccccattaacaagcggtttgatgcattcaacaaggacaaatgctcctgagaggtacactaccaaatgagatcaaatatgaacacactactgccaatcattacaagaggcaagtgctagtcaggcatgtacaaaagttgtgggagcacagagaaggtggtgcagaatgctgcatggggaggcaggagaagagacatgtggaagaccacctgaacgctgggtcacagagggtgaggaaaaggcaataagtagtaaagtagaagctatggtacttagaataaataaagccatctttcaggaatatttgtttaaatggtaactagattcatagagcacctgctttctcttgtctccttcagtgtttacatatccagaaaatggcactgatgatttcagagatccagcgaagaacataaaccaccaggtatttatggatgtcacagaagacaagtcagacaggagtccttagatagacctgcaggtcaccatccaagtgggtcatgaaatcaatttagtgagtccagaccagcatctttagagaatagaataatatagcacaacgtaccatagcatggaataaacagaactagcacagtgcataaaaggtaaaaagagtaagcattgcactgtgcaccttttgtttctgttatataatgtgtagattatagaattatataatatattatcactgtattttatagcatatatgtcatattttatgttcatttacatatctaaaatttagacaaactagaataatattatataatgtacctgagctttgaagagcagagtgaattatagataaaaagatatatatagttgtgtacagcttttgtgtatgttttctataaatttatagcatgtatttatattagtatatagttagatatatgatgcaactatatatgagataatatataattttaacttgtttattataaagcataaatgtttttatagcattaacatttatttggttagtaataatagctaatatttatatgatgcttacaagagtcttttatcatctgtaaattggggacaaaaacagaatctacctaacggagttgttgttaagttcaagtatgctaatgcatgtaacataatgcctagcacacaacaaactatcaaaacagcagcttgtattgtcattattgcaaggtttcattgccaatagatggtggtaccctgatgtaaactaaatcagtctcatgccaaaacctatgcttttttctcaacataaatgaactaattgccagatgaatatacctggttccctttgatatactagataccaacttttcggctaactgataaaacagttaattttaggaagtgagagttatacactactattcatgtgtccctctttctttagaaagaatattcccatttctgaagtctaacttgtaccatttttcatgaacaactatattatcaaagaaaatttatttgaagaaaattgcaatatttctgacaaagagttccaaataattgttttcaaattgtttatagtgaaaccaacctcggttaagaaattaaaaataaatgcaaagttgacagaaaatctttaataatggttagataacacttacgatccatacactgaaattacattgcaatgacttctccatttcctgttttctttctttcctctctcaatttatttcacctttcttttctcatttttcttttattttctctttcagggatctctttccaaagacccattacagatgaacacctatgttgccttgtacaaatttgtaccacaggagaatgaagatttggaaatgaggtaaaaaccttctgtaaagaaaaaaaagagtaaaattttaaagtcagtatttctccatgtgaaaaagtaagtccatctgtgcccctcctaatgctttatagctgtgattctcaaactttagcatgtatctaatgacctgcaaggctggttaacacacaggccctgtccccagagtttttgattcatcagatctgaggcagggcctcagaagttgcattcctaaggagttcccaggtggcactgacaatgctgtccaaggaacacactttgggaagcaccactttagtacatgctcaacagaactgctaatgggagttttcatgaaggttgaacgttaaatgcacttggcatctggtggggcctaatagggaatcaaaaaatatatttaatcaaatatcagatagttgctgatgtgtggtgttatttctgaggcctctgttctgtaccattggtctatatgtttttgtaccagtaccatgctgttttggttactgtaaccttgtagtatagtttgaagtcaggtagtgtgatgcctccagctttgtgcttttggcttaggattgtcttggctatgcgggctttttttggttctatatgaactttaaagtagttttttctaattctgtgaagaaagtcagtggtagcttgatggggatagcattgaatctataaattactttgggcagtatggccattttcaggataataattcttcctatccatgagcatggaatgttcttccatttgtttgtgtcctctcttgtttccttgagcattggtttgtagttctccttgaagaggtccttcacatcccttgtaagctggattcctaggtattttattctctttgtagcaattgtgaatgggagtttattcatgatttggctctctgtttattactggtgtataggaatgcttgtgatttttgcacattgattttgaatcctgagactttgctgaagttgcctatcagcttaaggagattttgggctaagatgatggggttttctaaatatacaatcatgtcctctgcaaacagagacaatttgacttcctctctttctatttgaatatgctttatttctttctgttgcctgattgccctggccagaacttccaatgctatgttgaataggagtggtgagagagggcatccttgtcttgtgctggttttgaaagggaatgcttccagtttttgcccattcagtatgatattgggtgtgggtttgtcataagtagctcttattattttgtccttccatcaatacttagtttatgagagtttttagcatgaaggggtattgaattttattgaaggctttttctgcatctattgagacaatcatgtggtttttgtcattggttctgtttatgtgatggattatgtttattgatttgtgtatattgaaacagccttgcatccccagatgaagctgacttgatcgaggtggataagctttttgtcgtgctgctggattcggtttgccagtattttatgaggattttcacatcgatgttcatcagggatattggcctgaaattttcttttttgttgcatctctgccaggttttggaatcaggatgatgctgacctcataaaatgagttagggaggagtccctctttttctattgtttggaatagtttcagaaggaatagtaccagctagtctttgtacctctggtagaattcggctatgattccatctggtcctgggctttttttggttgatagcccattaattattacctcagtttcagaacttgttattggtctattcaggggtttgacttctttctgatttagtcttgggagggtgtatgtgtccaggaatttatccatttcttctaagttttctagtttattggcgtagaggtgtgtatagtattctctgatggtagcttgtatttctgtggggtcagcagtgatatcccctttctcatattttattgtgtctatttgattcttctttcttttcttctttgttaagtctggctagcagtctatctattttgttaatcttttcaaaaaaaccagctcctggattcattgatgttttgaagggtttttcgtgtctctatctccttcagttctgctctgatcttagttatttcttgtcttctgctagctttcaaatttgtttgctcttgcttctctagttcttttaattgtgatgttagggtatcgattttagatctttcttgctttctcctgtgggcatttagtgctatatatttccctccaaacactgctttaactgtgtcacagagattctggtacattgtgtctttgttctcattgctgtcaagtaacttatttatttctgccttaatgtcattatttagctggtagtcattcaggagcaggttgttcagtttccatgtagttgtgtggttttgagtgagtttcttaatcctgtgctctaatttgattgcactgtggtctgagagactgttatgatttccttccattcttttgcatttgctgaggtgtgttttacttccaattgtgtggtcaatattagaataagagtgatgtggtgctgagaagaatgtgtattctgttgattgggggttgagagttctgtagatgtctattaggtctgcttggtccagagctgagttcaagtcctgaagatccttgttaattttctgtctcattgatctgtctaatatttacagtggtgtgttaaagtctcccactattattgtatgggagtctaagtctctctgtaggtctctaagaacttgctttatgaatctgggtgctttacatattgggtgcatatatatttagggtagctcttctggtggcattgacccctttaccattatgtaatggtcttccttgtcttttttgatctttgttggattaaggtctgttttatcagagactatgattgcaactcctgcttttttttctttccatttgcttggtaaatattcctgcatccctttattttgagcctatgtgtgtctttgcacatgagatgggtctcctgaacaaagcacaccgatgggtcttgactctttatccaatttgccagtctgcaacttttaattggggcacttagcccattttcatttaaggttaatattattatgtgtgaatttgatcctgtcattatgatgctagctggttattttgcttgttagttgatgcagtttcttcatggtgtcaatggtctttacaatttggtatgtttctgcagtggctagtaccagttgttcctttccatatttagtgtttccttcaggagctcttacaaggcatgcctggtggtgacagagtctctcagcatttgcttgtcagtaaaggattttatttctccttcacttatgaagtttagtttggctggatataaaattctgggttgaaaattcttttctttaagaatgttgaatattggcctatactctcttctggcttctagggtttctgttagtctgatgtgcttccctttgtgggtaatccaacctttctctctggctgcgcttaacattttttccttcatttcaaccttggtgaatctgacgattatgtgtcttggggttgctcttcttgaggagtatctttgtggtggtctccatatttcctgaatttgaatgttggcttgtcttgttagtttggggaagttctcctggataataccctgaagagtgttttccaactttgttccattctccccatcactttcaggtacaccaatcaaatgtaggtttggtcttttccatagtcccatatttcttggaggctttgtttattccttttcattcttttttctctaatcttgtcttcacactttatttcattaagttgatcttcaatctctgatattctttcttctgcttgactgaaaaaaacaagcaatggagaaaggattctctatttaataaactgtgttgggaaaactggctagccatatgcagaacactgaaactggacccctgccttacaccttatacaaaaattaactcaagatggattaaagagttaaacgtaagacctaaaaccataaaaaccctagaagaaaacctagggaataccattcaggacataggcatgggcaaagtcttcatgactaaaacaccaaaagcaatggcaacaaacgtcaaaattgaccattgggatctaatgaaactaaagagtttgtgcacagcaaaagaaactatcatcagagtgaataggcaacctacagaatgggagaaaatttttgcaatctatccatctgacaaagggctaatatgcagaatcgacaaggaacttaaacaaatttacaagaaaaaaaccccatcaaaaagtgggcaaaggatatgaatggacacttctcaaaagaagacatttatgcagccaacaaacatgtgaaaaaaagatcctcatcactggtcattagaaaaaagcaaatcaaaactacaatgagataccatctcatgccagttagaatggtgatcattaaaaagtcaggaaacaacagatgctggagaggatgtggagaaataggaatgcttttacactgtttatggggctgtaaattagttcaaccattgtggaaaacagtgtggtgattcctcaaggatctagaaccagaactactaccttttgacccagcaatcccattactgggtatatacccaaaggattgtaaatcattctactataaagacacatgtacacgtatgtttattgtggcagtcttcacaatagcaaagacttggaaacaacccaaatgcccatcaatgatagattggataaagaaaatgttgcacatatacaccatggaatactatgcagccataaaaaaggatgagttcatgccctttgcagggacatggatgaaactagaaaccatcattctcagcaaagtaacacaagaacagaaaaccaaacgccgcatgttctcactcataagtgggagatgaacaatgagaacacatggacacagggagggtaacatcatacactggggcctgttgggggttggggggctaagggaggtatagcattaggagaaatacctaatgtagatgacgggttgatggatgcagcaaaccaccatggcacatgtatatctatgtaacaaacctgcacgttctgcacatgtatcccagaacttaaagtataattaaaatatatttatatatatatatatttaatctccaaattaacattgatagaaaaatcaaactaaaactatcagagtcaatcaggaactatccacttggtggtaactgaaatactagatagaataggtgagccttgtgaccttctcaaaatctaaaccattctcttaccacagcttgaggttcctcgtgtttcaggggttgttaagctagagtcaattctgggttcacatcctacttgttgtgtgaccttaagcaatttataaacatctcatttctctgatttctttatttataaaagaataataatgatctcttccccttaaagtatttggtgagactacaatgatagaaaagaaattaaacacattggtgcctataatcataaacactcagcaacgagtacttatcacagtttttataatgtggtgttcactggcctatctcaaggaaaagacttctgcttccatgcattcatgaccccaaaatgtgagtaatctcatgacaggggtctctgtgttttcccatcctagagcaggatagaaaaggctacttttccagtcaaatggtcccctggaggttcattctttcctcttctaaaaaaaatgcggagataaattagcactcaaaactatttaattgccagagcattgggaaaatagaccacatttggaggtagacgccacttgtctgaatgctgtgccagccaaattatcagtcaccagtcactctcttcacatggcttctggaaagcctgcctctccacactggagcgacctgggctttcccaattcttctggtttgtgtcatttcccacacatggtccaccacctcagtgaaattacccttctcctctttcacctacccaaactcttataaatagtgagagccactgaaatgcttcagttagaccctgtttcccaggctccatatgctatcaggatcggttccagcagctccaccacacctcatggtggatataatatctagcaagacatcatagcagatttatttatcctgctggagtctcacaactctccctggctcacaccctgaggtcagctttgtttcagaattaggttgagatctgctgccaggtgattcttgggtctttccagaaaaaagtttgggggcctgagtcctggctccttagatttgtagagacaattaaggtcttgtacatctgagttttctctattgctgagtaaaatcgtcatgctgaactcactggctgaagttgtaaatattacctgaacagtctagcataatcagtgggagaggaggagacgggctttatcaagtaaagccgtgttctgttacagacatgacaagccctgtgagccagagcagagcctgcctagaattcctcgctgggatgaagccatgccttcagcagatgacccacaattaactatctgctgatgaagacaagggtggcatatatttactttgcaataagtacaccatattgggtccttttgagattgtcatttgggtgtgtaacatttaagatttaacagctttctattatagagatcctacagctttatattagaagattattctgaagtcataacatttttttaaaaaagtaatttcagaaaaaaaaaagaatgttactgggataatgaggaatgatgtctagctgcctggtggtggtcatcactctgcgtgcttattttagttggttgcaggccattagaagtcaagttgtctggtcacgaatgaaacgtttacagtctgcttcaaggcaatcaggactatccattcccaggagtgaaatgtctgcattgcatagactgcaagattggagtgataaatcacacatacttttttttatttttttgccaagagtttgtaggttcccattataaaagccaggcacttgatttagaatgtgtaaggcaatcctttgggaatgctttgggattcagcataactctttgaatgaactggagctttgtgaattacctttttctcctcagatcataaggtagaaaaaaattccttttaacaaaatagcattcttatccacccaccttctgatccaggggagtacactgggtattgacctcaggaaagagaacaagggagtgagggtacaggaaatgttaggagtgtgagcttgaagacaaagacgacccaactggcaaagacagcagttgtcaatcagagcagatgaatcatcacatcagcaaatattcattatatatctgctcaataataagaaaagcttctaccaaaggccaatgctccagacctctccccgaacctccagattcacttacccacctgcctaccccagcaatgtacagagcatcgcagctctgccctctcttccacaaacctgccccttaggatgaaagatgtcaacctctgcccaggcctcaagccagccagggagaggactcactctacttttgcccaaaatgtatttgatgctcaattcctactcttctctttgcctaaaatcaactgtatctatccccaccttcatatcttacctggactgttgtaaaagagctttcctggtctctgtgttttcagtcttcctctcccttcctatctactatgggtgatagtgcactaaggtaacagtacagtgttctgggcttcatctcatctttggagtcacacagaatgattcacatcccttctctactttctaataataaggcttactaactaactttctgaatctgttttctcatcttgaaaacagggataataagtcctgcccttaccgcccttagatctagcatcgatgtgattatataagatagcaatatctggtacatagtaggaccttaataatattaattccagtcagttcttttttgtatttcaaaagtagatgcttcctttccagaattaaggagggagagagggagcaaaagggggggaggggagaagagagagagagagaatatatgagcattcactgaatgtttaagaataaaaagtgtgggcatcagttgacctgggtttaagtcctagccaagccactgtctagctgtgtgacccccatgaatcctgaaaaagttaccctaaccatctgagcttctgcttcctgacttgtaaaaggagataatcactttgcctgccctaagtctgctcgaaacacacatatttgctcaaaactgtccaatgtcctcccattgccctggggtaaaatctagaatatttatggggactccaggacccacagtctcatccatggtgacctctctgatccatctacactggccttctttttttttttttttttttttttttttttttcacaaaaggaccacaccgcccacttgccaaaggatttttcttcctgcagagtctgcttctccctccatcctcctacccacaaccatcaaacacacacattcacacacacacaggcacactcttccagttgactctgattcatgcactagatctcaggtcaaatttcatttccttgttgcagcctttcctgttaccctactttggattacattcttctgttatattctttcatgatgccatagttctctcaaacacttatctctacttgtatttatatatttctggaattatttggctagtctctatctctcctgtaaactccatgagaacaagtctgtaattactaaccctcatatccctagagcatgagctcattcttgaaacatagtagatgcatagtagataataattatttgacaaatgaatgagtattgtggagattaaatgaactaatgctatgcctggcatatacacttagtgggcaaatcaagtctatgataatataatggaaactgtaggccgggcgcagtggctcatgcctgtaatcccaacactttgggaggccaaggcaggtgtattgcctgaggtcaggagttggagaccagtctggacaacatggtgacaccccgtctctattaaaaataacaaaaaaattagccaggcatggtggtgtgtgcctgtaatcccagctactcgggaggctgaggcaggggaattgcttgaaccagggaggtggaggttgcagtgagccaagatcacgccattgccctccagcctgggtgacagagcaagactctgtctccaaataataataataataataataataatataatggaaactataaatgaggaagcaaaccaagctgagggtggttagtcagggggcctgtttcctggaacagatgggcctgagcctaggataaatgttattcatcaagaagaaattgtaaagggggaggccaaaagtagcctgtggttccattcacaaataacaatggttttaagacaacttggaagaagccctgctaagcctttactgaagctctcacagctgagaggaagggtggcctcagagagtataaaccataaactgtttgagacaggtctcagtcaatttagaggtttattttgccagggttgagaatgtgcctgggaaaaagagatgcaagctacagtaggataagtggtctgtgctttttccaaaaagggttttgaagacttcagtgtttgaaggggaaagggcatcaggaaggtaaggaggaaagaaaaaaagtggggagggtaggtagtgagatacgtgatgacattcttgtgagactttgattaatgctcactgaatccacatgttacaagtgaaagcgggtagaggaacagtcagttacccatttgtctggtgttcagcagtaaatctgcattttacataagatatgaataaacacagagtagaggaagcagtcagatttgtctcaggtaggtggagggatgctttctagtcttgtctttgtcctgtacctgtgaggaaaagctgttaacttatattgtcagggtgagattcaacagaactctgttttagggtagagtttggggcccacaaggaatttccttgtgagcaatttgagggagcccacctggggagatatgtggccttctatctttgcaactatccgtttaggaacaaaaaggaaggcagttgttgcgtgactcagatcccaagcttaacagtttttcatttttctcctttttttttttttttttttttttttgagacagagtttcactcatgttgccctagccagagagcagtggcgcaatcttggctcactgcaacctccacctcccaggttcaagtgattctcctgcctcaggctcccaagtagctgggattacaggcacctgccaccacgccccactaatttttgcatttttagtagaaacggggtttcatcatgttggccaggctggtctcaaactcctgacctcgtgatcctcccgtctcagcctcctaaagtgctggtattacaggcgcgaaccaccgtgcccagccctcatattttccctttgacatagtgagcttagagtcctgagattttattttcctttcacaagaggaagagctggttgctgccctcttgttcttaggtgagtgaatacttttcttagaagtgccatggacccatcattagtctccaaatcccatataaaggcagagactttatacagtctcctttgctacagttccagtgcaaaataaacttcctttattttttttcacactgccatgaaaaattagaaataaacttcctttataaattaatttgctatttcccacctaaacctctggaggtaatgcagaccatgataattctctatctttccaccatcaagggcagagagcaggacagcaagctggcaagacagaaaagagaaatttctggcagtcagataggcctgggtctagtttccaactctgacactatctgtgtcaattttagcaaactgtttaatcttttagagcctcagttttctccttcctaggaagactgggtattaaacaggataatataaataaaatgtggaatttcatgcccagtacaaagtgaggtcacagtagattttagataccttctcttcataattacatcttttcacaatgtattttctctcctagtcttctgaacaacctcattaacaccaccctaaggatatagagtagagaaaacacagttaaagactctccctttgagcaggcccaatgagaccttgtccaactggtccagcaaaaaggggctgtgatatccaatatttatcttgggagcaggttttgcagttgctgacatgatgagctataatatgaaattttatcactgatacccaagctgtgatgccatcatgcatggggtctcgaacattgctgacaatttgaggcctgataacattaaagggctacccaggttctcctatcagggtatagcagggtggtatagtggataatctcctgaaattaagagtcttggacaggttccaccaattacccttattatcaacttttttgaagagccctgaaaattacactttatggactgccagtttaattcatgaacaaagctcttaaatgctgctaaaaatacatggccaagtgcagtggcttatgcctgtaatcccagcactgtgggaggccaacgcaggtgtattgcttgagcccaggagttcaaaaccagcctgcgcaacatggaaagacaccatctccacaaaaatagaaataaaaaattagccaagcatggtggtgcatacctgtagccctagctcttcaggaagctgaagcagaaggatcacttgagcccaggaggttgaggctgtagtgagctatgaacacaccactacactccagcctgaatgacagagctagaccctatctatctatctatctatctaaattaattaattaatgaaaatagaatacaaactggagaaccctattataatcagcactgttgtcattattatcatatactgctctgtgaattaacatagaccatatgtcacatcatccttctggccaagtgggtgtgtacatgtgtgtgatacacttatacatgtaaataacctcccacacacactcacagtcacacacacacacatacatgcacatacacacacacttatacacattcaagtacacattcattcacacacacacaagcacacacacattgttagccaaagcttgataacccacacttagttttgatgaaattaaatcctgccttcaacacttacaacgtaaccagtcacattatcctcactgcttttgggctcagcagtctgcaaaacagagtcttggagttatcacttattattcacaccaaggcaccttttttaagctgataaaaacttttcaatcaacaatgactttcatgactttgctgagttgatattttatgtaaataatcagcagatataaatgacttcaagtaaacataaactcctaaaacatcttagggacactgtaacaaaggattgagagtaaataaaagatttaaaggtttaaatgcatattttagcaatcatacaatgcctgttccaaataattaattttgacttcccacatctaaatcattttcgtttttattagctctcctcaaacagatttatatgataatggccatttttcataagggtagaaaaaagaaggaaaaaaaaagactataagccaagagaggaaaagagggaactgctctttcagtattattaaatcctaaaataaatacaaattaattactacttcaatgtatgtcagaacacctaaatttggggggcttcaaagaaaacctatcttcttttgtaacgccaagtgcaaatttagattcatgaacggccgctcctggaagcagcaagtctcagattctccatgggcaagtctgaatgaaagcaagcaatcatttctcccattagttagtatttgccagaatttctggagatgggatggcctgaattcatctctttggggtattttcaaagcactactttaaaaagagttaaaagtgatgtgaactcttgtatgctatttccaggatttacttcatctattcacctctcatcgcatgatagccaagcatctgctcttttctgggagaaccattcacaggccctgttctcaaagagctcaggcagtcatgggccaggggaccagcagaagagtagatcagaagttacaatccagtgtgcagggctgtgggtgtgaggtagcccaggtaacttacagcagcctcaaagggacgtgaaagaagctgggattccagaaggaagaggggtcatgggtggctgggaagccttgttagtgagcagtcactctctctccagtgaggaaagcataagggaataatggggttaaacttcagaaccagataattactttaagaggtgccaaatcaggggcaaaggcaagccccattacaaaaagaggtggtgaaaattcatggcagaggcaggagcatatttagataactacattaattccagtcttgattctgaaagactgccttaaaacttggcaatgcttagtgaatggacgcttggctgtttagctcatattccagtgagaaaatgtatggttcttttttctctttctggaggtgaggtaggagaaccaagcccaataatttacaggtagaaaatggaagcttaggactagaacccttggaggtgactcccagtccactgatctttctcctccaccacacttttgatcctaggttcattgttctaagttttctctctgataaagctgacaattctattttaatcagcaagagtaggtaacactttatccctttttggcccctcacatcacttattttaagtgcattaggtttgttaagtatggttgctaagaccaggaagtttgtgatctacagagcatgttactgagaagtcactccggttaaaggataattttttaaatttaagataaaaacatgactctcgtgcaatataaattgaacacatgtcagaatttttacatggctcattaattaatgagagaaccagtaagatgctccaccttgttcaaatgagaactcaatatatcacatatacataggcaatgaggaatgctgacaggaatttacaaatagatgcaaaaccagtcagtagtcacaggataaagggtaataactgactatattccaccaggcaaagttcacttgcatttctttggacaaaaatcatttgcattaatatcagttttctacgacttgcttgagatgtaaaatagctcaaaggcattgaaaaaggggaggtaatctgaaaggatatgccagacgggacatccagatcagtcatgttttttgcccatttcaaagtctttcataatttttcctagcatcctcttgagttcttttaataaatctcagaggttacccaagcaagtagtatttcacagaggagaaaacttgagttagaatggttaagtcacttgttgcaagccataagaatctcctaaaaaatattattaaaatagagattcctgggcttcacctagacctagagagtcaaatcctacttggaaatctgtatggttaaatgtcctcctggattctgattatctgcactatctgagaacaactgtgacttatccaaagataggcagtgggccagtggcagactcaaaaaccagaacagaggtttcccgattctgtcaatgctctgtgcacaggtctgcattggctttctgacctgtgacttgtgtacattctaatgtccttcaccctgcaaggtttcaaggcagagtaagacagaataaggctcccttggtgtctcgtttctattctctaagtacattactgcttggcaaatgcatcaacttaattaaaactaaatgtaattctaatgcaccaatttgatttaaaaataatcttcacagtcaccaggacatcaaaatgcaattaaggctatttgaggaaagtctctgatgcatattatgctctgatgctgcactatgtcaagaaacccagatcttcccaaatgtcactaatgtgtttagcagcctccctctcactcaaatgcctctctcatttaggttctggagagcgtgatccatgacagttcaagaacatttaccaaattccttccaaattgcccttcagttgaatgcttttctctgagctggtctatggacttgggaaagtgcaggcagtctcgtggatatcaggcttaagacaaaatcaaaatgcaaattcaggagttccttattacatacccatgtgccaagactgtaaaagattctggaccaagataatgtaaattgggaaataagtctggtgaaaaattaagtcatagatctaagattaatggagccatttggctggctcctttttctgcccccttcagcttggtttttcaagggtatctatttttgctgagtgactggttgctataaacttgatttaaggttcgttttgcctaatgaatgagaaagggcaggaaatattaaagaggctcaaaataactatatagtaaagtgggcagttctgatgagttttgacacggcatgggtggtgcaagaggcagcttgatttagtggagttagttatagattcaaaccttgcctgtaaatggtgaaatctctcttagcctgcctacttgtatgaaaatgcaactgttcatgacaacatttagtgaacattgccatcgccctctaggctcaaccctgccaacatctccattacaatcagccacctgggtaatagaatactaggtccagctcctgggccctgatacacctttgtggtcactacgtggagtggacaaggaaggggaagagggacagtatgaagagagggagaaggttttccatagctccgaatcacaccaaatgttagcgtctgaagccactgaagtcaaggctatttcattaaccaaccatccctgccaaaaacctaatgagacataaacgtaaaaggcaatgattagaataaatcttctaatttacaagtggaaaaatgcaggtttacatgaaaattagcaattttaagccctactgtatatcaatcacagtgataaagacttaactttgaggccaggcatggtggctcgtgtctgtaagcccaacattttgggatgctgaggcaggaggatcatttgaggccaagagttagaaaccagcctgggcaacatcgtgagatcctataaaaaattttaaaagttagctgggagtggtgtcatgtacctgtagtcccagatacttgggaggctgagcaggaggattgctcaagcccaggaggtagaggctggagtgacccatgattgcaccattgcactccaacctggacaacagagtgagactgtctttaaaaaaaagaaaaaaaagatttaactttgcaaagtaaatatagctcacaataatttatcatgcataatatataagtatataaatataattgagatagccaatcctcaaagagacatgtatttgggatttttgtttgggatcagttctatatttgtttgtcatctccccaccatgctagcatttgcttctccctcagggatgacccttactttaaacagtttattgtctttatcctttgaaattactgacatcttgaaggcagtaactatgtctttacaataacagccaccatctaatgggcgcttatctaaatatgcattacaaatattttgtcatttagtcctcaaaaaatattgatggggtaagtgctattatcctaaccttacagataagaaaacccaggcttagataatttttttgatttttgtatcccccaatgcacacccaatacctgatgttttataaacattcagaaaatacttgaatgtcatagagttttcctaggataaatgagcagaaatggaggagtgagacaagactccttttctttgaattttaaaacattcagaaagcaaaggccctagggcattctgcttttaccatgtgcttcccaaagtagggccaatctgaggtctcaggttgtctcagatagtagagaaaatgtttctctcagaagcagtgtcctcatctggagggtgtcgtgtctcctctcctaggaatttgtgctctacttggggattggagagaggctgggctgggcgggggatgcctcagggcaactcatactccttcctccaagaccccaccctggaagatcaaaccatctttctaacatcttgcagaatagttccatgtagctggccaagctcagctcatatcattcataccctttgtgtacactgagtccctgcagacagtttacctggtggtggaagagatggttccaatgcccatatgaaaaactgagaaataagagagacaggactgctgagaatgaacccagaaagcaaccattggttctcacgcacatgtgtgcaagtacacacacactcaaaattaaaccctgtcctcctcactggtaagccataattctgtagttgcttttgttattttattctaattcttgtgagctcacagccctttcaccatttcaagagttcctataaatcattatataactaacttgcaaatcttcctctgggcctatggcaaattttactgagcaaacaaaagcaaaaggccagctgtggtgctctgacctcttttcactaaaggaaactgatgcttgaattgtttatgaattgcattatactttacatcatggtatacaattgtggattacaatgtaagcaaaacctttacctgaatgtacaatgctctgattgaactaagcaaaggaaatgttttttaagtaactgggggcccatcaagttggtcccaagaatttggaaatagagttaaattgtaaactctagacgtaatgtatcaagaacataaagtctcctaaaagcaagagaataactattaagccagagaaggacttttctcaaatgtgcctgtagtgtgataacctgaatgaagaattattccatggaaagggcctgacagccacagaagcatgaaacaactgagggcagagtcatggattagccaagtctaacctggggaaaggagaattttaagcattaggccaccattcctttgggaccaatggcacggctctccctaaattgagccagttggcagaatgttttcatttgtttctttgatgacatcgcacaacacaccaacaccatggcaagagaagataactaaattaagaaagggttcagaagaaaactcacagttgagagtgaagggttgccactaagggcaacacagaaggttgctgtgggagtcagggtaacaggaagctggagctacagtaggcagattatgtatggcaggctgtggggtaggctaggtttccaggggctccctgtagattgattaatttgaataattttcacaggttccagggcacaggggatgtcccacattatctagtacctggctctagaatgggacattaggggtggtacagagtggcccagagtacaagagcccccatcaaggagttgttggggtgcggacttagtcagctgcttaagaaggggaactgaccagcctccagctagagcctcaaaactgggtcaagactaatttttaacaaataataataagcgggccaggcgcggtggctcacgcctgtaatcccagcactttgggaggctaaggcaggcagatcatgaggtcaggagttcgagaccagcctggccaacgtggtgaaaccctgtctctactaaaaatacaaaaatcagccaggcatggtagcgggcgcctttcttcccagctacttaggaggctgaggcaggagaatcgcttgaacctgggaggcagaggttgcagtgaactgagatagcaccactgcactccagcctgggcgacagagtgaaactccatctcaaaaaaataaataaataaataaaatatatgtatataaaaaataataagctatgttacacagagtggtttcatcttgcatgcctactcagatccaccacctagagcccagtgttgaaaaggattctaaatcagaaggcaggctctgtgggaaagagtgctgagattgttgggtgatgcctggaaggatatgggggcagtaaaaaatcccacaagccacagatttgctggcctagatgttagagagttactaccttggattcaagggctaccctcgagcaagatcctctctatagtgaaaaagaggcattagctatctctgccaggtacttagagcgtttggctaatctcaagaggagtctactggtcctttttggctacatcttctaacttccctcatagtccttatgccaatttacaattatatacttaataattatacatatgtgatatgtttattattagtatctatttattaagtttttttatctatttacttgtttattgtctatctttctcactatactattagctctagtgaggattttattcaccagagtaaacccagtgcctagtaagatgacactctttcagagcccacattctataaatatttgttgaatgagtgggtaaacaaaaaccaaagaaataataaatggataaataaatcactcaccaagcaattttctgatcctggtggagctcttttttaggaaaggacagaaccctcatcacacttccagaagtatgtctggtatttctcataagattatagcctgttatcccagtgagtgccttattctaatgtgtaattcagttaatgagggtcaagtgctggggactgtccacctctaggcacagccaagagtgagtctctcagtagactataaaaatagaggtcggattgaggcagcaccctctttcacccttagggaaaggtacctcccacagtctgcctctttcactcttagggaaaggtacctcccccagctttattccctatttacagtttctgccagagcagcagcaaagtcattgtgtttgatactgactcatggtttcttaggttactggtttaaataaaatctgctggggcttagaagatttttctacattgactttcatccttgctgcttaattaaatccctgacctgggaaagagtgattttcagccacctcgctttctgcggcatcagcatgaaactgtgactgttgaaataccaaaatgccagttgtgcttaatgctgcagatgtgacaagcctgttatatttggaatccctgatgaagatagatattaactgagaattgaaaatgacagcaaaggagattggatcagaatagcaaaatgaatacgcaaatctacttttgctccaattcctaaacatgtcagaaaatacattttttttaacacatctataacagtactagaaaacaagaacgcatgctaagagagaaccagaaatcttgggaatttcctcgcagactacagcaaatgcagttgaattgtgaacaatgaagatgaccagagaccaaagaatactcaggacaaaacagctatagaagggggagcacatttaaagagacccggaatgcacaggacttcactgaaaagcgtgagagtctgcagtggattgattgcattaatggccctaattattcaccccccctccccatattcatgcccctgtcatgggactttgcagttcctcccaaaacagaggtggatggagcctgttaccctatcccttgagtctgaactggccttgagacttgctttggccaatgaaatgaagcaaagtgacaatgtgtcagttctggatctaagccttagaggcatcatgtgctttgcatgtttccacgcactgctcctgaactttgatcattgctatgaaactgaccttccaaggaatgagaaatgtggaatagggcaaagtcaccccagtcacctcagcaaaagccagccaacacccaggcctgtgagtgagccattggggttttgtggctgtttatcacacagcattactgtgacaatacataagtgatacagtctcaactgtattcatagcaccgcattactacttataatgaacaattggcagcaatgatgttgaactccagaattaagccaacacctatactctaaagaaaaagaacccatgcctaaggagggctcttatgtgagcatagaagcctgggaaataagaactgtgttgagataactctggaccttcagaccttctagagggcatggaaaaaaggaaaaggcagctctacttaggagaaaaataagctgaccttttctctcaccagtggtaagaaaatcctccttgctacagctattaggataggaggaggaggcggcaccatactgcttatctgctatacgttcaagtatccaaaagggaggagacgcaccaattgacacacgctgctcccttaaacagagcctgtaaatagcccttgcacttgaaagggagacccatggcagaccataggtatagaatagcggagaagcctgtccacatccacctacctccattttccattttcagtctttcataaaaagagataaccaagaaacattagattttagaaaaaatacttgacataaaaaagaagtaataagataaaggataggccaactaatttcagaggaaacaaatattcagtaaaagaaagaaatattgttttgaaaatataataatctctatacaatccattataacattgcatccatgatggaaagccactttcagaactctttcagaaaagaataaggaaataatgagaaagaaagaaaaatttcagaaataataaagaacccttagaaactatttttttctaaaaatgttttctgaaaactttttctaaaacaattctcagtattatgataaataatagaagacaagcccaaatacaaaataaatgatcaggaaaataaaattgagaaaaaaatttaagaacatagaggaaaataagactgtaagtgtgtaagaaagacaaaaaatgtgaggatggattcagaaggtccagtatgtgttgacaagaagttccagaaggaaagaagagagaacatcatagatgggagaaaaacatgaaagaaatagtagagaaagttttcccagtgtgaaaaataacagccttccaattgtcacagctgtgttgaatagaaagaattaaacaacaaaaacacattagtcttcagccaaacccaagtaattcttgatgaatgatgtagaatgttgacacacacacacacatgcacacatacacaaatctagtacaaaactccaattacaccagcataaaagatggcagacaggaaaaatggagctaagcaaaagtgtgctaggttttgagagggtattgggaaggtgtagataatgataaagataatgaccaattctagatgtcaatactaaacaaaaaaaatacatgaacatatctatgtataaatgtaagtgtgtgggaaggagtctagaaggacacacaggggacgggaggtagatcatggggctgagaagaagggagatttgtatcttgaaattttggagcttcatgatcatttatgtatcaaactacaggtaacagttatttttggctgggctggatgactcacgcctgtaatcccaacactttgggaagccgaggcgggcagatcgtgaggtcaggagattgagaccatcctggccaacatggtgaaaccccatctctactaaaaatacaaaaatgatctgggcatggtggcagatgcctgtaatcccagctactcgggaggctgaggcaggagaatagcttgaaccagcgagtcagaggttgcagtgagccaagatcatgccactgcactccagcctggcgacagagcgagactctgtttaaaaaaaaaaaaaaaagagttatttttaaaatacagcataaaatcatgtttgccttcaatgtgtaatacagctattttcttggtaggaagaactggtaaaagttatatttactttatttctatttcttttaagactatttgtgtaaatgagaaatgattactcctgactttaaagtatgttatttttctttttttttcctttacctaactcattcattcttcattttaggccaggagacataattactcttttagaggattccaatgaagactggtggaaagtaagtgttcctctttctttaaaaaaaaaagagaaaatcatttggtaactattataatacatgctacaattgtggatgcatgcctcctttttcctttcaggggaaaattcaagacagaattggcttctttccagccaactttgttcagagactacaacaaaatgagaagatttttagatgtgttagaaccttcattgggtgtaaggaacaggggcagataacactgaaagagaatcaggtgagtaaaccacacaaacacattccagatatgagccaaatagggtgtcattttaataaacttaataatatgtataaatctgaatgagtggggtcacattcaaagtattcactttgagaaaagatatacttactccaatgatgtcagtgttgtaggagctaaacatgcaaactaaaattttaggaatctcacttggtgatacctgttcataaacgaaacgtgatagtggcaggcgacgacatctcgtcccccatgctcttctcagaagaccaccggtctctgatgtggacagcttctctcatttgggctctgagttagcgtccaacaaaggtgtggttaattcttcagtgctctctaacaaatacttcgttattagttgttgctattaggaacctcttgggttttcttatctggactccaagtctctacctattcactgaagcccataacaccttcatatcattgcaaaagacacggactaaatttagataaccagatactatctcaggctcataaatgaacaatctctgtatgtctaatctagaggtgcctgtcaccatcttgctccagggccatgttgaatgtagagttctctttgatgctgtcaattttcctgagaagtaaaatgtgaacccccacatttgtatgtctttaagctccaccatctcatggctggaatgttgatagagacaaagaaacagcattctcacactttagctctctggcctactcttcctgtctttgtcttccagcagagagaggccttcctaccctgccttcttctctgactgcagctcccctcaggtcatgtcctgtgtcctcactacagagtaaaataatatgcttggacttacggcagggctcggtggctcacgcctgtaatcccagcactttgggaggccgaggagggcagatcacgaggtcaagagatggagaccatcctagccaatataatgaaaccccatctctactaaaaatacaaaaattagctgggcgtggtggcacacatctgtaatcccagctacttaggaggctgaggcaggagaatctcttgaaccagggaggtggaggctgcagtgagccgagatcgtgccactgcactccagcctggtttgttcttgatatattagtggaggatttggggaattaaaaatttatttcctctcctaataaagtctcacagaggactttaattttcaactttggaagtcaaaaatctttcctctgtttctttctgcattcttggtataagaattttattatttcccaaggtaatgaatgcctgaagttgaaattgataaggctcgccctacaaggaagttcacaatgaaaaaggcattaataattttaatacatctctgttcaacagagttgccgaaaacacatcttgaatgccttttttaggattgcctcaaagatagtttctaagtcacacaagaaaatcagtcattaccttaaaattatagctatttgtaattttaaaaattgttttgtcccacttaatcaaccattgtatagtccacatgtagctttaactgactttatcattttcaaactaacaaatatatcctcaaagaataataattcaccttttcttttttttttttctttttttttttttttttttgagacggagtttcactcttattgtccaggctggagtgcaatggcacaatctcggctcacagcaacctccacctcccaggttcaagccattctcctgcctcagcctccggagcagctgggattacaggcatgagccaccacgcctggctaatttttttatatttttagtacagtcaggatttctccatgttggtcaggctggtctcaaactctggacctcaggtgatccacccgcctcggcctcccaaagtgctgggattacaggcgtgagccactgcacctggccaatttaccttttctttatggctattcaaaagaatctttaaaaggaaaaatctaaagaaaaatgataatatggaggacagcttttttaaaaaaatgtaactcaccctccctttaaattcaagtaaatgaaaatcattgaaaacaagagaccaataattctgagtattattttccctatatattttaacaaaggtggagatggagtcattgaaactggcactttcataaatgctgggagacattagtccactcatttggttactgatttggtaccacgtatttagagccatgaaattgctcaacttcatgaatacagtaattccattttctgtaatgtatccaagaaaataacctaaagtaaacagggggagactttatgcaaaaagacagtcatcagagtgatattcatgatggtaagaattaggaacaattgcacaaacaacggaagtgattaactcaatgacaatattttctttaatggacaacgttaggaccctaagcaattttgatggtgttatgataatattatggaattggaatagtggaatccgaacccagatcccagtcactgttctcccaagataaacacaaatggagagatgcagacagggcctgaagccctgttttcattcatggaaccatagtaaaccagacagagtaccagatgtgatctagagacctaagaggtctcaccacagcccacccaccttaccaccaccaccatgggctggtctgaatctgaggatctaatggtaccagatgccccatgggagaaagggagcagaaaggactgtagcaaaactggcataagatggcccgattccctcccagaaggaacaagagaggaggaagctttaagagacagtgagaaacccctggcacctgtggtgcaattagatcttctgcctttggagaagtgaggagagacctaggagagagggcagatatcttcaaatattgtgtcaccatcttaaatgatcataaaccatgaacaaataaatattaatgatacaatggtagtaaaaaacttaatggctttgttctcttccatttaaattactttcatggtatattttacaaaaataaaatttaaaagtagcacaatttaaaatattcaattttgtcttttgaatctaataacataaaggtacacagtgttgctgtggttttcctgggcctcaactttgcacatgtgtacacaaatgcacacacacaacacacacatcaccatatccaacaattgctatatcgaattacattatctgctgctgcttatatagatgcaataaccccaagaggtgtatgccatctaacgatttttggttgttaaaatctctaatatccttaggaaattgggtcactgggctctatggtttcaccctggttttacagttttacttgaaattgacatacttcccttttataaaaattgcttatatgatatgcccactttaggacacattgcattttgtaaattgcacaagctctctttcatccagttgcttgtagacagactctatgtttaaaaagatcaaaagtcatcaatgtgctgacatgaaatatacctcactcaagagcacccgatccttcattttctgcccaaagttgtttgttccccctggggctgttatttgccaacctatcacttgcctgcacactccccaaagaggtaacagcagaagccagcatctgcctataaagagcagtggcatccaaagattccccttaatgacaatacccctggaaacctactacccctacccctggaagactgcactgaccactctgtctcccataaaagtatatgcaaaccccacatgactattcctttttggatgtgatgacctgttttggggtctgctttttgaaagagaacattttatctctagcccctggctcacagaaaaggaaagaacaaattaatactgtcttaaacattgtcacaataataattgttataagaatcataattattagtcattatttaaagtcatacagacacactgtataaataaagtttatacacatgccctgtgaattttatggattcattatttctattttataaatgagaaaacaaacactcatagaggttatgtgtcttgctcaaggggcaaaagcctagtaagtgtccagaatggaacataaacacaggtctgcaaaccccaagtcaaggctttccactagccatgtgcccttaacaatgtggaaagaactctgaacagtaaagagcagcttggttcccaaggatgaagagtgtcataaaggaagttgtcttgggaccaaaagactccttgaatacaagttcttgctcatgtgggctccctattgggtcattcttgattccaggcacaggcatcatcatcagactgacaccccatctctgatgcgatacacaactcgcaaagcaaatgggcacttttcccagcttgattccatgccaacacttcaaccttccccaagtttacccaactgtatccttcctgttccaaaaatttggaaagtctttgaataaaataaatttgggaagaatgttcatctttattggcaaagtgttactcaataatcttgctagcatgtttttttttttttttttttttttttttcagaataatcttatgctttcccatttgaggtcaaacattgtttttatgttattaaaatccaatcagtgaaaccagaaggcaaattaaaatttgctcaagttgatcaatttctacaagcagaacatctgttcagtgactcccaccaattccttggcatattccccacaattttttttctgggactgggcctcatacctgcattctctgccctcatggttaaactgaatctgctagggtttggggtgtggaggaggtaaggcaaacaattcagcctcttcagctagacacgttcaagatgcaacagagcatttcagcctgaacctggaaccaaatgagtctgctcataattattgtcttcttttattttaggttcaggggtacaacatgtgcaggtttcttatataggcaaattgcatgtcacgggggtttggtgtacagattatttcaccactcaggtaataaagatagtatcaattttttaaatacatcagccatttcaaagaaaaaaatgcttttaaaaatcaattttagaaacaaatttcaaaatttgtctccactttagtgtcctaagttattttaggttgaagatttcaaaatatgcttgttaattgcagggagtatgtaatagaaagagcacagatactagtgtcatacagaaatggatctatatcctgtgtgattttgacaaagtagcctctgaatgtcaaccttctcatcagcatagtagcatctctctcttgaacttgatgtgagagttaaatgtgctcacctatataaagccttagcacagtgcctggccaccacaaatgcatagcagaagtcattttcctggctaccgttatcactaaagagtaaagcctaaatgaggaattcatctgcagtggttaatgccacctaaacttacccagtaagcaccagaaaatagccaatatgatatttataaccctacaaatatgaagagacaaatggacattaacaagaaaataaaagaaatttgattctaaagataaatgcaatgcacatctttgattaaatcacattttctacttctggggttaatctgtctcataattattgtattttttttttgcagagctcttgtttccaaatatagttatccatttgttatgaacacaatgagagtttgcattgatacaagtatgttttctgtttcctcctcctccttttcctcctcttcctcctcctccttgttgttcttcttcatcttctttttgtgaggcagggtctcactccctaggctcaggtaatcctcccacctcagcctcccaatcaactgggaccacaggtgtgcactaccatgcccagatgatttttgtatttaatgtagaagtggggttttgacatgttgctcaggctggtctcgaagtcctagactcaagtgatccccagcctcccaaagtactaggattacaggcataagccactgcacctggcctcttcatttttaaattttaaaatgtatccttattaaatcgactttaaaataccataaaacatttctttaatgggaataacattgaatctataaattactttggggagtatggccatttacatgatactttttctttctatccatgagcatgggatgcttttccatttgtttgtgtcctctcttacttccttgagcagtggtttgtagttctccttgaaaagatccttcactcgccttgttagctgtattctaggtattttagactctttgtagcgattgtgaatgggagttcattcacgatttggctctctgcttgtccgttgttggcgtatagtaatgcttgtgattattgaacattgattttgtatcctgagactttgccaaagctgtgaatcagcttaagaagcttgggctgagatgatggagtttacttgatataggatcatgacatctgcaaacagagacattttgacttcctctcttcctatctgaatacctgttgtttctttctcttgcctgattgccctggccagaacttctaatactatgttgaatagaagtggcgagagagggcatcttttttgtgccaattttcaaggagaatgcttccagcttttgcccattcggtataatattggctgtgggtttgccataaatggctcttattattttgaggtacgttccttcaatacctagtttattgagagtttttaaaatgaatggacgttgaaatttattgaaggccttttctgcatctattgaaataatcatgtggtttttgtctttagttctgtttatatgtgaattacatgtattgatttgcatatgttgaaccagccttgcatcccaagaatgaagccaacttgatcatggtgaataagctttttgatgtgctgctggattcagtttgccagtattttaccaaggatttttacatcgatcttcatcagggatattggcctgaagttttctttttttgttgtgtctctgccaggttttagtaccgggatgatgctggcctcacaaaatgaattagggaggggtccctccttttcaattgtttggaatagtttcagaagaaatggtaccagctcctttttgtacctctggtagaattcagctgtaaatctgtctggtgctgggctttttttggttggtaggctatttgttactgcctcaatttcagaacttgtgattggtctattcagggattcaacttcttcccagttcagtcttgggagggtgtatggccattgacattcttcacagaattagaaaaaaaaactactttaaaattcttatggaaccaaaaaagagcctgtatagacaaggcaacctaagcaaaaagaacaaagctggaggcatcccgctacctggcttcaagctatactacaaggctacaataaccaaaacagcatggtactggtacaaaaacagatacataggccagtggaacagtatagaggtctcagaaataagaccacacatctacaaccatctaatctttgacaaatctgacaaaaccaagcaatggggaaaggagtccctatttaataaatggtgcttgggaagtgggctagccatatgcagaagattgaagatggacccctttcttacaccttatacaaaaattaactcaaccattcaggacataggcacaggcaaagacttcctgacgaaaacatcaaaagcaattgcaacaaaagcaaaaattgacaaaggggatctaattaaactaaagagcttctgcacagcaaaagaaactatcagagtgaacagacagcctacagaatgggagaaaattattgcaatctacccatatgacaaagatctaatatccagaatctacaaagaacttaaacaaatttacaaaaaaaacaagaaaacaaaaaacaaaaaaaaaaaaaccccaataaaaagtgggcaaaggacaagaacagacacttctcaaaagaagatatttatatggccagcaaacatatgaagaaaagctcaacatcactgatcattagagaactgaaaatcaaaaccacaaagagtaccatgtcactccagtcagaatggtgattattaaagagtcaagaaacagcagatgctgatgaggctgtggagaaataggaatgcttttacactgttggtgggaatgtaaattaaaccattgtggaagatagtgtggcaatttctcaaaaacctagaaccagaaataccctttgacccagcaatcccattactgggtatatacctaaaggaatataaatcattttattataaagataaatgcatgcatatgttcattgcagcactattcccaatagcaaagacatggaatcaacccaaatgcccatcaatgaaagactgaataaagaaaatatggtacacatacaccatagaatactatgcagccataaaaaggaataagatcatgtcctttgcagggacatggatggagctggaagccattatcctcatcaaactaatgcaggaacagaaaaccaaacactgcatgttctcagtcataaatgggagctgaacaatgagaacacatggacacagggagggaacaacacacactagggcctgttggggcaggggcgtggtggggtagtgagagggagagcatcaggataaaaatataatgcacgtgggcttaatacctaggtgatgggttgataggtgcagcaaaccaccatggcacacatttacctatctaacaaacctgcacatcctgcacatatatcctggaacttaaaataaaataaaaatttttaaaaagaaaacaaaaaatactgatctaaaaagtggactttaaaatacttaggaaaattaactaagtccataaattgaatatttatgtggaattcagtctattttactctagttgaccaaacattaattaaagatcctcctgaaaaaaaattatttaaattgatgcatagttttattgcacctatagaaccattttcatttattatttgtgttctatcaaagctttaaaaaaaaacagaaaaaaatattttatattacaaaaccaaaatgcatttattttggagaaaatttgagggaaaatatttttaagaggtataaaagataaaatagagaccataagcaattcaaccattaaattattaccaacataaacactggcatatttcatgtcaaacttttaattcatattttgatatcatatcctctttagtttcctaacatttaaaaaatttagtcattaaatgtttatcaaaacacaggttttaagaaagttttattagaacatagctaaatttattcatatatatatggtctgcggctgctttcatgctacaactaaatagctgagttgagtcactgcaacagagaccagatggcctgcaaagcctacaatatttagcatttggccctttatagaaaaagtttgccaatccttagtctagatgtacaggaatgtgtttaagtttctcttgttattggatattcagagtttttatttttaaaactgttattgataactgcaatgaacatctctgaacataaatatttgtctctaactctgattattttcttaggatgtactttggaatttagcggaaaacagatcaagacgtgtacaattcttgatgcatactgccaaattgcattcagaaaggtcgtgccaacttacacactcacaccagatgttcatgagcatatccagatcatcacatgcttgcaagaatttaacattattattttttgttatgtcagtttgatagattaataatatttcatgctaatctgcattttctggatggttaaagaggcttacattttatctcatatatatagggcattttttaaaataatctatttatgtactttgcccattttcttacattatttaaaaagttttctacctttgaagaatatttatgtctgctgtaccacatgtgaccaatattttctctagtttatcatttgcccttcactctcaatgcctctttctccaggagcttaatcattctttggttggatcatttctggtttaccatgtttcctttatagttttagtgtctttattattttacacttctctatctctctctgattcctcccaagagactgtttcaagatagtcctcacttcactttgatttttctgaagtttcaattcagtctttcattgcttctaatacatgttagtttagtatttatttcccggtagacttttcttctcagtcagcccctttcttctacagaatattttcttttcttttctttaacttttattttaagttcaggggtacagtgcaggtttgttatatagttaaacttgtgtcctggggttttgttgtacagattatttcctcacctaggtattaagcctagcacccattagttattttttctgatcccctccatcctcccacccttcaccccctaaaaggtcccagtgtgtgttattcccctttgtgtgtccatgtgtcctcatcatttagctccaacttacaagtgagaacatgcagtatttttttggttttctgttcctgtgttagtttgctaaggacaatggcctccagctccatccatatccctgcaaaggacatgatcttgttgttttatggctgcttagtattccatggtgtatatgtaccccagatttggggtacatatattttctttatccagtctaccattgatgggcatttaggttgaatctatgcctttgctatacagcatgttttctttgtgtctcattgcatcatctctttacctcgagatattttctccttataacactgaggccaagtcttccttcaacctactgcattcagtatgtctgaaaggagaactctgagacatacatgcatattttctgtaatttttaaaatgttttattgtaatagtcttggtccttttatcctgtggtaggcagaataacaactccccaaagatgcccgggtcctaacctccaaaacttggaatatgttactttatatgacaaaaggaattttgtagatgtgattaagttaaagattttgtgaccagtagattatctggattatcagggtgagcccagtgtaatcacagagattcttagaagagggagacaggagggccagcgtcagagaaggagatgtgatgatggaagccggggtcagagagagagagagatttgaagatgctatgctcctggccttgaaggtgaaggaaggagctgtgagccaaggaatataggtgatgacctctagagctggaaaagacaaggaaacagactctctcttagagcctctagaaagaatgcagccctgccagcaccttgttcttaggacttctgaaccctagaactgtaagataataaatttgtgttgttataagccaccaaatttggggtaatttattgtagcaacaacaggaaactaatccagagtttacacaaaagggactttgcagatgtgatgaaggttatggactctgggatagggagataccctagattgtctaggtggaccaaatctaatcacttgagcccttaagaacagagaaatgtatctggctagagtcagggagatgcagcagaagaggacagatgaaaaatgaggtaaaagtgtaagtcaaagagagataaagtatgagaaagactcagcctaccattaatggatgtgaagatggagaaaggggaccacaagccagaggatgagggtggcctctagaagctggaaacaggcatctcagtcctccagccacagggagctgaacgcagcaacatcctaaatgagcctaaaattaaataatcccctatagaaaaagcaaagaaaggaaggaatagagcccttttgactccgtgattttggccttataaaacccagagcagagaaaaccagccaagtccgctagacctacaaaactgtgatataataaatggtgttgtttaaggcttctaaatttgtggtgatttgttacaacagtaatagcaaatgaataaacatctcaagttacaaaaatcaaactcaaacttaaagggtctattttactcctataataaagagtctgatagaggtcagttcttgggttgataattcagtggcttgatcctctggtcagagaaccaaattcttccacatttctgctaagctatccttgaaatgatagctacgtcccctagtggtcacagatggctgcagccactccaggaatccttccagacaaagaaagattttcttcctaaggcatctcttttaataggggggaagaaaaaaaaaactttcccagagtttccctagcaggtatttcatcttgcttcattggctggaactaagttctatgtaaaccactaagaatcactaacaaggaggacagaaacaggacttggatcaattaaatttacctaagtcacataggatagggatgggcaacagaatgaaaggcaggactctgcttcgtgggaaaacgacagaaatgaccatgagtaccaatcatcagtgtttgcctcaaggttttagttatcctagaacagtgagtgattgatgcagaactaaggttgcccagctgaaatggtgagtgaattagtctggctccagctcagtttccacaaaattcaaaaaccaatgtagaggacatggatgtgtgatcaggagtctaaaatatcaaagatggaacactgaatgttaacatttaactccaaagcaaggacctccaagccattaaagagtctaggctctggagaatgagattgggaggaaattgagtaaggcattcgaatccagaagaccgtaaactgcctgtgtcccatactaggaaagcaaagtttctgagagatgctgaggagctggccatagctgagctacatggttaggtatgtgctgggctggctagagatgggatgctgtgtatgtgaggtgcctctgctctgcatatgctgcacttaccttggtgttgggacatccagcttaccactgctgcatacatgatgctcatgtcaacaagctggctggtcaggtcaggatttatcagtatgggaagaaaatttgtccagctttcaggaagtctctttatgttagagagagggaggaaggatggagagagaatgggtggcaggagaaaaaaacaggacagataaagatgggaagggaaaggaggaaagtcaagggtaggggagaggagaagaggaaagggaagggaagagaagggaggggaaaggagaatagaaagaattgttttaaataaatctgatcaccttattcctccaattaaaaccttttaacacctgtttgcccttttcccatgctgcagagccctgattttgttctgttgtccacctatatcttaaatgactcaggcaatgctaactgaattgatcccattctccttgtcggtgatgactttagtggtttgcttgtggcccaattctagtccatgagacagatcagaaggtcagccaaaggtcttagcagaatttagcgtggcttgcatttcctgcatactctaggctctgacagattttgtggcttcatcttacacccattagtccctccatctctctgttctggtacactgaattttttccattacttcaaagtgtcccagtctcttgaggctggaatttttctgattctagtcttattttcctccttcctacacctttttctctttctttaaatatcacttcttcaagaaggtgtttcttaccccattggctagatcaggtttccataagtatttccattagtactcttttctttattcattaagtcatgcaaaaaaatattatgttttatgttgtcagtcagattactaaatgttgtccacaggacaatcagccatcaaaacagccacagcccttgcactcaccacattgttgatttctcaataaatgtcagctgggacagctgtacccagaaatctctgtcagggatccgtctgtcttgtattgcactagttccccagcatttataatggtatctaacacatagtaggtactcaataaagagttgttgaatgagtgaataaataaggaaagcaggaaattgaggatccttaggcaatgaaaatatctctaactgtacctgatgagtaaaacatttctgctagggagatcaactgttcaattacagtttggaattgaagggttttgaaggacttaggactttcagtgctaatattgagaatgtcctgagcaaaccgagacaagttggtcaccctctatttatggccctccaaaccaaaagagttcccctgtcctcactttccactcttttccacctgtaactaatcttctgggaagatatttccattctgcctctaaatgaatggaaatgtttcaggctctgccattgtttcctaaaatggtagattctcaaggctgagaggttatgtattttaccatcagaattttaaattctggattcctcatttctggatagagtcaaagcggctgaagcctgtgttcagccatttgtactcatcatcttcaaaacttctcatccgtaaaaaggtctcccaaaatcaaagcactttagagatgccaaacaggaaggttgaaaataagccagtgcattcaacaaagcatgaaccattgtgcttcttggcttcctatttcagagacacttccgaacaactcttccacagcctctagcaagcaatgtttctcttctacataaaaaccttgaaagagaagagaaaaaagcaaaggtctatcttatatataggcacatatttgaacctcagtggtgtttttgctccaagaactgaaattcgttcttcacagagataatgaaatgctctgaaaatgacccaaaagacattttttgggtcagtccaggttttgtttgttccaaggcatggagtaatggtgtaaggctcttagctctggccagaatttcaatgttctgactccttgcccagtattctcactcttccacattaccacaatacagcattcttgtgtgtatatgtcaataaattgttttcaagtttgattttttaatttaaatatttaaattcaacatgttttcatggttcatgtttcacctagaaccagcatactcaaagggcgggtgtttatatttttattgatgctgactggtaggactcatattaagggttgttgaattttgacacgtagaagtaggtgagaaaacacactctttggcaaattataaaggtaaatcctcctctcaaggcatttttgtgtgttcttccaagacacactccctgctcatcactggagcctccccctttcagtattactggcatgggcaatggcaggtctcagctttgccacccaggctggagtgccctgatgtgatctcggctcactgcaacctctgcctccaaggttcaagccattctcctgcctcggcctcctgagtagctgggattacaggcatgcaccatcacacccagctaatttttgtattttttgtagagatggggtttcacgacattggcccggctggtcatgaactcctgaccccaagtgatccacccatctcggcctcccaaagtgctgggattacaggcatgagccaccgcacccggccaggtgtctgcatttatttatttatttatttgtttatttatttattttgtggaggtacaagttttcattctgattagaccctattattctgagggcaaaaactatgttttgtgctccctttgtatcacctaggtcatctggtactatgttgggcatgtatttatttatttattttatactctaagttctgggatgcgcttgcagaacgtgcacgtttgttaacaaacatatgaaaaaagttgtaggtctcagcttttgaaaatcaagtattccatcccttttgaagtcatgtcaagggacctaacatgacccatcagctacttctctcacaagtgacccacatctgctcttcatgaaacagtcaacacatccactactcttacaaattatcttctcttcacttcactgtctgagcctctatctagtcaagtttctcacacagtagatctctgaagcacgagtcagataccagtccattgtatgtcccaagctccaggagtcacaaatcaagctctttgagtgtcctattcaagccccttcttctacatgatggaagagcccactgtggtggcttctgttggagccttgctcagatccctttcaccaggtgggtgcactcatctcccagttgctatgttggccacgaacaactcacagctgcccttctcagggagggccttatgagacagcaggaccctctctcctggaaggttatgcccatcacactacaggccagccaatggccaatgactgactgacatggggttcaaaagtctgaaaccctagcttcaaagtgagacaattctgtgatgcaattcatgctccagagctcccaggcgaaccaagctagactgctttccagctgaaaacctctcattgctgggctccttcccctgccccatcctgcatccctcacttcccacctcctgagagcacccactcaataagtcacttgtacaaggaaccctgtgtcaggttctgtttctggggaatccaacctaagacaaggcctgtcatccatggaagcaggtgaggcaagagaaactcacaacacaacaatagttctgttcataaacctcttctaattttcatctgcccacatccacccttctatgcccttcagtggccaatgagtggtgagtggcaagagtatccaaatgaatgtttaccaacccctttttaaagtctagcataggtggccttactttagaatatgggaaatgttagcatctatttgcttgaggccaggagtgaaatagttccctttgacttcctgatgttatatgaggtgcatataaaattctgagcacatgacaggagtctgctgaatgatagctattattttggtcctttaaaataatgtcctgagaattcattgcatgccacatgctaggctccttgacaaacattattatctcattctgtcctcacagtgactcttcagagggtcacagtactattaatcctcattttattgatcctcattcataaagctaaatttcagaaaacattcaatgcctgggcctcattccaaacctaggtttttgcctaattttttatcaaacctttttctcactgtgctggtttcccaccctaaaactgctctcccttttccagtttgttgctcctgcaacctcagtcagcagggattcaagctgcaggttctaacttcgttcttgctgacagtaaagtattttgttttttttcttccttggcattcagatctgcgtgagttctgaagaagaacaagatggttttatcagagtcctcagtggaaaaaagaaaggcctcatcccccttgatgtactagaaaacatctgattgctggctcctcctccgtttgcagtaggcaagctctgctgcgatgcctctgcctcatctcacactgcgtcaacccaaaggagctgccgcactgacccagccccccaggaaacagtgagacaagaatcaagtatctgagactgtggagtaatagccacaaaacagagggcccactgcacagcatatccaggctgccacaggtggggacgaggctgagagagtcagcaggcagagccagatgccatgcttggcagcagcagtaggactataaaccacagctgtcccccaggatcccactcctttcctgtctgtgtggtgtaagttaacacactggagtgtgctccagtttgcagggtagcccagtgcaaggttcagatccatgtagctaagtattatcctgcttccagacctatgtcaccagtaccaatcagtcagtgtcatcacatttcaggccccaagcaatctctgtgcaaagcatcagaaagacctgcttcccagcccccagcattccagtgctctccaggcttcctctctttgtgattgtgctgtccagagtgtccagcttgttctttctttctcttcagtcctctgagtacatctggtggtgtgcattagatgtgagggctatgttgacatggcatcacctccaaagacctgacctgcctaaagactgatgacaggccatccttcctgctgttctaggtactggcctgggtgacagagcaggacatgagacatagatacagtggggaggagaagtggggaaaggtggagcagagagttcttacttattgaagattatacagccctttcggttatgaagtccctgcttgaaggcaatggacctggggaagagactatcacaaaaagtctccattttcattttacatcctctctattggaggcagcacttttccctcatgctgtcctataggactccactttgaaggttgtgcctacgttgcagggaactaggaacatggaggggaaccaacaacagcatcttagaagaaatgtagccaaattggagtccattcttctttagggcagtatatgaaatcctagcagatgtaaaatggaaaagaatcctaatgcttcttccttcagaaagtagaggaactaggggcccaattagcatcatctaggggaatctctattactctgtacttatactaatgtttacaagaatgcaatatactgtgatgccttcctactcaagcctcctagcattcaaacttccatcctattagtcattaacatggttaaacttcaattcacaatcaccttggaatcaatgtcagtttgatttattttgttacagagcaataaaatcattagaacaatggtttttaaaagacttaagtggatgcatcctatgcatgtaagcattatttcccaaaccaaagcatcattcatctccatttatttcttttgttcccgctcagtgtgaagttgggaactgagaggggatggctgctggtttcacagaagtttggatgccttactcttatcttaaagccagcatccagaatttcctccctctctgatgccacatgcaaaaccaggtgtacgatgtcaagatggattctttgagagccagggtagatcatatgactgcctttctgtaaaattggatgcctagtacaaatgctctttgcctctaattcagtattccatttaataaaaacaatacagtggctggaaaggagcatcagaaacatgtgtcctgatctcttctttctgtcatgatatccattaactttttggtacaatgatgtcacatcatatgcatgtttaattaagatgaatcttaaaaatgagtttgccttttacagttgaatagaaggaagatgtggtatctagcctccaaggtagtctcccaaagatccctacctcctcatattctttcctttgtgtagtcccttcccacactgaatcagggctggtcttatgtgaccaatagaacacagcagaagtagtactacaaggctgtcttagtctattttctgtttctataacagaatatctgagactggttaatttataaagaaaagagatttattttgctgacaattctagaggctaggaagtccaagaagcatagcgctggcatttatttggcttctggtggtggccatgtgctgtatcataacacggcagagaagcagaatagaaagtaggcatgtgcaaagaaatagagagagaccaaacacaaggagcagccttgatttttaacaactcactcttgaagtaacaaacccagtcccaagagagcaagaactcactcacacccgtgggatagcattatctattcattatggattctccccatgacccaaacacctcccattcagcccacctcccaatatagccacaatggcaatcaaatttcaacatgagtttcagaggggacaaactatattcaaaacatagtaatgaccccatctcaaattgcatctgaggttaagttttaaaagcagctttagccttgatctcttggaacactcactgttggaaccttgagataccataagaatttcaactaccctgaggccaccatgcaggaaagaccctgtggaaagactacatatttcatcatctgaggtggcagacatcacagagcagagatgagtcgtccctgctgagccctgcccaagttacagatttatgagcaagataactatgtggggattttttaagtcactatgttttggagtgatttgttatacagaaacagataacagaagcaggggttttgtaatttaagtcaatgttagaagagaaaaatgctctttctacacaatcaggcccaaaagcgttgcaaacatcaagtgttagcaggcaattatccctctaaatacaagatatgtagtattccctaaagatctggagtcatccagacctaagggaaaaagcaagatgttcctcatagtatagatttccatgagtgcttacacaaacacagagattttaggagccacagctttttttttcttgcctgtctgcagaaattaaaagcacaaggatagctacggcctaccaaagtcttaaaggtttgcaagactcagaaaatggctaaaagaaggaccataatttttgagtggagaagagatgaagatctcaggagatactctggtgaggagacagggaaggaggggaagtgtccatatgaagaataaaaaggggacctgagggatatgctttgtagtgtacgaaaacagccttgtacccccttacctctgcccctgcctatagccaagggatggtacatacctagctgcaccagggaagatatgccctatacttcatcactagtgccataagactttacttctattatagtaaatttgaaatgaagaactgagtgaaccttcctcagggctccagaaggtggagaatagaactccctttacttcccatcactagcagacatctacagcacctctcacatgggcagcagggtggcaaagagagcccatgtgtagatatccagattgctagatttcacagacagatacccacatggctagatttcacagatggttgatttcacagaccacttttccttcccaaatacacaacaaacaccaccaccaccacgaccacccatacacacacactaattcactcccattaagaggaagggtccagcatttgggttgcatatttagagcaggtagtggagagaatatggcaggatctattagagttagtgttctttgctattaaagagagaaaaaaccagtgggaagatcacaacaccttggtgccaagtactgttaaaagacaaaagagccagttgtccaggaaattggctactccaaggaggagagagccaagaaggaaatctactggccagcctaagcctagagccaggtccagtcagaaatgcagctgtgaaaaagtggtgtgtgggagaaaaaagctgagatttaaataaagtgaacttgacttctttactcaggacttctcagagcctttaatttgctaattctcatagtaaatctccaaaaaggagatttaaaactgtggatcacctataagactctcctaaaacaacattccaaggaacatactttgggaaattctgcagtaaagcattctcatatcagatcacccaatagcccctatgcttctactatcccctctcttcctacatctcactgaaatacttacaaagggcaaaagcactcaatcctaatgataagaatgaagacaatctattctgggatctgagttggtaggagaataagctaaagtatgaatctgtatactccaagagtgaaaaactccagagaaagattagttttatcacactgatagctgtagcaaacaccagcatggagtaggctgtataaatctgggaataaaagaaaattcatcattgcccaaaatagcatccccaggaaactgagtgagcaggtgtgctccacagatttatcacaaaacagaaattattaaaaataactcagacagaaaattaaaactagtttaatgacatcctgtaactatctcctagattttgctaagttgccactctgttgtgtgtttcatacaacacctggtgttttgacccttagagcatgttttttcttagatttcaatgagaagttttaaatagtctttaatcttcctgtggataatacaaatttatccataccttgaaattttaacaagataatagccatttattttaacagtccccttttgcaaatgaaaagatggcagggttttttttgtcagctcattgtcaagcttacacaattattgaacatcctccgtgtcttcatggaagtaaggacataccaaagtcctggaaacacacctaggaaaagtacaagacctatttccaagatcatggatcatctttagaattcctccactggcattatttactcaggttttcaggttattgcctgaatccatctttttctatacatggcaaaatttttctttgtctttatcagctatttgaaaattatgtgcttagtttatttacttttactccttctttaggtaagaaaaagcatccaaggttataaattttcctctgagttcagcttcgaccacattagatagctgtttctattttcattcacttataaattatctttaactgtagtttttattttttatttgatttttagtgtgtgttaattaaaacattgtgcactatagtcggaaaatatggtacatatgatttctgctttgaggaatttattggcatgttgttttgtgctctaatatattattcatctttataaatgttcaatggatgctgagggaaaagtcatatctttaatatacagagttcaacatgtatctattaaacaaatcctttaagtattcatattcttttttttttcttttcttttgatatagagtttcactctgtcacccaggctggagtgcaatcgtgtgatctcggctcactgcaacctccacctcctgggttcaagaaattctcctgcctcagcctcctgagtaattggcattacaggcacctaccaccacgcctggctaactttttttagtagagatggggtttcaccatgttggtcaggctggtcttgaactcctgacctcaggtgatccgcccacctcagcctcccaaagtgctgggattacaggtgtgagccaccgtgcccagcctaaatatctatattcttatttatttttgctcatgtgctccgtcaaagacaaggacaagcaacagtggggttgcaataaaagatattctacaaggccctccaatcacttccttagagccagccttgcagggaggaaatagcagccagttctttctgccacagtctccctttctataatacatgtaggatgaatcgctcaggtcatttcctaagtaaatattctctttagctccctggagcaaactgtaaaggaaccacttttaaatgaagatgttccaaagatattcttagaaaacttcaatttcaaatgaagagtatttgggtcatggaatctttacagaaagataaattacaatgaaacccaccatcactattgaaaagctgttaagggtttttctgataaactcaaagaaacttacaagttcctaattttaaggtattggggtgcttttctttccttcatgttaggcatataacaaatgaagtaccgaaatatatcttctactggagtggtattcctagaagcacatagctaaagagtgcataaagtaggtttgggataatcaatcttatcctaatataaatacttgctgcatcgtaagaattcatttattcctgacaataatcctgatagctgagttttattgtctccatttttcagatggagaaactgagactcataaatattagatcccttgcccaaggtcacacaactgataaaagttggaatgaggttttgcacctgtaacagcatccctagtgctcctaagtggctggcttctgagagcatttggttgcaaaattaaatgttggagttgcagaataacacgcaggcaataattattattggtgccatgccttactatatagtttattgtaattatttccttgatgataataatagtttcaagttaatggatttatagatgattatagcaaaaagcatacaatgatgtagaggtggtgccagaagagtctgcattacacttatgaatttccaaggatccatgagacacaccctcagccttgcagactgaggaaactgaagtgttggtgcatggaggagaaattcacttctcagagtaggacttacatttaccaacctcaaaaagtcacatagtcccaaaaataataatttatgagctcacattgaaaataatacagtcactatgttgagggacaaactttactggcatatctatactacttggtctccctgagggcaactgcattaaatctcctctgtacttggaagggcactcaatgactatggaggttagagatgtgtttggtagcctccaactgacataacctgaaagagccacatgcatgataagaataatcttgacaatggtacccatcatattggataattggataagagttcctctcttcaccaagtgcttaaaatggccaatgctcacttttgcattagtgatctcactttgtctatgctttcatagcatagaaatatgtccccttctcagaggcacatttcttactttcaggtaagtcttgccctaaccagggagtgcctcttttcaaagagagttttaatctctccaattttatctagtctgtgcttaactttctgaaattttaactttcaaaaggcaagtatgcccttatttccaggttctcaaagattgagtctttggatggggttcatatcacagctccaatgcatgccacctacaagactggtaagggtgaaaatcacataatgaactgattaaatatattcatacctaagagtatctaaatctggacatggtgaatcacaagctgctggtttcaagacatggacttttctttggtcatgacaatgtattatggtttgaatgtgtcttccaaagttcaaatgttggaaacttgatccccaatgcagtagtgttgggaggtgggacctaataggaagtgtttgggtcacgggggcactgccttcatgaatgggttaatgtctttatcttgggagtggattcattctctcttttgccctttgtccttctgcctttcatcatgggatgatgcagcaagaagttcttcacaagatactaacaccttaatattggacttcccagcctccaggattgtgagccaataaatttctgtttattataaatcatccagtctgtggtattctgttatagcagcacaaaatgaactaagacacaatggttgttctttttgtggtaaaatcaacaggtatttgtagtttactgggaaagatggtaatcaatcaaacaagtaatactaaaaatgtgtgattagtgctacaatagagaaagtacagtgaaccataagagcatgctgggatttactggtttcattaggaataggacctacaaagctcaaagctctcatgctaaaaatgttctcactttccaaaaaggcaattttatattggaagtatggtaaggcagccttctttcagctctttctcatataatttcctaacacttgaagcactttaatttcactagaacttacggatgatgaaggagggtattttgtggatattgggcagagttagattttgtgggctaagggtttttttgtgggtttttttttttttttttactttttaacacaaatatttccaattgtgtgggcccttcatgctggagtgtttgagtatttgagcaatattagcagtattaccagaagattgggagagggatagaggagctggtgaggaagaggggatgggattaggtagaggcatgatggaggccacaggagaaagaggctgctgacttatgcaacatataattccaaagagggtttaggttcatgtctcatctctagagaaatgtcctaagaagaataatccatccaggtaaggccccatccttcccacatctgtcctgatgtttaggaccccagaagaaaattatttatagaataataagggttaaaacatcaccaaaatggaaacaaatatatatgcttcttcacaaccaagggaaccaggtttgtctgtttttttaaatcacaggcatcttgtgatttgggccaaattcctgtcattcatgatggatctcacaagagccttcgtggtatagagagatcccaaacatgaaactgctcacccctagtgctgccaaagttgtttttctccctttcaatcacaggcagctgggggatggggggagagccaagacattaaatactaagaaattagtttacaacttttgcagatgtgatattaaaaacataaaattcaatgcaatgaagcagtgcagggcaaattgtgttgatccagtgctgggaataaatctatgagctttcaagaccaagaaacatctattgcactcacaggagaatcagccatctgaggagtatagtgtactctgcagaaaaagagtggaacaaggaggttaggccgggcatgatggcatgcacctgtagtcctagccacttggaaggctgaggcaggagggtcacttgagcccaggagtttgaggctgcaatgagttatgattggtccactgcattccagcctagacaacatagtgagaccttgcctctaaagtaaaataaaaagaatgggacaatgagggtccaaggactcagccaagagggcagtagcaggattcagatgaggttccagatacagcaagctgtcgtgtggggatggggcagcaccaggcaatgaagaatcaccaaaaatgtagcaagactgagcagattgtactcagctctgtgtctactgaaggaagaaatacttgaagagcccttggtttgaagtgtgagaccctcaatgcaccagctgaagtaacagcagattgatgctaacctgacttctagaaagggtagttcctgttacctctagggctttggttttgctgaggagcctgcaagctggaccacagctgaactttcttgaaactttgaagagagccccctgtacccctagtccaatgagactcattaaggacctctgatctccattgttctaagataacacacttggattgtttaagccactaagtttgtagtcatttgttacagcaccaacaggaaacatacagcattgcactgccacttggaaaggtggagagataacaagagaaatttaactgaaccccattgttatgcctaaagaatattgagctcccaaagctcagaaaaagccagctaaggagaatggaaaaaatccaatagcatggtggtaatgtgtaaccagtgtaggaaagttatcatctccttggccaaggtagcctcggatgagagaagtggggaaagattcctcagtttggccactaggactatatccaagggcacactgtccctgccaccttggagcctacactgaggatgctactgcagtgcatgttctaatcagaaggcaaggaattccagcatgtgtgtctacacacatacatgcacacacgcgtacacgcacgcgcacacacacacactcagatggaatttatactgcactctgataaagatttaagcagttatttcttctttgagtcagttgattgatttcaaagccagtccctacctgttttttacacaagaagcagtctcagtgcctaggcctctcttttcttacctctctctttaacccttctgtccccacctccaccaccatccagagactaccacactcagaaatattccacctccttgaggaaataatacctttcttatgtcttgtaaacttcatagcctccagagatgaatattaaaaatctgtttttctcctcccagttcttgtttttctcagcagggaaggcgtaaattttggtcgcagtgaccgctggctttgtgtgacctgggaaagcaaagcagcgccgaagataagctctggtctgatgataaggagatgatgacatatgagcatttccaccttagcctgtaatttatttctcgaatacattatatatttatatctcaacacagatcaatcattaccagcaatgagtaactgataaagcatgagagaaagaggtctctaagcaagagaagactgcgggaaacaagaatataacatgcttggggtgatataggtaggtgaaggaacccaagaagaagtttatgggacatcatgaagtataggtgaaagtgacattcagtaagggttctaactggtgttggggggaagacagagttggtattgggagagctgaaacagaagggaagacacttttaggaacaagagaggagcaggctagcaatgagggaggctgtgactgagtggcagtctgtagccatatagggcaacaacaagagacccatggcagcacagcaaggtcaggcagcctgtttggcagcaacctgctggcaccgtgtgctcatagctcctccaccattgcaatgccttttttggtggtggttcttccccagagccaacctcaaagccagaatcatcctcctaaagtatcactttgatcctgttgtcaccctgttaaaaaccctccaagggcttccccagggatacagaagcaagtccagcctctgcagtggaggtttctccagaggcctcagaccaaactcagctcttctgaaactgcatagccctgctctgaactgctcaagcggcatctatcacttcctgtttgactagtgatgattttaaaagtagatttcagtgagtagactttttgagggcagaatgctaggcttgattgccttgcaggtgggagtcaagggaaactatctctgtgatcatttcagaatgccatggagtattgacatcatcagaaaaatccctgttaccagtacactctctcacctcttacatatccaggtcatggtactagatgaccatgacttttgtctataggaggttaaatcagtcaacaaagcccactaagatagagatcaaatccaagaccctgggctagagatatgattatattctattccttggcaagaaactccagctttagccccagtcacaaggtgtgggtgtgatgttgcagatccatcgccacctccacaaaagcaacttaaagagcactcgctgacaggctgctccacaaggtccccttgtgcatccaccccctccaatctctagtgctcttagagacagctcagctcaggtagggattgggggaaaaggataggaattatttgcatgttatgatttttaagtctcaaactacaagtagtcttaaaagtaaagagcattgagcaaatctgtgtcttagattaactgtaggacttttgcgagcacacagaaggaggaactgcaagctgtttctgagctgcgctagctcaagctggaagcaaaactcagtcttctcaccattgtttacgagaaatccactcccataaatcatgtgttgagtttagtagacttgacctgatgatatcaacaaagagtctcaggaggagtcctggcacttggcttttcactatctccctgcccttctttcctgatcccttctgattcctcccaccatgctcccaggagctccaaactcctctcactcttttaaacaatgtgtttctctccagctccttccttccctttgcacaatcaaacacactacagtgctcaacaggactagaaatctcccttttgacaagacttactctctgcagaagaacttagattacagttaaaattatacaaataccatgtttaattaccaaggaaagcctccatttaaaactgacttagaggagctccaagggtttctcccatccagaccccttccctggttcctgccctagaggacacatctccatgccgagcatctcagtatacttcttcatacactatcaatctctgtgacatggcaaaacaactgggattgtctttcactgtatccatgtcatgtttctgacacctacttctgaaagtttcactatttcaactcagctgtctgctcacgtgaatacaatgtgtgcttatttatttatgccttcccttcatgctgaacacaaaatgatttttattgggctcatggtttgagatttggataattaaagcaaatagatttcttttggaaagtcacttttccaacacatcacagacgagaaacaatgagggattcttagtgattgttcactcttggaaaaatagaaatcataccccacaccaaacagcagaaacagaatgacccaaaatgccatgatttcactgcactagtcagtagttttttaataatgcttctgctttctctgaaatattcacctgcttcggttccctagagcttcccagcactgaatgcatttggccttcccttcgcatgatttcagctgttatttgtttcccacttacacaatcattctttgaaggagtctaatctgtttcctaagtgcacaagaacagtaacaacattatttgctcttgcataagtttagatatactacaaatgtaatagtgtgctctaaaatataatagctatagtatttacaagcttattttatatttattttacttatattgccactgcatcacaagaaagaacataaatagtaaatcttaaataatacagctgttaagctagaaagcaactattagcgtttgataagatagtgagaagagcatagtttttttttttttttaatacaagcaacctaatttagttccttactagctggtggcctcggacaaattatttaacctttctgatcctcagagataataatatccacctgaaaagatgttgagcaaattaaaggagatatttatgtgaaagcgtatattgtaatgtgtggcacatagaagggtcactttttgtttttttttttttttactatttttgtcccccaagagtggtattatcctattaagaggcagttgcactgtagtaattttttgaatataaataataataataaaaattcttactgcacaagtaagtagttttttgatagtgacttagtctcctatggtaaatattttcagaatatcttttgttcagtatgtgaatagttaataaaccagcatagtacatgctgatcacctccaattccccacttaacttgcctgagcacagtgcaaagcagggtaaaccaaggattgacccatgcctctgttgactgactgccatctccttcaaaagctatgggcaaaattctttatgcttatatggtccctgtgtctgaaacactcaaagcatttttccagagattaaattggggctttcatatgaccctggttaataaatgtcaagtcttcaatgtgaagtctcagaatgtccttttgaggaaggtggttgacaaccttatcttccatacaaataaactgaggcatggagcagataaatcagaggacttgttatggattcttcattccttatgtgtacacttttagtttatatatgaagaccaatgtttcacaggggtgcacagaaagccagcaggaatccccagagagaatggctgtggtttcttggagaaggcagcccaccattctaatgtagctgagaggattacagtactggggtcgaggggtgctgaggcagggtctgcctgaactgggtaaacagtctgagtcagtgaggttaggacaagtagataagctggaactccaaaggtgtgcagtgtgatacctctcatgggaaacaaaaagttcccgttttggaccaagtttccatggctacagtaaacctcttgtcaggaggaaagaatagctccagcagggcctaagaagaagggcctttgtgcatggggaggactagagggctctgatcagcagctgtgagaggacagagctccaacctaccagcttgaaacactgtcggtaaccgtgacaggaagaagcagaaagatttccacctcatggcaaccacctccaccacaaacacagtgggccttggggaccatcaccctcctttacaccatgacaacatagctaagctcaaaatgcttttcccagaattcccatccccaaatgattccatgtcagtgaaggtcacaagataaatattgcatgagatttaaaaagcagaaaggaagccccaggcatgtttttgatgctctgaagataaacaggaggcacgaggcactttgacagttcactcacgttgtcactggctgttcttccaattcctgctctatctcctccttcagcttcttcacacatgtacacagcgtcttgttaaggggcacagctgctcctgcatgttagtcatggcatcgaatttgctggtgggaagagacagacttgagttccagttcatcctcatggggtccagcttgtctttgctttttctcatacccacctttctatctagctgccggcctgggtaccctcatgctactttaggcccaacaccagatgaagagatacacagtctgtgtaacataggctcctcccccaatctctacaaaatcacatccttataataaattttgttttctttattatttagagtagccttgcttttctgatggaaccccaagtgatacacacatactgtcttatttaatcctcacaacagtcctagaaggcaggcactattattatcctcgtttcacaggtgaagaacttgagaaacaagaagattatcctatattaattagctggtatgtggtgatgctgggatttaaacccaggcagtcagattccagagcctgagtttcagctctgtactgatttcttccttaattccatgaagtctagcttttgttctcaccagttttctttttttcttaagaaaagaatgcccttaatactttaaaaaattattctcagaaaactttcttccatccttcttcttctagacctccctaaagcccctgatatgtttccttattcctttcctttggctgtgctgaagtttcttttctgttttatttcccagcttttctgctttccactgtctgccatacacatatgcacatatacatgcatacatgcacacacatacatacacacacgcacacacaggtttgaccatgtcattctagctccaaattgcatgctctttctttataccacactgtctgcctgacagtgattcatcatcagtctcctttgctaacccagatctctgccatctcccactgggggctgccagggctctacgcctgctaccctgtaatagtaaaataagtgatcaaactgatcaactgtaaagcacacagaaggacacaggccagatgggaaagaaataggacaagggagggaagctgagcaaacaagccaaagtaagtttaactgaggagcagggcagaacccagtgaacgcttataaggcagaaataaactcccacgggggggaaatgcttttgtgacttttatacagagagaagagaaagggccaggtcataaaacagggagataagagagggaaaaaatatggatttcttggagaagaggaaccagaaggaccagagcagagttattcgttgagtcaactgagcagtaaaaactgttccaatgcaaagctaatcagcagatataggaccaagagagaagttcttacacttcctgaaaccaggatctgaggctgaggacagccagaagcccaagggatatacctagtgtcaggacctgcaaactcaagagaattgtccagccagaaaggaattgataagttttttgaaacttttctaaattaagaagcataaattgtgtgtatgaatgaccttaacactaccgacttctccccttgcagagcacagtccaggatgactgacccagggatctgccttttattagagaatctcctgagaatgagaaattgcaattttccaagaatgagacagtgtcttgtccctatttttccacatacatactaacatgagaaacctgaacaccaaaaagtaaaataaaactcaaaccaaatccagaaataaaatttggctttttgaactcagtaaatttggtaaacctttgcagaggaaaacttagctgacaaacacatgaaggtatccaaaaaaagagacaagactttaaaaaatgaaacttgcaggccttttacccagtggtcttgggcccaggaatttgttctatttctgaatctcataattggaaaaatactaaactgagaaacagctttttacccaaactttaactaaatgctacttatagtagcataaaattagaaacagtctatatatggggcaaaaggtaatggttctatagtaatataaataatctgtgcaatacatctctaccatggatataatagaagcatttctttaaaatgaagtgtgtgtgtgtctgtatgggtagagacagagaggcagtgacagagaacaatagaaatattggtaagtgaaagagaaagttgttcaatgttatgtagagcacgcactcattttggtgagtctgcctgtgggggctctttatctatgaatacatgtgtagatgcctaggaaaagtctgaaaagaaatactgcaaaccctaacagtggtgacctctgggagtagagagaatggaacaggaaagccagggcatttgttttcttcttttttattctttcaaattccttgaatttttttagatttcaagcagaaatctgtccattaaaatctgttctccctgttcatggttgtatctcagaagctgcttttttgacagggactacattcaccagttttccttggagctagatgtggccaaatttcaacaaaatgtgcgcagaaatatgaaccactttcaggtcaaggtttcgcacacacggagggccaatctactcttgtactctctccttctaccagtgggaccatggatatgacattggagcctcaatcattgatagcaagactctagtggatgttggaatcacacccttgtctctgaattatcacatggggaagaacccacgacttcccttgaacacttacctgggatagttacattaacaagaaattaaccttgatgtctttaagacattacatttaggtctgtatcctttcactttaggttaacctggtgaaaattacattattgctttttcataaggaatttttaaaactatacgtattttgagaaaattatagatttacatgcacttgtaagaaatagtagaaagaaatcacacatactctttacccagtttcccccagtggtaacatcttgcaaaaccacagcacaatgtcacaacagaatattgatatggagtcaaaataaaaaacatttccatcacaacaagcatctctcatgttcccctttataaccacatccaattcccttcagcccaaatccccaccttaactcctagcaatcactaatccatttctagaatttgtcatctaggaaatgttgtataaatgaaataatatagtatataaccttttagagttggtgttctttcactcagcataatcctttggagattcatccaggttgtggcatggatcaacagttggttcctttttattactcagtggtattttatggtctggatgtaccacagtttgtttcaccattcatccattgaaagacgtttggtttgtttccagttttgtattattgcgaataacacctctataaacattcatgtaaaggctttcatgcaaccataaggttttatctctcagatagatgcctaagagcatgattactgaatcatatggtagttgtatttttagttttttaagaaactgataaattgtttttcacactgatggtaccatgctacgttccccctagtaattaataagtgatgggatttctctgcattcttgtcagtatttggtgtgagcactactttctattttacccatttttatacgtgtctagtgattttcttttatatttacttttttgatatattatatttgtacatatttttggagtacatgtgaaatttcattacatgcatagaatgtaaaatgttatatacacaatgtgacatttcattgtggcttttattggcatttccccaatagctaaagatattgaatatgttttcatgtgtttgctatctgtgtatactctgatgaaatgtctcttcatgtcttttgcccatgttctaattggattgtttgttttttcattgtttggttttgagagttctttaaatattttagatactagtcctttgttggatttgtgatttgcaaatattttgtgatttgcttgtctttttatcctcttaacagggtctttctcagagcaaaagattttaaattgtagtaatgcccaatttgtcaacttttccttttctggatcatgtttttcatgtcaaatcaaaaactctttgtccagcctcagatctcaaagattttctcttgtgtttttctaaaaattttatagtttaacattgtacatttaagttcgtgctcctttttcagtcaatttttgtgtaagatgtgagatttacgttttaaggttcatttttttttaacttatggatgtctaaatgctccagcaccatttgttgaaaaggctctctttcttccattgaattttgtgccttttatacctttgtgaaaaaaacacttgggcataattttagattatttttgtgggttattttgttaattgatctatgtgtctacacttctaccaatactgcactgccttgattactataactatataataagtcttacaactgagtagaccaagttccctcattttattctgctttttcaaaatcattttggatactctagctttatctcatataagttttagaataatcttgtctatactatatatctgtaaaaatctttctggtgttctgataagaatagcattcagcctttatatcaatttggggagaattaacacctttaccatgttgagtcttccaaaccataaacacagtatggctttccatttattagatctcatttgatttctttaatcaatgttgtatctgatccaaaaattttacatgttttgtgagatttccactaaatattttatttgaagtggttttaaatagtatcatattttttaattttagtgtctttgtgttaattgctagtatgtagaaatacaaatggtttttatatgtttgtctctaatcctgtaaccttgctgaacttgtttagtattagaatccatagggttttctatgtagaaaatcatgttatttacaaatatggacagttttattttttcctttctgatctatatgcatttggttttcgtttcttaccatattttactggcaagaacttccagctctatgttgaataagagtacttagagtagatatcattgcctagatagaaagcattcagtttttcaccattaagtataaagttaggtgttttttgtgaatctctctttatgatgtagcaagttcccctctatttctacttttctgagagtttttgtcatgaatggatgttgaattttttcaagtgctttttctgcatcaattgatattagcatgttaatatggtggattataatgattggttttcatgtatttcaaatattgaaccatccttgcatcctttgtataaaactacttggacatagtgtataattattttacatattgctaaatcctattgatttatctaaagatttttataaagatttttgcatctatattcacaaggtatattggtctgtagtcttccttctttgtactacctttgtctagttttggtatcaggataagactggcttcataaaattgcatttgttattttattttctttattttagacatggggtctcactctgtcacccaacctagagtacagtggagtgatcatagctcactgcagtttcaagctcctgggctcaagcaatcctctcttctcagcctcccaagtagctgggactagagacatgcaccatcatgcttattttgtttgtttgtttgtttttgtagagacgaggtcttgctatgttgcccaggctgggctcaagcaaccctcctgcctcagcctcccaaagtgctggaattataggcatcagccaccatacctactttgcatttgtgagctattttatgaagctaggcttatacaaaggatgtaaggatgattcaatatttgaaccataccttggaaggatggaagacacaagcacttccatccttggaaggagggaagacacaaatttctaatatcaggaaaaaaacaagggatatcattatagacctggcagacatcaaaaggatatgataacattacaaataactctatacacataactctatacacagaaggataagagaacattacaaataaccctatacacataagtttgacaaattagataaaatgaaccaattcctcaaaaagcacaaactaccatcaaagatttatagccaattctacacaatctctttcagaatatggaagcagagagagcacttcccaattcattttattaagctagtattaacacattatctatttcaagttgagtgagttgtaggagcttgtgcttttagaggaattggctcattgtgtattccctccttttctctgtcaatctttccagaatttcatcaattgtattaatcttctcaaaaaatcaactctttattttatttattttctttattattattattattattatactttaagttctggggtacatgtgcagaacgtgcaggtttgttacataggtatacatgtgccatggtggtttgctacactcatcaacccgtcatctacattaggtatttctcataatgctatccctcccccagccccccagcccctgacaggccccagtgtgtgatgttcccctccctgtgtccacgtgttctcattgttcaactcccacttatgagtgagaacatgcggtgtttggttttctgttcttgtgttagtttgctgagaatgatggtttccagcttcatccatgtgcctgcaaaggacatgaactcatccttttttgtggctgcatagtattccattgtgtatatgtgccacattttctttatccagtctatcattgatgggcatttgggttacttccaagtctttgatattgtgaacagtgctgcaataagcacaagtgcgcatgtgtctttagagtagcatgatttataatcctttgggcgtatacccagtaatgggatcactgggtcaaatggtatttctagttctagttccttgaggaatcaccacactgtcttccacaatggttgaactaatttacactcccaccaacagtataaaagtgttcctatttctccacaacatctccagcatatgtt

SEQ ID NO: 5641 - DNA, 211772 bp, Homo sapiens
  FLJ31579 gene - 112876213 - 113047984 of chr3; NCBI Entrez Gene ID: 257068; Build 35; sequence includes 20,000 bases upstream of initiation codon and 20,000 bases downstream of termination codon of the gene
tcacaacataaagaagagagcatggctggggccatatccagctaccctgggtgaatgccacaaacttatgcacatttgccctgagttttgtcagactataccccatttactgtccaaagaagatatatcaccaaataaaattggctacagcattatgccattcaactatcaccagaaagtacttaaaagtgccaagaaggtaggctggaggggatagaacaacagttacatgaatcctgcagagaagtttgatagtggacctcatatcctgagagccatgtataagagttaacctctctattctgcattttctctcttcaaagcttaaatatctgttaaggctgaatgggaagatgatcagggatctgagaattccatctatggtagaatcatttttgcatcactggtttgagataagcctaattccactcttacagataattgggttgcattggatttttcttatacataaagccattgcactgattcaaagggacatgctttggtgactaacgaatctgaaatctaacacagtaataaataagaattgattttaattttgtggctagttactagaaaagtctgacaagcacttttcctgaatacctcttttcgatggccagtttagggtttgtagattccacactcatgaaattgatattaaaaaaatctaagaactacttattgccttcagtgaatgtaaaatttaatggaagagagagacatttaaacaaatatatacagtacagtgttacagatataaaaattaagttatgcgcaaagaagagaaaataataaagaaaaaggtatgatttcagggacaacatatgagaaatacttttaaaggcttcagaaaggaggctgtcaatagaggcaaggccactgcagtagagaccctgatatctgagacatagtgatgggacttgaaaacattacctaagggttataccaagaatgtaagaagcatctgatgatagaaaattgcttaatataatttaccatataaatagaactaaggagaaaaaggataggaataatctccatagctgtttaaaaaatctttggcaaaattcaacacccattcctactaaaaactcttgagaaaaagggatattttcttaactacatatatacataatacatgcatgcaaatctatctacagctgtatttgtagatacatatatatgtacagttatagtatataaatactatatatagttttatatatatgtatgcatatatacatatactattctctatggtatacatctatataactgcaattgtatgaatatatatgcaatgaaagaaaagatggataaatttagctacttaagaataaaaatattcatgagagagaaagcaaagtcaaaggacaaataataaagtaagtgaaaatatttacaacatatatcacagatgatatatcaatatacatacctttatcaatatacttagttgataaagaacttacaaatattgaggataaaaaactgaaaaatcctatgaaaaatgggctaaagccatgaacaaataattcacacacaaaaattaaaatgactcttaatcatttgaaaaacatgaaatgtattcataataaaagaaatcaaaatttaaaaatgtactgagacatcagttcttctccatttagttgtcatgaatttcaagtttgacaatattgtccgttatcaaggctttggggaaaacatgcacactcatatactgctgaagggagtgcaaaatggtgccaccaatattgagaagaatatgatgatatctaacaaaactatatattaatttattcattgacattgtaattcatcttcaggaattcaccatgaaactcagcctccaacaatatcagaatatatatgcacaagattattttggtatcattatgtgtattcacaaagtatttgaaattatctaaatgtccaatataggagattggttgaataaaatgtagtaaatacacaaaatagagttaatgtgcagttgtaaaaacaaaaaagaagaaaatctctatcaactgatattgagtgatttccagagatattattaagggaaaaaggtgaagtacaaagagcatgtaatatgctacctttgtgtaagaaagaaggaaaaattaaaaaaatgaaatatgtatatgcctatttttacaaaaaggaacaggagagataaatcaagaaatgctggagttgaggggtaaagaaggaagagtgtgacggatatatggagaagtgtcctttcctgcatatacctttctgtataattttgtctgaaaaaaagaatattagtattctatgtattaaaataataaaattaaataaataagaacaggaaaaaaaactaaaactgaaagaaaactatttgtattttaaataaataccataagcacactgaaagagaaaaaagaaagaaaaaactaatccaggccaggtggattagtttttaggaaaaactaatccaatccaggctcacacctgtaatcccagcattttgggaggccaaggtgggcagatcacgaagtcaggagtttgagaccagcctggccaacatggtgaaaccccatctctactaaaaatacaaaaattagccaggcatggtggcatgtgcctgtagtcccagctactcaggaggctgaggcaggagaatcacttgaacccaggaggtggaggttgtggtgagctatcacaccgctgcactccagactgggcaacagagtaagactccatttcaaaaaaaaaaaaacctaattcaagtagctaggaacacaaaatttgactatatatttgactatataccccagtctcgtgtagggtggggtgggggtggtgggaacaaggtgagaattgtaagcaaatctggaaggcttggtagtaagatttttttattgtaatgatataagcaaagcaattttgaaacattgttctgtattataagattatgtaaatgtgttgtcattgggtgcccaggttctcattgagggaaaaggaacatataaatatggaataaggaaagactggaaagaaccctgtgtagatgcagggatggagtcaaattggcagtatcaatgcaaactcatgatttccacaatatgtgtgtgtatatgtgtgtgtgtgtgcatgtgtatgcgcatgaaggttagtgtccttcccaagcatcacatctggagacccatgatgtccacctgtccttcactggtaatcttaatcttaatcacgtctgtgtgtaaatgtgcttgagcatgcatatgtgttttgcattgcaaatatgtatatgtgcctatatttcccagatgtgccttttgaaaggactaagaaagaaagatatcccggtagcaaagagcatacctagcatccgcatcttggtcttcagtataatttcctgctgaaaggaactgaactcagagaaatgtctaaggacaaagtaaacataagtgaacttgaaatactttgttaggtcagaaaataagaacatagtccaaaaactgctagggtatgtcagaaggatataggagtcagtttgaaaggactcccactgtatacatctaggaaaatttgactatcgatatagttaagtatattaatgagttagaaaccattgagaaaagcaggaattcatgagtccttaccagtagtaagtgatagctatatagataggtagataggtagtcagagagagacagagagagaaaggagggctctcacctatagcaaaacttcaagagcagattaagaaatacgaagggagtgctgaaattcagaagttatcattttgtaatcagcataataaagattgcatcaggctagaatcatcaatggatactaagttgaggaaattttgatgaagatcaggatatatgcatggtctctaagtgcctccctgtaaaatcttattggttacacaggagaaacagaaacagtaactatgcagtggagaaattagacaagaacttgaccaagtgatcaaaattaatatcatcagtgagagagacagggatcttgtgctcctccaaatgtaatactctgggaaggatacaatatcacctatggagtattagggcagagaataaccaaactaaatctaatcacaaagtagcatcaaataaatacaaaataagatatattctattgtgtctgtgttcatcagggatattggcctgaagttctcttttttcattgtgtctctgccagattttggtatcagtctgatgctggcttcagagaatgagttagggaaaagcccctcctcctcaattttctggaatagtttcagtaggatcgtgtcagttctttgtacatctggtagaatttggctgtgaatccattgggtccagggcttcttttgctttgtaggttctttgttactaattcaatttcagaagttgatattagtctattcaagatttcaattgcttcctgatttaatcttgggagattgtgtgtttccagaaatttatccatttcctctagattttctaacttctgtgcatatagttgatcatagtccctgaggatcttttgtatttacgtgggatcagttgtaatattgtttctgattgttcttatttgaatcttctctttccttttctttgttaatcttgctaccagtctatcaatctcttattttatttttttgaagaacctactttttgtttcatggatcttttgcatctcaacttcattaagctcttctctaattttaattatttttttacttctgttagctttggggttggttttctattcttttaggtgcagaattagactgctaatttttagatgtttctaacttcttgatgaaagcatttaggactttaaactttcctcttaacactgctttggctgcatcccagagattttggtaacttgtaaacctattttcattagttgcaaggaatttttttattttacccagtagttattcaggaggaagttctttaatttccaaaaatattagcaaaccaaatctagcagcacatcaaaaagttaacataccataatcaagtaggctttatttctgggatgcaaggctggtttaacatattcataccaataaataggattcaccacataaacagaattaaaagcaagagacatatgatcatctcaatagatacagaaaaagcttaagataaaatccaacattctttcatgaaaaaattcctcaacagattaggcatcaaaggaacatacatcaaaataataggagttatacatgcccaacccacagccaacatcatactgaataggcaaaagctcaagccattccccttgagaactgaaacaagacaagtatgtccattctcaccactcctgttatacatagtgctggaagtcctagccagagcaatcaggcaagagaaagaaacaaaagccatcccaatagtgaaagaagtcaaactatctctcttcacttatggcatgactctgtatagaaaatcctaaagactctgccagaaggctcctacaactcacagactagtataatttcaggtcacagaatcagtgtataaatcagtagcatttctatgcaccagaaacatccaggctgcgagtgaaatcaagaacacaaacccacttacaatagctatgaagaaaacaaaatacctaggaatactgctaaccaaggaagtgaacaatctctacaagaaaaactacaaaacactgttgaaagaaatcagagatgacacaaataaatggaaaaacatgccatgctcatagattggaataatcaatattttttaaatggccatactagccagagaaatttgcatattcaatgctatttctatcaaactaccaaagttattcttcacagaattagaaaaaaaaactattctaacatctatatggaagcaaaaacaaggctgaatagccaaagcaatccaaaacaaaaagaacaaagctggaggcatcacactacccaacttcaaattatactataaagctacagtaaccaaagcagcttggttctggtacaaaaacagacacataaacccgtgcaacagaatagaaaattcataaataaggccatacatgtacaactatctgatcttcaacaaggctgatacaaacaagcaatggggaaagaactcctaattcaataaatggtgctgggataactggctagccatatgcagaagaccaaagatggactcctatctttcaccatataaaaaaattaactcaaaatggatcaaatatttaaatgtaccttaaactataaaatcctagaagaaaatctaggaaatactattgatgacattggcctttctactagtccattctcacacctatagagacatacctgaaactgggtaatttatggagaaaagagatttaattgactcagagttccacaggctgtatggaggaatggctggggaagcctcaggaaacttaacaatcatggcagaagggtgaaggggaaccaagcatgtcttcacatggcggcaggagtgacagagtgaaggggaaagtgctacacacttttaaaaaacaacaagatctcatgagaactcactcactgtcctgggaacaggaagggggacacccacttccatgatccagtcacctcccaccaagcccctctcccaacactggaaattacaattcaacatgagatttagatggggacacagatccaaaccatatcattccactcgggtccttcccaaatatcatgtccttctcacatttcaaaatacaatcatgccttcctagcagtccccaaaagtcttaactcattccaacattaagtaaaaagtccaagtccaaagtctcatctgagacaaggcgagtcccttctgcctatgagcctgtaaaataaaaaacaagttagttacttccaagatacaatgagggtacagatgttgggtaaatgctcccattctgaaagggagaaattggccaaaacaaaggggctacaggccccatgcaagtctgaacaccagcagggccatcattaaatcttaaagctccaaaataatctcctttatgtctcacatccaggtcacactgatgcaaagggtgggctcccaaggccttggaaagctccgcccctgtgattctgctgagtacagtcctcttggctgctttcacaggccatcattgagtgcctgcagtttttctaggtgcatggtgaggttgtcagtggatctaccattctggggcctggagaacagtagccctcttctcacagctccactaggcagtgccccagtggggactatgtatgggggttccaagctcacatttcccctttgccttaccctagtagaggttcttcctgagggctctgcccctgcagcagacttctacctggacattcaggcattttcgtacattctttgaaatctagggagaggttctcaaaccttaactcttaccttctacgcacctgcaggtccaaaaccacatggaagcttccaaggcttgggcttgcaccctctgaagcaacagcctgagctgtaactgagcccctttcaggcacagttggagctggagtggctgggatgcagggcaccatgtaccaaggctgcacagagcagtggagccctgggcctagcccaggaaaccatttttccctcttagtcctccaggcctgtgatgaaaggtgctgctgtgaaggtctctgaaatgccttggaggcattttccccattgtcttggctattaacattcagctcttctttacttatgcaaacttctgcagcagcctcgaaagtccccccagaaaatggatttttcttttctaccacatggttgggctacaaattttccaaccttttatgctgtgcttcctttttaaatataagttctagtttcaggttatttctttgtttatgcaaatgagcataggctttaagaagtcaccaatttacttgctttgcacttagaaatttcttctcccagatattctaaatcatctctcttaagttcaaagttccataggtttctacagcagaggcaaaatgccaccagtctctttgctaaagcataacaaaagttacctttactccagttcccaataagttccacatctccatctgagacaaccacagcccgggcttcactgtctatatcactatccacattttggtccattcaacaagtttctaggaagttccaaactttccctcatcttcctgccttcttctgatccctgcaaactgttccaacctctgctccttacccagttccaatgttgtgtccacattttcaggtatctttatagcaatgccccacttctctggcaccaattttctgtattagtccattctcacactgctatagagacatacctgagactgagtaatttatggagaaaagaggtttaactgactcgcaattccacaggctatacaggaagcatggcttgggagacctcagaaaacttacaaacatggtggaagggcaaaggggaagtaagcaggagagagagagaacaaaggaggaagtcctacaccctttcaaacaaaaaagtgagtagtacttttttgctacacacttttaaacaaatctgtgagatctcgtgagaactcactcactatcacaagagcagcaagggggaaatctgcccccacgattcaagcacctcccaccagatctctctcccaacactgggaattacaattcaacatgagacttgggtgaggacacaaagccaaactgtaacagccttggcaaagaatttttggttaagtccccaaaagcaattgtaacaaaaacaaaagtagacaagtgggacctaattaaactaaaaagtttctgcacagcaaaagaaacaatcaacaggcctaatatccagaatttaaagggaagttaaacaaatcaacaagcaaaaaacaactccttttaaaaaaatggacaaaggatatgaacagacatttctcaaaagaagagatacaagtggccaacaaacatgaaaaaatgttcaacatcactaatcattagagaaacacaaaccaaaatcacaatgagataccatctcccgccagccagaatggccattattaaaaagtcaaaaaacagatgttggcaaggttgtgaagaaaagaaatgcttatacacttttttttttttttgagatggagtctcgctctgttgcccaggctggagtgcagtagtgctatctctgctcactgcaagctccacctcccgggttcacgccattctcctgcctcagcctcccgagtagctgagactacaggtgcctgccaccacacgcccagaaatttttttgtatttttagtagagatggggtttcaccatgttagccaggatgctctcgatctcctgacctcgtgatcttcctgcctcagcctcccaaagtgatggggttacaggcttgagccactgcgcccagccgcttatacacttctggtgggaatgtaagttagtcaccgtggaaagcagtctgcatatttctcaaagaacttaaaatagtgctaccattcaacctagcaatcacattattgggtgtatacccaaaggaaaataaattatactaccaaaaagacgtgcaaatgtatgctcatcactgtgcccttcacagtatcaaaaatatagaatcaacccagttgtccatcatttgtggactggaaaaaaaatgtggtacatatacactgtggaatactatgcagccattaaaaagaatgaaatcatgtcctttgcagcaacgtggatgtagtttgaggccaaaatcctaagtgaagtaatgcaggaacaggaaaaaaaaataccacgtgttctcacttataagtgggagctaaacatttagcacatctggacataaatatggaaacaatggacaatgtggactactagagcataaagggaaggaggaaggcatgggttgaaaaataacctatcaagtaccatgctcactacctaaatgaaaagatctgtaccccaaacctcagcatcacacaatatcctcatgcaacttgtacatgtacccctgtatctaaaataaaagttgaaattttaaacaaaaaaaaggtatattaaaaagggagagaggactatatttttcaaaaatgtcaatataaagaaaggctctgaaaatattctagattaaaggaggctaaagagacatgacaattgattgcaatacctaactctagattgaatcctgtactagaaggggggaaatggtatgaaagacatttattagatcaactgacaaaattagaatatggacagatgactagataaaagtatttataactccgatgttgttatgtaagagatatttttattcttaggaaatacacagttattatttagcagtcaaaggactatgatataaataacttagcctcaaagggtgtgtgttcatgtgtgcatgcatatgtatatgcatacacttatacatacatacatgcatgtatagatatacatgtatatgcatacagagagagatggaagcaaatgacaaagtaaagggggtaaattgttaaagacagatgaatctaggtagatggaataagtgtgtgtgtgtgtgtgtgtgtatgtgtgtgtgtgtgtcttttaatatttttacttttgcaactttttttgaagtttgaaattatttccaagtagaaagtttaaacaaaaagtacttgagcaagaccctaatgaaagattcttaatttgactcaaaactaccctatttttccaagactgcaacctttttacagtatgacaaaatccaaaatgctgtttcattggcgtggggggcaggattctttctcttttctctgagcattgtttaatctgaaagttcagaaagaaaataagcaaggattcatcccataagttcgctgtttttatatcatttctgggtcttattctaccctaggtattggctgggatccaccaaaacttcaatcaattttcctttcttaaggagataattggagccctttgattttcccaaaactccagagcaaacttaccctctcaccgttgaaccatttcatatcaaagaaaactaagctgtgtttctccagactccacccaagaaagagactttcattcctccctcaaacccttgggcagtgttttttgttgctactttagtagaaactacggaaacaattcacagtttacagcagtccctgcagcaagatcccacacatgtggcagaactgggcagactcctgctcatcattcctacttggggctccccacacaggagcgggggcaggaagaaggctcagcaatcacttctacagaacctcctcctacaggacttttacccatcaccccaaattttgggtacacagcttgaccaatatttatctgttcaataaatactatttgaagatactctctgtcctatctactgagatgaaatttttcagtttgctattgttgctttaatgtttatgtcaaaacgtgcaatgtcactccaagatgagggaatgcgggctgtgaactctgttggacccaaatgtcctcaaaggtggaaagctgccttcactcctcaacgcccccactgtgaggatgaggccagacacaaagtagtattcaattcagtatcatgtgaatgaatgacaggaaatggcaaatgagtgagtaggagaaagaaaaatgccttgtggagcagagaatttgctaaaggtggtgattgtcactcaagtatggtgagttgagcttttcttttgactcacttcacatcacagactaatatatccactttaaatcaatgctcttcttctaatgatttttattgtggcatgtcagtcaggccaggagaggtcaggacctaaatctgggcagcttggcagatgccttaggctgaataggccactgagtcagtttcaaagtttagcccagattggtagaatcaggcaggcatcataggtgcagaggaaaaaaaaaaaaaaaacagatccaaggaatcagtgaagactcaagtaagtagacacagaacaccagtctagacaggtgaggaaacttagtctaaaactcttggagcaagaacatacctcagcaggctaaagattcataggagtttgagacctgagtcagaggcctcttgtcttctacttccgctgtgtaaatttatcaggctttaatattgtacattcggtaccagaagggcaggatgagccctacaagtgaaactttctcctggtcaactcaagaggagggagttaagcttaggtgggaagctttcagttctctactctctttaagaagacagtctaatggctcataatcttgattcttcaccagcgtttgctccaggttgcctaaggtttgggcaaatagacacgatttcaagctttggtttcaaatccactcatagtcttctactttactaaagttggctgggccatgagtgaacagagctttcttgtgcctaattgacttcttggtgcctttcttccagacctaggactttcacattaggggtcacaagtacccaagaataaaggcgtgtgccagaagggactcgaagccacagggcaaacatagcacatccagaacatcaattttgtgtgtgtgtgtgcatgtgtgtgtgtgtgtgtgtgtgtgtaacaaaatgtgaatgaatttacaaaaacaaactatgcagcttgaaagaaatgccaggatcagtgcttgtcatgcctgccatacagggctctggggagtgtgcatttactcagctccatgattagggcacatctggcgcaagagttgagaagctttgccctcgggccgcacacacatcaatcctaccactgtggaggtgatggaggcactaaaggtgacttccatccaggtcattcatacttcccactctgagagcttcattatgtgttttctgagcctgactgcctgagctaagcgcatctcatcctgggtgctgaatgcggggagagggtagagaaaatgttgaggtgtccccagaggctagaacgtgttaccagtataaaggtactccccaaaacacaatctcaagcttttgctggtagccgcatgattttagaatattaggtccatatttatatagaagttctgttagtcctgactacagcaaatgaagtcaaagatttgagtgaggaaaggcaataaaaaggaaagaaaggcttaactgtgcaaagacaaaaggtatctacagcaggcagagggaaaaaaacagagtacggttggaaagaccgtgaagttcatgtagttcaatcaagcatcaggtgcttcaattctatcatgttactgtcttattggtgccaagcttggcttggatgcttccagttataggaactcacttcctcctctacttcattatattgcttaactctgacttctagaatattctcctttatacttggctgaaacagaaagatgtgtggcataaattttactttctcttttacttctgctactcaaaggaagaggaagctgtgggtgcagatgttgctaagataaactacaacttcctccatgaccagtttctgcagtttaggaagggcagagccgaacacgtggctgagttggggagttaactacagacacttaagcaaatcagaatcctttgaaacaaaatcatcaaaaggccaagaagcatttgtaagggcttttgactacaacctaacattcagagagagttgatcagagagagttgttgacacactaaaaattcattacttttatttacattgaaatttatttactttattaaaaaatatttttgttggttaaggttgtttgtacaaacttgtaattttaatatttaaaaagttggaagagaatgatagtattaggtaatgataatattactaatttttactccatggatgaggtggcatcatgctatttccaattgatagtggcacaccaaattgcagagtcatgttgttaaaagaatgcattcccaagattagattggttaaatgataacaaatgcacagaggtcattctgttgtgactgaagctcaagtgattactaatatacacattaatacaacaatgtctcctaataatagacataattctcataattctaggaaccttggggtggggtggtagcctggagaaaaaaaaggtaagggtggcagatcaattgattttcctgctagttgagatcaactatctctgccaaaatagtcttcctaattgcataaagttatatgcagcatggataagaattgtttactctgccattctacctattttaacttttttaaaaaagagaaatttgttgacatttcaaagccttcatctcaaacatttgagacataaaaatcccctgaggagaacattttaaagacaggaggaaaagatgccatcccagaggatctgatgcaggagggttggcatttgatccagaaatctgtatattgcataaactcctagttgttcctgttgctggtgatctacaggcatttttaggaataattgacactgacagaacatattatacgtgcctgaagtgagccttgaataccagtaggtggctctataacatcttaaatcagggactttgcagctaactagctaactagctagaaaataaaggctctgaggcctttatttcctctcaatttccttttcagggattggaggtggcgtgggaaggagaaatggaagaggatgctggaatgtggtgtggtagacggaaatgaatggatattaaaatgaattttacaatcatcacttgttagtagccctctcaaaagtattatagtaacgactactgttaaaataaattttctgaaagcataccagaaaaacttaatgtccaataaacttaaaaggcacagaggctcttagggtcttcctgaacaccgagctttcaaatctgggagaaacaatcttatggccagccattgctgccgttcactcttgtctcattacagaatcccagttgtgggccataaataccaagtgggcatgaggtaatatagacaacgctacttcctgcttaagcttctgcttctcttctacccagtttctcaaggacacaccacctgggtataatccgggaatggtcacagtaaaaatgacaaaacaatagtctccggctctaccccaatcaacaaaataagtggatcccaatcctctgtcttctgatgtcaggaatgtgtaagttgtatcatgtgtccacaagtgtgtgcctcagtgtctccatttccttggaggctcctgaagatccccagttgctgcaatgatgtcactcttcctggaggtaattgctgctgctgtcgtcacgtcccagcaccacctatgttggttgcatctcctcattctcctctgatctttatcatacagtcttttggcttgagctgggtgaagaagcttgggaaagactaggaataaactctactggtacgaggccataaagcaaagcagcttctactccatcccatctttcgtttacttggctcctcatttcagtcccttattccttttccacccaccccactccccagccagaaaaaaaaattgtgtgtgacgcatcactgtggaactcaaagcatcatataacctcactctcctctaggcaatatccctcgaccaaatacatgtctgtgttctgattctgcttgggatctgttccttccccatctcgtacacagcctgggaagtaagacagtcctggggcttagctctggggaccagggacagccctggtcccaatatcattaaatcaatatgcttcctccaaggctttttgggtgcctttaatcaagtaaaatcaggccggcttatcctgccaactacacatgtctgaatggcaagctgttttggtgctttatctgggatcctcactactcatttatcacgtgaatccaaacaaaacaaaccacttgtaaagtacagacatttcaaacaataagggagtctccaaatagagggctaaggttatagtcagctcttcaggaatccagcagggtctttaccattacatgtcacctattataattgtaaccctggtaaaggctgtttatgaacaaagcatatttaaaagcttggaaaattttttatgttgacaagagaggccattgcaggtttttaagaagggaagcaaaattattcacattgtattttggaagataattatggcagaatggggaatggttggggaaataagagtgtaatggagaaaaaatttccagaaaacagatttgcatatgtatttacataaatgagattggttgtattcaataaaaatggatgaacagtttgatgaggtgttcaagtaataaaaaataatttaagagatagggaagctacccactcaggccttagaattacaggtccttggggtgagaagtagggttggggagccaagcatcagagttcagaaaagccatgcgtttagtctctatgtgccaggtctttgcattttttctcacttttcattgcttagataattggtttcagtgatttatctgaaagactctttatttcccccaagcattctccattctgccatagttaccttcctaaagtacaatgtgaatcattttactccctttctcaacctgcaatggccatttttgtcaatagaaaaaaaaagtgcaactctttaatatgctttggtcataaacagcctttaccaggtttacaataacaggtaacatgtaacgggaagcccttgacacaatgatcaagagacctggagtcccagctatgcaactcactagctatgagatcttggacagcgttatgtagccactaagcctcagtatccttcgtaaaatgggaacagtaatagtatctaattcattgggctcatgtgaagattaaatgagagtaaatgaacaatatttcccacttctctcatatgtcactctagtatattttctgtttctcacatctatcattcattgtcatagctttgcctctgttttcccagctacatatgcctctcccatgccaaaaccctctacccattttccatgagcaaaacttttctcagaattcaagacctggtttgaataccacatcctctaacagtgcatcccttggctcttcctccatcaaaatatataccactttattatcctccatttgtgtgtctctgttatcccttcattctccctgatattacaatttgtaattcacatatttgactctcttttctactggattatatattatctaaggatcatttcacttttcttccactcctaggacctaccagaatgatttacacacaaaaaaagcactccatttggttgtaattattcattaaaatttacttacttcaaaatttcagtcctactgtaattgagttctcttcttttgatgtcataatatagaatgtataaaaatattaattatccaaactctaaatattaatttttacttaaaaaatatttttccctatactcctatagcatagtagaaaaatcccactggtaatttggtttccatggcataatatgataaaaaaattatcttagagattgttagctgagttttttaaagcaaatttattttatgattataaaagttatgtaaaaacattataaaatcttggaaaagagagaaaaagcactgcatatccttcctgtcaaacatgagcctgttctctaaggccttgctactcaaagtgtagtctgggccaggagtatctgcatcggttagaagcttgttgaatatttggactatcaggtccatctcaaatcgatttaatcagaatatgattgattcacatagtaatatctgaaaagcactgctctaatacactccttggagctcagcagagcatgacatttaccaagagcttttaccaagcatctccctccttccaataaatactgagcacctgctatatgccaagtactgtactagacactgtgttttcatttgctagatttttcccaagactgactcaggaatatatggaaaaagtgttgccctccttttgaattgttttcttgggcaaatcaagtaactgtaaatttaaaagctgccaatttcagagaggtgcaaatcatctcattctgaagcggttctacttcctttcaagttctcacttagtaatgttgctaagtctctaaaattcgaggcttttttgcttttttttttttgagatggagtctcactctgtcaccaagctggagtgcagtggcggatctcagctcactgcaacctccacccccccgggttcaagcgattctcctgcctcagccccctgagtagctggggctacaggcatgcgccaccacacccagctaatttttgtatttttagtagtgactgggtttcaccatgtttgccaggatggtcttgatctcttgacctcatgagccacccttctcggcctcccaaagtgctgggattacagacgtgagccactgcgcccggccaaatttgatgctttctaaatatcactcattcctttcattaacagctgaaaaataaggggaaaaaaggcactaaaattaacatttcacagtagagactaaagaatacattgtgtttgccttataccgcttccataaagttttatgtttggaaattttaggctgaagggaagccctgaaagctgtcacttcaaaaataaatcttaagatattacttcacagagtgatttttctaggagagtgggtgggaggaaaaagcccaaaaacattgttgatgcaaacaggtaggtgacatattaccagtatcctgtggtgtacttaaaaacaaagaataccacgtttatactgaagtaccctttaagcattaggagatatatgaaaaatattacacactttcttaacatacaagtgataatcctccagaccaaaccaaacaaacaaaacagaaaaactgggactattatgcagcaaagcaggtttaaatgaatgttaatagcccggaaaaggaaagattgataagatgtcaaaaggggccactatgcagcaggagttatgtgtatggaaaggtggtttggggctcaggagataaggtgggaccacttggtgattaaatgttagctgacctacagatctatatatgagccttcagtcttgtcttagctcaggcaaccgccttcttttcccataaggtcctcctgagttactgaggacctgcctgacctggagccctccaggaccctaccgtcaagccctccgggtccctaccatcaagtccagggtgcttttcttgatttgtctgtttgccacggtgtccctgtgattttcatgtgcaaagtcctcagatcagcagagacctcgtagttttccgtcacggagaagtaccatttgaaggagtagggaacactgcagaaagcagggaaatgggtttgtatgcctacgagcctccataccagcgagactctttccaaaatgggatttccaatagtgccaccacattcagctccctgaatgcttccagactttcatttcatctactaaagggaattatgtcagcaaccctccctgcctggtgggggtactgtgaagagcaaatgcgacaaggaatttgaaagaaagttccaaacaacaggacaatacaaatatgtttcattattgcctcctctgtaaaatgggaataactgcacagaactgctgcgtagtgatgtgtaggtgaagcttaattatgtaatgcctgaaacacaaaccatcctagatgttgtcatccaaatatgagatacagcacctttctgggcctcttacctatcatatttctgctgcttctgtggtttacggaaattgtaaccctttccgtgtgtgtatgggtgtgtgtgcgcgcgtgtctgaaagaaggaaggaaacatttgcggtcgcggtgaacatctgagtgctgactgtgtgaggggctggaggaaagaggacctatctgaggaccgactggccgaagcctgcaagtttccacaaatgcagtcgctgccgcggcgtctgtctacacacacactggaaggcaagagtaacggagggaggagactggggagcagggaaggcgtgggagcgggacagaggggcagcccggagagcgctggccaatcggagcgcgctccgccagcggccaatcacgggccgcctagcccggcaaatctgcccggcagtgcggggaggggctgctgggagtcctggtgccgccggctgcacttctgtgtgtctttcaggaagccacagggcagggggcgtctgtgcagagaagcgggggagtgagtagcaggcaggcccagcttgtgtaccagcccagtgacatatatagaaacataaatcaggctagagccggcgcgcccgggcgcgcacctgtgtatggacccgcaggcatgtctgtacactgggtgggcacctgtcttgtgagtggctccgggtgtggctgctcctcggactttcagtttatgtaagatttatctctaggggcctaccttcccccatctccagaggggaacataagaagtttaacggagctgggactgagcagattaagggagtggagcggaggctgggccggagagagtggggactgtgagtgctagtgggtaaggatccatctgtttgccccgtcccccagccagaaaggcattttggaaagactggcgtggcaagcgtcgccctgaaacgtccacagagcccaagaagtgatgatcactgagtgagtggcactgggctgagactggccagtttgttaacaacagggatgctagcagttaggaaggccaggaggaaactcaggatggggaccatctgctcccccaaccccagcgggacaaagacatcatcggaggtctgcaatgccgactggatggcctcgctcccccctcacctccacaacctccccctttccaatctggcaatcccaggtattcgtctattcctacttgttcccactgtgtttaattctgccattttagtgttgttaaggggttgggttgcttttctattgtgctgagaaattaattgtcagtgacccctttttatttccaaaccaaaaacttaacactgaagcagctgctttaaagagattgcagtacactgcatcattggtaaaaggactcatgaaaacagaagcatcattgtttttgtttgtggtttttttgtttgtttgcttatatttgctagccccattctaagaatattatccttcttactgttgttatgtgtatgtgaggggtgcattgtcttaaatcacttgaaggggaaatcaaaggcaatgaattaaaagtcacaaacaatttagatctggatcaaaattaaaactgaaaaatattttatttctcatttatctgaccttgtgtattggaaaaacaaaaaatggataagcattagagaataggttcagaatcagaactgagtataaagacacatttttgttgttagaaagccagaatagagaatgcagactctcatcacaggcagtcattaggtgtgatgaggtggtggtgtttgaagctttgtctctgtatgtatgtatgtatacaggtgtctgcctgactgatttagaactgcagccttgaaaagcacttctgctccagccactgtctctctgccggaggttttatgccttgacatcatttgttaaatgtgtcctcttccttccactcagaaggtggttattgtatgttttctagggaaggatatttggacagtgagtttggcctggtgtgctgagcaagtcctacaaatgctgatactggaaagcactcctagaagcaggggatggactactgccaatcctttatttcactcggagacataacaattgaagttcacccacagactaccagacaaactcccaagtattccctagacccgtctgggttttttttgaggtttggttggtttttttgtttgtttgtttttggtggctgaaaatctgacctcatgcaactcccgatctttgctttctgtgcatgaggaagagcagtggtggcttcaaatgcaggcttttctttactcacctcctcttttgggtgtcttccaggttcattgtcctcataggccccggttgcttttgagcaaggagagggctgcgaaatttctttatagttatgatcatgtatgttttatcagccattgactacagttccttgggaaatgccagatgggcatgcttcagaacaggtcttttccatgtttaattggcgcctgtggagttgtcactgaaatgatgcatgggccacttttaacattagtcatttgccttcaggccttctgatggaattattttgttgagtgatatggcaggtaatatgtgtttgcaaacagaatggcatctttggcaggccctaaatggctgtgtcattcagggcatgtccggggtaggttggggcttcctccttccttgttgtactttggctcaaaccataactccagctctgctagtgggttggctgtgtactctgaccccgtgactgtagaaaggagttgggcatttgttctgtgattcataggatatctcacagttactagaattgcttgggtagcgggggagcaaatagctggtgccagctgctgaaactggaaattatatgattagccaccatggagatcatgcaaattctttcaccctgctttgtgaagtccggtcctgctaaggaaaaagaaaaaaaaatggctttgactcctcaaaagatgctgaattcactgctgtgaaatgccgtttcctcagcagtggaagggacattaagtgtatgtatgtgtaggctcaagacaggaaaattacatattaaatgctagccattcatggacttccccctactagttctctttcctctacctcgagcttcatactcaccagataaaagctggcagtcaagtcaagttctaccagtccttgctgagaaatcctgaaatatagtaggcatttgggaaatgggggccatcatcgtccccctacttcctctttaactcttccctcttatcatcatctgcatcataatagctattatgtactgagcactaccacgcaggacccattggcatacattacctccagtcctcataactccatgaagtaggtattaacatcctcactttagagttaagaaaattattgttcaaagaggttaagtaattttctcaagatcacacaaatagtaagtggtagatgttgtatttaagcccctgtgtagctgcaaaacccaggcactgtctctgtgcccctgaggggtcttgggaatggcagagcagtgggtgtaatctttaactgaaagccagtttcttcaaaccatcctctgcagtgaatgaaagaatttttaaaagcgagtggtatttgtctaagtgattatcactttgaatatataggtagatacatacatattatatgcacatctacttgtgtacatatatacatattatatatacatatgcctgtttagaattgaaacccagtaagttttaaattcaattttagtgcttcaacctgttgtgtgcgtgtgcgcccacatgcccaatctggggcatctataggactgggtcagatctatcaggatggtgatgaggcgggggacatgggaaagggcagggaaaaggcaagccttctggcaacaatagcagaaatgagatggagtaaactatgccacgtttgagtgcacctgctgcctttgcctaagtcatgatgggagagaacatgtgtgaatgtgcacctctcaacagagccttgatgtattattttacttccgcaactgttaagaacacctgttaatggccaataccaccaaacatattaaaatatcttggagaagaacctcaaaataattctcattgctaactgtatagaatcatttgatgtctgaaggataaaggatccagacatcataaaagacagatttttaaattaaagctttaaactctacaaacattttcactgatttttgtaaaagcgtgatattctctatggacaaatggactaatgggaagacatttctctataatgtatactgcttttcaatgaattttttctctgtacattttaatgctatttcattttttaaaaaacactttctttcttattaaaggtaaactacttggtttacattttgggaaggttctattgggaagagccttgaacttaagggttgcaaaatttattgttgattcttgctgtgtaatattgaagaagtatctaaatttctcaggacatagtttctttatttgtaattaagatattgggttaaatgaaatatagagtcctttccagattaaaaattatgtgattaatttgagggtttttttgttttattttgttgcctgttctttgtccaatgtagaaagagctggaaggaatgattgggtcattttaggtctaaaacctatttcttttatgcctcttcaaaacaagaaaatgtataaacaaggtttcacaattgccagaatgaagcagggtctattcactttagcctcttaaaaggggctgtagattacttgatgcaaatgaacttttacctcatcagaccctaagtgcactttaagaaacctccatagagatatttatatatatatgtatatatgtaccttcatcatacatagtttttttaaaaagaactaattagaagaaattttaaaccagagatataaataacatgttacagaagcacacagaatggaaagattaattccaccttctgagaattaggaactaccttgttgagaaaatagcatttgatctagaatttgaggaatggtcaagacttcaagggatatgggttgagggtcagggttgggaaggaggctttccaggtggaatgggggtatatgggagtaaatgggggtatatgagggaaatggctagaggacaccctctctggtccttccatatccctgttatagtttctttgtcatagtacttctcaacacattgttatttttaagtgtatgtttttcccatgtgaacaacttgctgacagaaaatatcttattttcctttataatcctgaatcgcagtagaaggtagcagcgcagtcattggtgacagttgagtgaataattgaaagtatggaaagtatggagtaagaatgctggaaacatggtttgcagccaccgctgtttttcattgtgatcagagctgaatagattggttaagttcagctttcacaaatagccacatgaaaccatatgaagattttccaatccatttcttgttattgcgcataatattcctgaagattaggcttgataaggctcatcactaagccccattagaaatgaaaattttgaggctgaaaatggtcgcaagagtcagaagcagagccctggtgtaacttcttttctaggagcgattctttcacccaacatccctcctgccttccttcttcccttgtcaaattagagcttttcatctttgctgcctggctgctgcctctcccagatctcatttcttgttcccctctttgctttctttccactgacctgacctggtctccagccttcccttggcagggtcaacccttccacaggtgctcctcactgctctccgattcccagatgattctctgatctcatgttgctagtgatcattcccttcttttcttttctacctttctggaatcctatccttttcctagcagttttgcccttgagtacttagtgatttctataggtcttcctcctgtggccgcacaccctcttcccacatgtgtgacatggagacaaaatcccttagtggagcaggatggagtcattactcagatcttgcttctgaaagttgaaccagatttggcatatctaaaagagatttggagaccaccccaaaagagcacaaaataaattgtgtaacaagaagttttggttggctctactttgaggatagtatgaaccgtgagttggccctaaaacaaatccattttcctacaggatttgaggttgtgggaaaccaaggaccaagctgaatctaccaaggctgactcaatcatgaaaaaaaaaaaatcatacaagaccaaaactgtctcttaaatgagaatcgtttatttttgttttgttttgctttttcccccctctgagtggccatggtgaaaaataaaaagacactatgactgtggtggttccattagtaggtttcactcttaaaaaggctcatcatttctctagccatctctcctcctgcaaatcacaaaagccacaaggaattccagaatcacacatgtctataaacagaaagatcatggattggttaagagtatgaatacaacagccagactatctggatttaaatactgattctgccctttacaagcagtgtgactttggacaaattacttaacctctctgtgcctcagtgtccttctctgtaacacaggtaatctatgcaccacctcatttcttagtgtgagaaataaattaattcatatagtatgctttctctcacaaaataagcactagataataataacaattgttattatgtatcgtttaaaaaaatcaatcagaacattcatttattgaaagcctgtgactggaatggacaacaaaaaagaggtgtaaaatgcagtttataccctcaggtaatttacaatctagttaaggagctggctgtccaattaaactgtctgactcagtgttctctgtctgatcagattagggtaacttgaatggttaccctgcaaaggaggctttaaagttaagggaaggatacacggagggttccccaggatgtgagtgccaagggtgtcttagatgcaatagcaggtggctgatcaagacagccagaaaactttctttagttatttactctgtcctgtcccatcccaaattcagctgtcagactgtcatccccagacatccagagcctttgggaaaaactcagccctctgtgacagaaacatgttgttaacttttttctgctctcctcatttcctcatcacttgccctcctaacccagtcattttgttcctagcttgagagtgggaatgttacaaaatgctttcctttgaacaaatccttatacatgttttataattccttcccccagctattggaataatagcttcatcatccctccaaacacatacatcacccacacatgcaacacacatgtaccacccattacccaacacacacacatgcacagatacttagctatgacgttagcctcagcctcaacctccactgggcccaaatctcaatacatgctatcgttcaccagtcataaatatcttgcaaaacatgcccactgacacttcagacccttggagcgtgctgcttgcacctgcaagctcctctctcagacatgtttctgaagctgaggagttggtttctaacacgtgatctgacctgacctccactagattgacaggtagcttctacatctctctcctgcctctaggaacttaggagcacaggcacactaaaggtaatgctagtgaaatgctttagcgtcctgcaactttgcctctgggaaaatcgcaaaccactttgccaatgctgactaaccccaattagagtttcaaaccaggcctgcagaggagggattatttgtagacattgtaataggtgggtgtgtttgtgtgtgtgaaaagaatttgaacacgcatcaagaaccaaatttaggtggaggagatctgtgactaaatttattttagtatttacatttgtggttaagcaggagtccttccaccttctctcttgtgttgttaaacatcgataggaatttggattatattactgaacactgtgaggatcaaagtacatgggaggattatattagtaggtctctaggtaacttcaagataaaagaggttgagctacagaggtctgcattgctctaaggggcatgcctaggttatatcatctatgaaacacaggcagtcttttgtggattcattgtctactaagcagctaaaattttctaagaaaataacaggttggggtttttttgttaatgtccaattactctagaactgtcagctgtaaagtatcatttcttcttagagaatgttctatcagtatttttatttctgttcagacctgacaagatgaaaataaaggaaaaaatagtacacatttgtgcgctataatgcaaatgtcttggagtgtggcagcagtctgcagtagtggtggaactgaaaaatgcctaggccctgtcagactgagatgaatattttatgaacatgtatgatttggaggcttatatattaaaagcattatttttaaagtgcgattgaaaccagatacacccctccccaaataaatgccaaacagagaaaggtgaaaacagcattctcgtccaccctccccaggttcgagtttaggtgatcatcttggcagtaggtgtccatatggatcctcacaagaattatatgagtgtgttgtgttaatttggctaaaaatatatgtcagtgcctgcatactccttttgcttcttttggttctcattgcctatatttaaaaaattgtattcatttaaaggaaaatcattaactcaaaaggtagttactgaatgcccttttgtgccaggtactgtgttaaatcgggtgatcacacagatttgtaagattcttctccctgctcttcctgaaaatatgaccttagaagaaagccaaaattcaaacatgatagagaaaatgtatggggtctgtaacactcagaaaaccaatacccaattctgttactggtagtaggaggaaagcttggtaggttggacttccaagagcacccttgggttgaaatataaatagcgaggagtagaaagccaggtgtcccagtgcagagggactgaggagtcagacagcatggtgaccttgggcaaagccaagcagtctggtgtggttagagcatggattttatttaaagaaaggaatagatatgaggctgggaaagtaggcaagaactagatcctaatgagccttatatgcccatgccaagattgaatgtcatcctgatggcaaaaagcagccattcaaagagttggtcagaaatgggtggaaagtcccccctaaaataactgcataagagtgaagtgaaacaaaatgacccagcagttattagggatactgtgggttaagatgagaaactcattgtttctttcactctattcaacacttgtataattttcttccatatactgggctctctcctaggcactggtgattcagtgatgatcaatacagacatggtccttgccttcaaagagctgacagtatagttggagaaatggtcatttaatcaagcagttataacacaatatgctatgtaggatgactggagaggtatacattactgctggaagaagcatatagcaagggcatcttaacaagactagggaggcctcctggaggaagttatgaataaactaaaccctgaaaaatacacagaaattagccctcaggataagataaacacagtaaggatgctctagagggggaaataaaatgagtgaggatcttgaagagagggaatggcccatttaacaaaccaaaatagtttattatggttgtactgtgggttgcaaggaggagactgtcagggagtaaagtggcaacatacttagaggtcttaaaagccatgttaggccaggcgtggtggctcacacctgtaatctcagcaatttgggaggccaaggcaggcagatcacaaggtcaagagatcgagaccagcctggccaacatggtgaaactccatctctactaaaaatacaaaaattagctgggcatggtggcatgcacctgtagtcccagctactcgggaggctgagacaggagaatcgcttgaacccgggaggcagaggttgcgatcagctgagattgcgccattgcactccagactgctgacagagtgagactccatctaaaaaaaaaaaaaaaaaaaggcatgttaaagttatcttacttcaggctgggcacagtggctcatgcctgtaataccagcactttggaaagccgaggctggtggatcacttgaggtcaggagtttgagactagcctggccaacatggtgaaaccccatctctactaaaaatacaaaaattagccaggcatgatggcgggcgtctgtaattccagctacctgggagactgaggcaggagaatcacttgaacccaggaggcggaggttgcagagagccaagatcatgccattgcactccagcctgggcgacggaacaaaactccgtcttaaaaaaaaaaaaaataaagttaactaactttacctgaacaggagtgggaagggttttaagcatgcaaatcacaaggtcaactttgtgttttggaaagatcactctcgctgcagcacaaagtatatgggaactaggaagtactgtaaccaaggggaccaattaggttgctgatgaggtcatccaagtgggaggcgaccctgacctgaggaggagggtgacagcatggacaaagaaaaagagaaagtgtcagcaggacttggcgattaattggagggcaaaagagaaggtgcaaggggcttgggtgagagagaggaagttagtggcattctcaggaatatggataaaggagaaggagcaggtttagaggtggtggaaggaagcaggtgcttagtctggggcatgctgaatttgaggcacctgtgggacatttcagaattgggagaagggcacaggtgggacacagtggagatggtttcagagctaaatcttcacatttcacaatttgcccaaccttctaccctcactaacagctactattatacccaatatcagaaggtttgaatttaaagctgatatcctcatttttagattatatattttagatttgaactaagattgtacttcttttagaaaatttgttgagtttctattcccagagaggtgccccctcgtgtttgtctagtgtccagtgttctgcctgttctgtatgaattctctcttggcagcttgggcatgagtgtaggagttagcttgtgtatactataccataaaccagctgtgaaatggaaacttttagttgctttaccacaatcatcaaacacaatttatttcatacatggacatctcaggttgcaccaataagctcaaaaaaagcaggagaattttgcagtagaatagttcatttaatgtaactttttctcctaccctaaacatttttctggtttctcctaaagcttattattgttctttcttgtgtgtttacaaaaaggttgttaaagcaaatatggttatctcagagctgagaaggcttattagggaatgaccaagtgccccttgcaaggggttacttcacaaaaagatgacgccatctatttggagacagagcaggatgcatggtagcagaatagaagaatttcttgtgaatgaattatctacaatgtcttatttggagtagggattggggtctattggacaattgaagaagagaaaatctttcaaaagagaataggtacccctccccatgtagagggctttaaaatgctcccccccacaacatgggattgaaaaccctttggctcacataaatcataggacgttggagctaacttggggaataccttgggcaatggaatgctcattgtgccttgcagagcagggaaggtttagtaccctttggtgcccctctggcaatctcaggttaaggggtggagactgttggggagaaacttcaactagagaaggtctggttgcatttgtttcacacatagatacttcatttgaaagtattgcaggtctaaaaagtaccctgtaaacctctgatttacttcaattatctctgagctcatccagccagttgcaggggtagaccaagacagacttttttaattcccaggctgtctctcctcagacagtgagatgcaccttggcttctcagcacataaaaaagaataagttgatcaacatcctctgcttccaagtattctgccttaaacagttgctttattgcattgtggataattatgaatttaataggcgactgattaaaaattaaattggccacatggctctctcagattttgcaggcagtttgatggttattatgaatactctcccacatgcctcatggaaaataaacaagtatgatatgttgagaagaaggtttaaagatgttatctttggttcaagggactactaagtggcccccctcatttggaatcttggactcataatgactaattttgtataccctaaagatgcctcagcctttctctacttgttaatatggagtcaagctctctacaaatgtcacatttttctcaaggacctaattcagaagtgtgagattggtggctccaaagagatattattagaatataatttatgcaggcataagtttcaggaaatctctctggtacctttcttttaaaattgttcaatgtaatattttattatagttgttcctttagtcatcctttctggttaattttgtcctctatgttttctgacacattcctcttcattgacccagataactcaagctagaaggaaaaagggagataaatggagctaggaaacaggtgcaaggggtgaaaaggagcagagagtgaaccctacctgtttaatgttggatggacctaatagaagtttgggaaaggatcaggagagctaggcccaccagccttaggcaactctctgagcatctgttcattcaagtatccatgcttgtatttattctgtatagatgcatttagtacctactaaattccagaaactaagtttggagatataagcgtgaagttgacatgttcctgccctgaaagactttcacttaggtggcagagacagatgtggagataaatagcactcaatgtcctaagttcatcaaatatcaactcactgccatggaatcacagaggaaagaacaggtcagtctccttggtagagtcaggtgagctcacagactaatgatggtaattaaaatggaaaggcaagggacaataagattgtccccaaggactctaagggttttttgttttcttagacaagtcttttgctatattcaatgaccataaggcgtacttatatgtattaataactttgtaaattaatatattcttaactcaggcctcaaatattttaacatgcacaattattatctgttcatattaaatttattgtaatatttgtatggattaaatacctgaattggaatacaagatgtttttctatgaaagccaccctaaatatcttcagcatttaagaacacatgttcatccctctgttctttatgggttttttctttctttctttcttttttttttttttgtttttgagacagggtcttgctctgtcacccaagctggagtacagtgacgtgaccatggctcactgaagcctcaacctcctggctcaagcagttctccatctcagcctcctgagtagatgagactacaggcacatgccatcacacctggctaatttttttttatttctagtagagaccaggtcaggctggtctcaaactcctgagctcaagcgatcctctcgcaatgacctcccaaagtgctgggattacaggcatgagccactgtgcccagccttttcttatatcttttatcctctctctctctttgttattcacacaggaggcactatgaaaaagtagttcagagtgtaggttgtaggctcaaatcctcgctactattaatagttgcatgaccttgagtaaaaagctttacccctctgtctgttagttttttcatctgtaaaattgagataattataatatccacttcaaaagtgcaaagttagaggaagcacaagctggaagactaccctcactctgataccagttacaggtttgggagccttaagatcacccttgtttgataatttgctaggaagattgacagaactcattgaaagttgttatactcatagttactgtttattgctctgaaaggctgcagatcaaaatcagctaaaggaagaggtgcatggagcaaagttcaggaaatttccaaatgtggagcttccagttgtcctcttctcatggacagtgtttctttcctcgtattgatgtgtgacagtaccacacaaagtactgctaaccagggaagctcacctgagctttggtgtccagaatcttttctggtcttccacatggctgacctaagtatccagccccttcagaggttaagcccatgcccatgtgactcaaatcctgcaccataaatcacatccttatactttcccttatggcccaaagctgtcaggtaaataaagatactttgatcaggcaggacattccaagggcttaagcaattgcctcccaaggactgagggcgaagaccatacctccttttgggtaaggtttaaattttttactacacaacaaagttacttaagaattaaatttcaaaaaagaattaaacaagataaatgtaaattaactttaaaaaaagaattaaataagatatacaatgtgattagaatattgccaattatgaaataaatatgttatatatatatatagctattattattaaacatccttttgattacttaatatatacctaatatcataatagctactgtgggacatttttaaaaaatgaacaagatgtagtttgtagatcttataagagatatacaagagttcaaataaagtaaataaaagcagaatgaggtgagtaccatgataaagaaacaagcaaactgtgctgggacctggaaagggaaaggttacttctagttggtgggtaaggaactgcttcaggagaagagcacctgtgagctggactgtgagagacagggaggatttcaacatgaagagggaaggacattccagagacagggaagcaaatgcccaaaattagagatgagaaaacaagggcaccttcaggaaacagagaagggctgccatggtcacctgtagaagtgacaggagaaggaaatgggaaagttacggaaagacagacaagccagttggagagagattttcagcactgtgctaagcactttatgctttgtgttgtagaccatagggagccagtgacaattttgggcttgaagaaaactgtgaaagaaagtgttctatccctgttataattccagtctttgaacaccctcccttccaataacccaccttcgctttgcctcgccaattacagttcagttcaggtatgacctctgtgcacatttccattataggacatgatataccccattgggactgtttctctctgctgtatacaactgttttgtcatttctgtatacttgctgtcttgttcagaataagcaccttatgataaaagtggagggaaagaagaaggaggggaaagatggaatcttgaaatatatctacaaagaatttaagcataaaaaacagatatttaaaaatctatatttctagttaaggagaaactaggacaggcaggaagcaagtagtaacgcctaaggtaagacaaaatcttataactgcattgcagtcttctcaagatgcctcaaggctttaagagtaagaacaagtataataataataaaagaagcagaagaaagatagcttgctcatttaatatttatatagcacttcctaggggaccgatattgctgtttgatttatataaagccaattaattattataataaattaatgatgtagatactcctactatccccattttacagatgaagaaattcagtcacagagaggttaagcagatggccccccaaaatcctgataacaatactagaattgtaaaaattaggtcatgccaaattcatttaattgcatttgaataaaagtcattgatagagttggagattgacccagtgttgggttgtaactttagtttcttttgttggttgtaataaagggtaattttcttttcatctgaggccatttgctcccatgtcgggactctaatgcatgagcacccatgaggatggtgatgtttgaaggactacatgctgacctgttctggctgaacaagttacattttttttttcaagaccagacatctaggaggctttttattgactcagaacaaaagcagcccagtggtttaagtggtctatgtagtaatcacccagcaaggctccggcacagaaaaaaatctatctggcctctattctgcctctacacagaaagaccagcatgaggctttagcaggtgtgtaagctctcagaacactggtcttcaagggtggggtgtgttttcattcactttccccgttgggtgtaatgtacaaattccctttaagcccaccatttcatgtaatttaaactgctacttactggattttctctcctcccttttccctttcctctgtcagaacacctagcttaggcctttatttacaggaaagagaaaaaaacctcttcttatcctggaggggaactagctaagaagcttctctgtatctcattctccaatttatcaaatgaatcttaaaataactctgccctgtgaaaaattccagccaaactaggtaactttaaatatgttttttcaaagtcccaatgataaattccattaaaatgacccacaaaataatgaaacaacagcctttaaagtgaagggcactgtcacataaatgctaaacaataagtgaactattagccaatgcatttaatcactgtaggacacacctaagacccaacaggaatatgggtcctaggaatctgtgtgagcagaaagaaggtctccagcaatttgacgaaattctcagccaaaaagcaataaataccactttaggcttggaatgatttgctttttgcaaatatgatgagttaaatttacaggcatattttctgtttaagtatggtaagtgtgaaagaaaaatgttatttctttgcaatgatgaatagtccttcataaatatggtcacaaatgcctttagtaagctgttaataagtggaattatccaattcttaagatagaagagaccctaagtcgcatttcactcactttcctaagtttgcaaatgaagaaacagaattccaagtacaagtttggaagcccaggttcacagaagtaatcacagcagaaccagcactgggattcaggctcagctgtggaattacagactgtttcttcaactgagagaaggttagagtgccctcctgtgtccctatgtagaaattctttaggtctttacaaaatttaaaatagctttaatctcttcatcaattttcctgcactggcagggaccaggcatttaggtccaaagacaaactctgcaatcaccatgttattgaaagtaaatgaacaatgcacttgacttgtttaatcaataaggacatagaaccaatactatcatccccagagtatctttgtgtgcactgaggtctgacagacctgggtctatgtcccgggcagccacatgcaatctttgcaaccctgaactagttgcaaaaccagtctgagcctcagtttcctcatctgtaaaatgcaggtaatcactgccctgcaggattgtagcacaggtcaaatgagatcatgtaagtaaaatgcccagcctggcattaggtacataataagcactcaatagattgaagttgtttcagttattttcaggcaagagcccccaccagggttataaaaaagttaatgttaaaagagctgaggtaaaaacactggggagataaactgaatgtcttcaggttccttttttatttttttgagacggagtctggctctgtcgcccatgctggagtgcagtggcgcgatctcggctcactgcaagctccgcctcccgggttcatgccgttctccagcttcagccgcccgagtagctgggactgcaggcacccaccaccacgcccggctaatttctttttgtatttttgtagagacggggtttcaccgtgttagccaggatggtctcgatctcctgaccttgtgatccgcccgcctcggcctcccaaagtgctgggattacaggcgtgagccaccgcccggccaggatgcttttagttattaggtgaaaaggtttccatgagttccaggggcagaggaaagggggagagaatttttaaagagatatgtactgaatatgtgattcctgaaaaatgaatttcttcttcagatggggaaatttaaatgaacctaagccacatggcttgaccacagatagaagctctctctcaaaggtaacacctggcagtaagggtccagcaatatttttttaaaagcctctatatgaaagaaaatatttgaaaaccagattctatttatgtcattgacccagttttagaagtctttatttattgagagggtaaccaaattaaaatcaattaacaacagaggtgaaaaacaatagctggatgaattcatcctttgatgttaacttccttcaactcttcatgaaacgagctatctcagctaaagtgttcagcaaaattgcagtaaatcaagtccttttgccaggtgaactttcaaaggttccctccccctctgaccttaggtaattttcagttatcctttccctacgtgtggaagggagatatcattatttatgatacaaggagacttgacctttaaatgtcagtggaagtgtagagtctggccattctgtctgtatcttccaccagcttataggagaattaagggaaatagttcaataacgtgcaaatgggaaagagggaggggtagaaggaacacatcatctatgccaccattttttgttatataaccagggaaaagcaaagggagaattgggctggcctctgttatctaaatacttattctagataagacaatcaccaggaggtttatatagattattgtactgcaaaagctcataaaaggctgctcagagtttgtgaggcttacccctgagccccaggggcttgcttaccctttccagtaatctgttacctttaaataaggcaaatgcagcacaaggctgaggcatttattatttatagaaagttcctcatcagactcatctgtggctacggaggagcagagtcggaacctctgagcctccgcagtgacgacctgctgcattctacactagtgcagtgctattctgagcaacgtgaagcttaagctagactctttgtggttgtacatttttagtcaactaatgaaaagatttccctgcctcatccttgcaagtcacctatttgtgtggattatctgaacactacattttctggctattgtagttacttcaatagtatctgtgaaatgctgtattcctggtgttcatctcattttctacttcatgcttttgtgactttatacatcattctccttcgaatgcccccagatcgatatatcttgcttctcgatgtttatgttgctagcgctttgggtagggttttaattccagtataccaagaaaaacatttgttcataaaggggtcttttttaagatgttcatctcaatcagagagaaagctttctcttgtactttcccacctccttcacccctttgtgtggtattatcccactccccagctaggtctacacctgcttggggactgtgatccaggcaccaggtgagatgaagccaggaggcaaggtccacagagcagagccccttgagggatggggcatcaaaatggctagactgagacacgtgtgcttcagacagcttaataataggctaccccttcaagctgtcgctttaaaaatatttacacctcatttggtaaaagttgtagaagtgaaagtatactgcagctttgaaaattttctattaggtttgcctcctttcctgagtctttcttctgagccctgcagccccctctgatccctctccttttcccctttgattctcaccctcctcagccttcactcccagcttctcaacctctctctgtttcctcagcagatccactgaggtctttccaagagtctatctctaaattggcatacccctacccactgcttaatactgcttcaagtatgtcaaaagctattaatgccagagatgaatattgcagttggtgctcagcaaacagaagatactccagctaccagtattcactgtgcttagaggagagtggtgattaaaaatgactttttctcttatcgcatgttcattttcaagataaagagtttactatgtgcattgaagagagctttttttttttttaacatcttgcccatttcataaggagtcactggtgaaaacctgcagcaactggcaccaaatttgcagtttttccaagcaatatcttaacatcctttgtagactagtccctttagtcactgctctgtggccatgcccctcaacatggctgtacctggaagctcatagtcctggcagagctggctgctgttgtgagtcaggaagatgttccacagggaagtgagctggtgacagcctccatgggaagtcagagctggaccctaagggatccggagtccagctaggccggtgctctctgaagggccagagaggtgttctggcatatcctcatcactgtcaaagtctgagagtggacattcatgctgaaggaggagcagctcctaaatggctcttcttccagaaacttggcctgctgattttgcctgtattgcctgtatgcatattgagacatatgttgtcagccatttgtaaaatgaagtagtggtttctctaaacctcaggaatatattcagagtttttaatcagggtgaacttgagtgggaatgttttgactgccttcgttttagtacatttgaaaaaaatgttgaatttcttaaaaatcataagtcattaaaatccaagcacttttagtgagataatgtgtttgagggcctaaatctcatttttttacccattttctaaaaaaaaaaaaaaaaaaaaatcttgttgaaacatttttaatagaaattctatgaagatagggtcttctggctctccataaatcaaatcataaaatcttcttacagtagtctctttttatctgcaagtggtatgttccaaggctcccaatggctgctgaaaccatggatagagccaaaccctatacatcctgtaatttttcctgtacatacatgcctatgataaagtttaatttatcaattgggcacagtaagagattaacaacaataactagtaatacaatagaacaattataacaatatgccagcatcactgctgtcgcactttggggtcattctcaagtagagttagggttcctggaaaaccaacactgtgaaactgcaacaggcatgcttggccatgcttatgtctctaagaactcatcattagtattttcagtttgtagaaaacatacagaaaaacttctgaaaacattactggttctgctgtttacattagggaaagattatctgttgatggttatattggtgtttgagtgttttaatgataactgagatggctaagtgactaatggttggggaacctctaccaagtagatatgctaggcaaagggatgattcacatcctgggctggaaggcctgtgggatggcaaaacacttcatcacgctcctcagaatggggcacaatttaaaacttatgaattgtttattttttaaattttccatttaatagttttggaccacagttgactgtggctaactgaaactgtggaaattgaaactgcaaataagaagggactactattttttctcagaaaaattcaactctttaaaattggttaacaactcatgaggttgacatctctgaaaccctcaaagatggcagtgatgagggaggaggagctattgtttagctggacatctctgattcaattccattggaggggggcatctgttctcattttcgtccttcagagatgggaaaaaattactctttttcttggcttgaacacttatatcttctatctttttataagcatgatactgctttctcttctgctgtttgcacagattgtcttctgacctagttgagcctttactgctgcccagacaccttctggtagctagcatcatatgaattacttagctttattaagataaagtgtgagcaaagggttttttttggtcttttgtgtttgggcacctttaatatctttttgctgttgctgggcagggaagagtctttgcagctgagatcttattaatttgcctagaattttttttagtttatatattttttattaattaggaaaactaaatttgacattcaatgcaattttatgcagcatcagctatagtgggtaactggaaagatagccgcacctggtttttttgcaagctgcctgcattactctgacctcacttgacaaagtataggctaatagagaaagaatatgcaaattacagacatgtgacctaaaattcagactgagataaaatagacaagctttaattgaacactctgactattcgttatagaaaatacatgcatatccaatatatgtttttagcccaagcttacgatggaccgaccagatgatcttagttttgatagaaataatatgatttaggtcttgataaaaatttggagcttacatggcatttagatgactctcaaaaatgagctcaaaataatatttgtctttaaaagaatttttagagaataattattatctattagaagttttctattgatattagtaaacatatttccaaataaatgaaaggtgggctttttttccactgaataagagaattttctggatttcatttaagatgggccagttttagtgccaacatgtacacatagacatgcacataaatactttggtaaccgagaagaccttagctccaaacacgtctgtagatattccatccaaactcttgctatccaaacatttgctataacttataagatttattttatccagaattcactacttaaataaaaaaatcccatcgtgtgagctagcaaaaacatttaagttgcaggtacaccttgtcaaaaagatggagaatgtgttacatccatagttcagctaccctcccagcaggctcgagctgtgcattagcgctctcaacttaccacattattgagtgagaatgtcttctaagaaagcaaaaagcctctgaataaaacaagcacactcgagaggcctaaaaagaaaaattgggtgataaagcatattgagagagatgaactaacataaacttggccatacttacatctctaagaactatgcattaatatttttaatttgtagaaaaaaatacagaaaaacttctgaaaatattactggttctgctgtttatattagggaaagattatctgtggatgattacattggtgtttgagtgttttaatgatatttggtatttgagaaaactgatagggtttttttgatgggttgggaagacattactgttttttccatttcaaataatggattatataggcttctactctcaaaaaatctgtcattcaacatctttttggcaacaggttggatttgtttttccataaaaatcacttgatgacatctaattttatgttgttaaaaataaaaagtttaagaacatcctcagaattttctgtcttatacttgcaaattgtgtagtcactgtatttatttccaagtactgacataggagcagactagagatattaataatttataattttagttttagtgccaatttgaatttcaactgtagaatactatgatccaaacttactccttttgatgttgattttgggtgtaacctaaaataaatgacttaaactacagacttcatttttcctagccctaaatgttaattgccatgacagatcctcaaatataaatatttactgaggtttcatggctttatttaaaaaccagaattatttgtttctcagatagtatcatccaaataaaagatgacacaaatttcttaataattaataataataacatgtttgagctcattctattagccaaggactcttctgggtgtttgcctgagttaactcatttagtcttcacaacagaccaatgaagttagtactgctgttgtccacattgtgcagatgaggaaactgaggcccagcattttattcacataactagtaggcagtagagccaggattatgaactcaggcagcctgacaacagactctgtgcccctatccactgcggggacactccatttagcttattcagagctatggtaattcactaagttaggtgttaggactcaccatttgtgaagttctttcttaactagtatcttacaaagtgcaagtctgagtcctttgggactgtgtagacagaaaaatgatttgttggtagtcctggaaattgcaagtgagaatacttaaaaagattactggaaaagaagaaattcagtggttcccaacccattagtgttctagagacaggggatgggaatagaaccttccagtactgggtcaccttatggatgggagggaaacattgctggaggcattgagaggcaggccaattaaggataaaaagagacagtgtcagaggttcagcccagacaagccaggaacctcagtctagggtggtggtctgtctcagccttttgttcataatcactccctgaaggagtcttattaggcatttctattccttatttccccccctcctcccctgtgaaattataacactcagatgtatctgtactttgtacatagaagaataagatttttcactccctaagaacaaatttttgcaatgtcagtgcctaaaggcacagatacactgaatggtgtcaatacacatggggtggggagagtgggatcagtgaagcacctgcaggaactaatgggcttcaaagttagaaggacttagagacaggaggacctaagggaggtgaagacaggaggttttcttaaatatgtgaagtcaggagttctttgacttagggtcaccatcctcacctacccagatggggagtttctctctatcttcttataagcttcacttaactcttgtctcaatcttccctccatggctacaagtgtggtcatcatgtaatctgaaatgccattgtactgtaatgaaatgtatcatttcatagtgtgtgttttgaattctttttgttttatttataaaccaggttcccaagaagcctgctttaaattctttttatttgagctcagaaaatggcagctactccaatttgcaagaaatgggtaatgaaagtgctttaaaaactagaatgcactcatttgagatctctaatccccaaatggcaaccctcaggaagaatcaagcagtaatttgtgttccagataaagagcaaactgattgtgcctggtcttcacaaggccagctagctcattttctcataccttacctctcaaataatctaacactacctaggaggcaataactataacactgagtaaaaatcttgctaaccttttcgcattcaaatctctctcttcccgtgtgactttgctgccacagggacttgattctgagctctgtaacctagcgcacatcccaaggatcctagtaaaccttaagtaacctaatctaatcacatactaggaggcatgataaggaaaccaaggcctcccaatatttttcttcttcacaaacaagctgtggttatttaattggttaaagggcagggtgtatcttagaacaaaaggagtgatgaagaaagcatctaccaatacatgggaaaggcacttcaccagattattatttgaaggtttgaaagtactagaagtccagccagagaagaccatgcccagaaatcagagaacttttgggaaactataatcttacatttgtggctgtaagtatcaagcctgggtatacattagaatcagcaagaagcttgtcagcttccgtcccagagagattttgacttagaaggtttggggtgagctcatgggcactggtgttttttaaaagcgccccctgctctgccacctcccagtgattctgatatgcatctaaggttgaggatcaccactttacattataaagtgctttcacatacatgattcaggatttttgtatgcacacagaaaggaaaaagaaacaccgttaatgactgttgactgtaaaagaaaataggaagaaacaggggtagtaattgtgaaaatgaaaggattagagaaaagtcaatttctagaaactggaggaaaaaaacttcacctttctaagggctaaaattagtcctatgcatatagaacattaaggagggacttgtatgtccatatttactgctatatatggaatagtttttagatgaccataaaattctcagcacagagaagtctgaaaacagtcatttagtatttgatgccaattacttcctaagatcatattgcttctcctctataaatgaaatatattggagaagaggaaaaaaaaaatttgttgttagtaaaaaggtgtgttagaaaatgtcatattaatattcgtatgtgtatttcaggactgtatagacagacaatatacctcagcaggctcttaacagctttcagatagttataattaataattctgcaggtgaaaactggcaagtggatgatcttggatataactgaaggatgaagtaaagccaatgctgtgggctctcagactgtgtagggcggggcggggggtcaggggcagaatataaaagtcaggttgcagcgtggcagaagtaaagaaacttgtgatcaaaaagtcagaaattaaattttaagattttcaatgtgggtgatgacaaacttagactgtgaccaaaacagtggtggtggctatagtcaacagagtggaggctaagttttcatctccatgtcagctaataagatagagaggaacaatgaatcaggtacagaaaataaaatcttctagaccatcagtatttaaggcaagaagcttcagttaatcagcccttcacactctgatttctgactaattaaaaatggctaataatagcaataattacagttcagcacttactaagtgtcagtattgttcaaagcactttgcttacatttcaatattcacaataattttgtgacaataggtactattggcccatttgacagatgaggaaactgagacatggaaaaagcaacttactcaatatgggttacaaatgctggggagaaaatatagacatatttggggtgagaaaatattttacagagtatcagcaaaagtgaacagagtccagaaaggggcctgcctatctgtgtatgttgcataccaacagtttccaggctataagtaggggcctggtaagagatgagtctgaaataatgcattggtaccatattgaagacaattctaaacccccagtgttgagtttgagctttatttggaaggcgggaagtgggaggaatgtgtcataatcaaagctgtatcttaagaaaactaccttttaagtatgaacaaattagagtgaaaggacccaaattagggtttctgtttgtttgggtggtttttggtactatttgacaggcaatgagtctatcaatgagaacagtggcagttgaaggttaatgaaagagacaggtttgatgtatgttacaaaggtcaaatgtaaggttttggtaactggttaaatgaagacggtgagagagagggaagagtttaaatagaatccaagatttcaagtctgagtgactgggtgactactggcagaaattcaggagaggcactttgtggggatgagagggccagcaggagaagctagactttgaaaatacgcactttgttgtgtgagcaggccattggaggcaggccatagcaggaaggtgggaatgtaagtttgcaacttacaagagtctgggctagaaaggaagcttttggtgtcatctgcataatgatactgtggtaaactggggagtgggactgaagtctctgaaggtggacagaggaagtgaatacagaacagatccctggaaaacatttaaatttagggacaataaagacgagtcaaaaaagcagacagaaggtaaaggaaggatgggaacacccagaaatgtgcagaaatatacactgagcacaagggaatggaaggttccacaaacaaactgacttggcaaacccacatagaaaccaagaagaatatggccatttgaattagagtagcaacagaaggagagaaagtggactcagatggaaagaagtatgtcatagcagacaaaggcggcaggactggcctacactttcaagaatttgatagcaaggaggaaagagaagacaatcgtgtgtggagtaaggcatgtaaggaaaagtactttgttttgttttaagacaaaggggtaccacttaaatatattttagacagagataaagaagccatagagagaggtgagtgaagatgcataggtaataccaggtagtagcagcaaagatgattttagcagcagaaattacagtgggatgaggtcctaagctgtttgctgaccttatcataaaataaactgctatccctaccaattcccaagcagcaattctcttagagaataaggcaaggatcagtggtgcagggtattttcctcctcttctgaagaaatgctcgaattttattcatacattccaggacagaagggaagaatcactgtctttaaagaataaaataatttccatgagttgtaggggagtaataagggaacaaactttgatagtgaatttgaattataaaatattaggattttctatttgtaagtactatttgcagattacatggtttataaatattgtatgtgcaggaatggggggacattgttagcctgtttttcgaaaaagaaataatttaatgcacttaggcagttaaatgttgtttcacccactccatatgacatgaaagctttctggaaaagaaataagtaggacaggaaaaatattgatagtggttaataagtgagagttggctttgactgctataggcctatatagggcaagtgctataaaacattcagcaatctgcttcattgttctgtcctgtcctgtcctgtaaagggggttggagggatgcagggatggtgctgggcacaggatgtcagaaagcctaaggtggggctggggaaatgaaaagagaacaaagaggtaaaaagagactctgttcctaggaaatatacatgctctccctcttctgtgggatgggctgggtaccttgtatgtccctctatattcaaaatgatccctggggtcccattgctgtcacatttctgcacagtcctcagacacagagaaaagtgttggaggttgttagcacatctccctctggagatgaaactgggctcaacaccaacaagagaacaccagaggggattcatctctcctccacgcttggataatggctattccctaatgcccagggaagaattaagttcagtatgtgccttgcactatattacacactcaatcctgaacagctgggctgttaatgaaatttaaaaagaagagagaactcactattcaccatctatatctaatgtattcataataaatctctcaatgaggaggtataaaaatttcctgttgctatacagccaaaggaagcagagcagtaggcaggtatccagggagcctcgttaacagagataaccaatgtggaaaatccagggggacttgttccacatttctattagtaatggcaatttttcttacctgaaatatgctggtaattttctcacttgcaaaattcaatttgcctaaggatgaataaataggtcttttcttaatacttactggatagcctctatgttccagatgctacataaaagtaaagcattatttgatgggtttttttttcctttttcactttatttcttaggaaacaaaacactgagtcatcacagaatgatttgttttcaagaaaattgaaataatataaaatggtagtgtggtaaaattttgtattatatgtgaaatacctacgctaaaatttataaaaatggaaaatggatgacagtgaactagtatgaatacaggaattctgatggtaatattgcggggggtagtggttaagaacaaggttagtagtgccaaagcaaaggcattttccttctagattttacttgcaaagtgaagccagctgtgtggagtccctcacctcagagccagtcacagcagtaaccaaattagcttccgtatgagttagtggataatagacataagaatggttgaccctggatagaaccaataaccaaaatgaaagatatttgctaaagatgattttcatctagaaatagctactattgaaatattttctcactgtaattaggaatatgcctatggtggtcactcatacttcataaaaagataatctctgtctagggggattcatgctttcttcctcacaccccctgcccttttatttttagttgacagtaataattgcacatatttatgggatacagagtgatatttcaatacgtgtatacaatgtataatgatcaaatcagtgtaattggtataaccatcacctcaaacatttatcatttccttgtgttgtgaacagtcaaaatcctctcttctagctctttgaaagtatacaataaattatagtcaatcatattcatcctacagtgctgcaaaacaccagacttcattcctcctatctagcataatttttttttttttttgagacagagtctagccatctcccaggctggagtgcagtggcaccatctcagctcactgcaacctctgcctcctgggttcaagtaatgctcacgcctcagcctcccaagtagctgggaccacaggcatgcaccaccacacctggctaatttttctatttttttaaggtagagacagggtttcatcatattggccaggctggtctcaaactcctgacctgaagtgatctgcccgcctcggcctcccaaagtactgggattacaggcatgagccaccacgcctggtcctagcataattttgtatctgctaaccagcctctctatcctacctgctctgccacccttccagtctctaatacccacagttctactctctatttctgtgaactccaaaagttttttgagttcccacatatgagtgacaatatgtaatatttatctttctgtgcctgacttattttgctgaacataacgtccccaggcttattcgtgttgctgtgaatggcaggatatcattcttttttatggatgaatagtattccagtatgtgtttataccacattttttatccattcgttggttgatgaatatttaggttgatttcatatcttcactattgtgaatagtgctgcagtaaacatgggggtgcaggtatccttttgatatatagattttctttcctttggttaaatacctattaatggggttgctggattgtgtagtagttctacatttagttttttcagcaccccccatactgtcttccataatgactgtactacttgacatttccaacaacagttacatacatctctacagcttcaccagcatttgttattttttgtcttttttgtttttataattgctgttgtaactgggcagggatgatacctcattgtggttttgatttgcatttccttgatgattagcgacatggagcattgcttcctatgtttgtttactatttatatggttttgttgttgttcgtttgtttgcttgagaccaggaggttgaggctgaagtgaatgacaaacatcttaaaaagacagggtcttactctgacccaggctggagtgccgtggtacgatgtttgtcattcacttcagcctcaacttcctgatctcaagcaatcctcccacctcagcctcctgagtagctgggactgcaggtgtgcaccaccactcctggctactttttttgtattttttgtagagatagggtttcacacatgttgcctaggctggtctcaaacttctggactcaagcgatccaccagtctcagcctcctgaagtattgggatcacactcatgagctaccatgcccatctgtgtgtcttctttctgagaaatgtctatttaattcttttgtcctctttttaatttgattatttagtttttttgctattgagttgtttgaattccttgtatattctggatattagtcctttgtaagatgaatagtttgtaaatattttctcccattctacaggttgtcttttcgctcttgattgtttcctttgctagggtggagacgtcagtttaatatagtcccatttgtctattttagtttttgttgcctatgtgtttgaagtcttagctgtgaaacctttgcctagaccaatgtcttgaagcatttcttctatgtttgcttatagtaaagttaaacaataaaagaagaagaaaggtacaaagaatatacaaagtaattagaaaataattaacaaaatgacaaggactaagtcctcatctatcaataatagccttaaatgtaaatgttaaattccccaattaaaagatatggactggctgaatggattaaaaaaaaaaaagacacaactatatactgcccacagaaaactcacttcacctgtaaaggcacacgtagactgaaagtaagggatggaaaaaaatattccacacaaacggaaaccaaaagtgtgcaaattagctatacttatatcagacaaaatagactttaaggcaaaaaaaaaaaaaaacacaaagagaaagaaggtcattatataaagataaagtgatcagttcagcaagaggatataacaattgtaaatatatttatacacctaacaccagagcacctagatttatgaggcaaatattattagagttaaataggtagactccaatagaataatagttgcagacttcttcagcattggacagatggattatctagaaagaaaatcaacaaagaaacatcagacttaatctgcactatagaccaaacaggcataacagacatttacaaaacatttcatactatccctttgttaagacagaggaacagaatgtgcgtttggaccatttaatagcagttttggctcattgaggtacgaattcaaaaagagggacatattaactaaactgtgttgagcccatcgaaatggttagctgatctgtcaataaatcattcctactgactcagacttttacaatagtaaaataatatatacaattttttatatattttaaaaacataaaaagaaagcaagtttagtttcttgaaatcctgcctttcctagaatttaaatccctttctcggcattgttgagatagacacagtgttttcataccctctgtttcaatgatggcatgaataaagtggatataccacaacaaagcattcttctataagagacacttaagcattatctccagtttgtctctattatgaatattctttggcagacatctttgttttcctgaatgttagagtttatttcctcagaatagctttcctgaaatgaaattactggagcaaattgtatgaatattttaaagcccctattttcagcatatttctaaatagctttgcaaaaggatatttattaatttgccttatgccagcaaaatatatgaaaactatagtattaccccaggcttaacaagctgctacattacttttctttgtgtttattttattcctagcaagcttggcaaattttgctactattcatttgcagttttagtatgttatttggtgcttaatttttgttttgttttgttttctcatcaattggcttatttttcccagctcccgtctcatctgctttcctcacctgtattcctttgtacaggctcacatgattcattcagctactgggtggatgaaaagtccccagtggggcctgaccaaacccaagctatcaaacgcctcgccaggatctccttggtgaagaagctaatgaagaagtggtctgtgactcagaacctgacatttcgagaacagctggaagctgggatccgctactttgacctgcgtgtgtcttccaaaccaggggatgccgaccaggagatctacttcatccatgggctttttggcatcaaggtctgggatgggctgatggaaattgactcgtttcttacacagcacccccaggagattatcttcctggatttcaaccacttctatgccatggatgagacccatcacaaatgcctggttctgcggatccaggaggcctttggaaacaagctgtgcccagcctgcagtgtggaaagtttgacgctgcgaactctgtgggagaagaactgccaggtaggagggaaggagagataagcttccaagagcaagaatttaactcttcctgcttttcctgtattgccgtctgtaaaatcactcaatccagggctcttaggctaaagagtggattgtttggaatattaaacatatgcaaactagttcctgggctctagaataggttcaagggccagggctaacacctgccaaatacttaaagcttgtccagcaaactgtttgacatctaattgacttttagtggcctggccagaaccaaccaaggcaaagttgtaaaattgggccaataggtcattactattctctgtttcccgaggtccatttttacccttctggttcccctcagggatagtctgttccatcttgccttcaactcaatgtcagataatcctggccaaggtatcgactgattaggaaaagtattagctgactgaaacatagtgattcatctcaggagtgttaatattataaaagtatttgggtcttagagggagagagagttaaggaaggaagagcctgttgaaggggctgcagcctgtaagagcattccatagtctgcttaagttgagaagagcctgccagcctaggaccatgagggacacgctcaggaagaggaatgtgggcctcagatatattccactctgatcctaaaggatgacagtaggagaaaagagcttcaggaaagtgtttaatttacactctctggaaaaaaaaaaaaaaaagacatacctttcattcaaagttactcacttgctcagcagatgcattaaccaaaacaactttacgaggcagatattttttaactcaaggaggagcttttgattaaaaatagtttaaaggttattcacttgaaaatatttattaaacaccaggtacatgccaagtaacctctaaggactagggataaattagtaaataaaatagacaaagataccttgccctaatggagctgtcattctggtggagggagatagatcatagataatagagataataaacatacatatatgtgtgtgtatgtgtctgtgtgtcacatatatacatatatgtatattctctctccatatatgtgtgtgtatatacacacacacacacacgcacacacacacataaagtgttagaaagtgataagagctatggaaaacgaaaaggtcaagcatggtgagagggaaccaggattctgtgggttggaggattggttgaaatgtttaaaagttgatcaggagaggcttcattgaaaagatgacatttgaaggggttaatcacatgcttatttgggggcagaagaagcaggcagtgcagagacccaaaagcaggagtgtccctgccatctttgaggaaaaggaacatgcagtatggctgtagagcaggtgaagacagagtagtgagaggaggtcagagaggcgactggtgatcatgtgagcctagaaggccctgtaaagacgctagccttcactcactctaagcgaggagagttctggcacaggatgttgtggcctgacttaggtcttaataagatctctccggttgcaatactaggaagagaccagggcagggggattgggcagaagtaaggaacccagtgagactgttagtggcaagtggtcagattttgcatctgtcagaaggtagagccgacagggtttcctaatggatatgatttggggtatgaaagaacatgaggattcaaggatgagtcccaggcttggccggaataactggaaataccaagttgtttttgcgcaccctgagaagttctaaatgtcttcgacaccacggaggcttcatgagttaactcttagtatctgctaaagtctatctaaacaagtttcttcactaagacttttgtaagtgatattttgctaaatatttatcacacctctataccataaaagtaagtttatatctgttcatgtctaacttggagagactttttcccagtggcatttctcttttacaatatgagataatggtaacaacaactaatgtttattgaacctttacaatgagctacgtacatggattaactcatttgatcctctcagtgacaccatgagatgggtactttgttattgtcaccattttacagatgaggaaactgaggtatggagacactaagcaactcacccgagagaaacctgggcaaattttaaaatcctagttagtgagaaccaggattcagtcgcaggctttctggctttccagagttcttacagcttctcatgctctctgaggggtatttaggcacattggtgtttttcacaactggtgttgtatattaggctaatgaaatactttgcttttattaatgagcccctattatcagaagatctcagagaattagcagaatgggagaaagggatggagagctttggaatttggggattcggttaaatttgagtacagatataattttatacacagccaggattgagatgggttgacatattgcatactaaactgcttacaaatctgcaggagtaaggggtatcttcaggaataaagaatagtgtaggcagtgaatttctaacagtagagtgatgatctatcatagttttttaagcatgggctaatttaactgtattatccaactacaaatacttctaaagttatgaaggaaagagactgtgatgatatctcagaaaaagggagagcatcatcagtttaaatcctaagatccccctgtgctcccttctttcccatgtttttcctgccacatttcttcttgaaagctaaacaggctgggtgcggtggttcatgcctgtaatcccagcactttgggaggccgaggctgatcatctgagatcaggagttcaaaagcagcctggccaacgtggtgaaaccccatctctactaaaaatacaaaaattagctgggcatggtggcacacgcctgtaatcccagctactcggcaggcagagacaagagaatcgcttgaacccaggaggcagaggtttcagggagctgagatcgtgccattgccctccagcctggctgaccagagtgaaactccgtctcaaaaaaataaataaataaaataaaataaagctaaacaaagagatttcaaacagaggcaccagtcatccctgctactgccagggcagagttaaactttaaatatttttcatgtaatgagctgcctcacatgtaagcccctgcgtattttattactacaatttagttgaaagaagtatgctaccattcagtcaaatttcatttacttaacatgcaattacatcatagccataggtatatatttatttgtacattagtggctatgggttttgagggtacaatgagttagagatttaatctacatcttggaagtatttaggatcttaataaaatggtaagagtacataacactagggaatacgaaacaactgatagacaattgcatgataaaagtgcctcaaatgttctgtactatatgaagaaggggattttgtaataaatcagttgaaaagtagaacgtagcattaagtctatatcccagaggctccaagtaaaagaatgaccagaataagaggaggtccatcaaggaatcgttcttgaaggaaatgagacttttaatctgagtctcaagagaaaaactgaacatgaaccactgagatagagaggagagtatttcagagaaaaacacagcagacagaggttggggggagagggaggcagatgcaaaacacaggccctgagtgacagttgctgcacctagatccctgtacagtgggagttggtttgcaaggccggcctccccctgtaaacagaaattctccctgtaacctttagggtcagattgctcaagaaggctcttgaagaaaggcataaagacccttttggataatttgtacttaatgcactttttccaaggcagagtaaagaatggcacagtcctctcgttccctgaaatgtggcccacgggcaggcccaagatgtgtctgacaggtcctgtcacagggctgcaccgcctcccacctctcccacggtccactgcacaggacggctttcctcacagcccccaggcttaccacctggccaattacacctctacaaggaaatcctccccttcccccaggcaatctgcttatcatgagcctgtgattaacctcattaacacaccggtttaccacagacgtcattagcagtcagtcagacattactcaaaaccattagaaacaacaagaacagccgttacccagttcagtgcaaccagcctggtgctccccagctctgggccttggggagcagttagtcaggcaccttagtcacgagctaaatgcacaccggaaatgaggctgacatccagagctcttgttcttgggtgcccgggaggattaccctctgtggccaactatccggggatggcagtccaggcctcgtgagcatgtgcagggcattcctccaggaaaagattactagtgcctgggacagggaaaaatatattcctttagaaaccttcacagcagagctctgaattgggacgatcaaaatagcagtttcctatcccacagctgcctcccagaaactaattaatgctgtggatgtagcttgctaattattttcaacatcaccaccatcctgagcggtccctgtggaggccagttgcctctgcaaagtctcccctgactcaagtggcacactccccactctcctgggaagggcagttccaggcagagccagcacacacgattgaaagtctatttacccacaaattagttcagtgtttttatttcaactccaaaagctgtcagttttgtaattacaggagacataacttctagacagcgcttgctgctcagcctaagagttctcagcctgaggtccaaagcttccccagagggatatgagggtagaatttaagaagtctttaaatttggatgggaaaaaaaatacatattcatttttactaaaattgaactgaaaattagtatacccatagattatgagggcaggcggtgacccacaacaatcttagccctgcctgatttttatctccctagatgcgtccatctcacattttggttatcgcagatatctgagataccacttatgcttatccctaactcacagttatgggacttattagacttacaacaaaatatttttattgaatgcatttatcatgcagcacatacattaatttattacaaacttatttaatatattgattgctatatttccatatcatagattttctttgtaatcctgtatattgtatgcattcatttaacatgtaattctgagaagggggtccatgattttaatatacttccaaaggtatttatgccaacaaaattaagaatttttgagtcagacatatggcaagtgctctgtaaatctttgctgatttcctaaaaatatatattaatataaacagttcttgactttccacatatgattatattttcttgcctttttcctagcagtccgtataaaacggaggagttaacattcagcatttttatggattgctctcctttttgtgttttgaatatttcaggttcttattttctaccactgtcccttctacaagcagtaccccttcctgtggccaggaaagaagattccagcgccctgggcaaacaccacaagtgtgcgcaaactaatcctcttcttggagaccactctgagtgagcgggcctcacggggctccttccatgtctcccaagcgatcctcacccccagagtgaagaccattgcccggggcttggttgggggcctcaagaacacgctggttcataggtaagaatttgcttccaccccacaaggaaagctttttaaaaaatatttatcttgattctattctgagtaaatcgcagtaaagccatgtagtctgaggagttagaaaaacaacaaaacaagcaaaaaactttgtattcgagaaaaccatgcagttgaggtggattgtattaacaaaggctctctaaacactttgttcataagtacacatcataccataaatactgtactctctaaattttgctataaggcaaagcacattgagccaacaccatgtctgttcactcctggtacctggccacatggggtcctgcctgtgcctcgcagctgacccaggcactcatttaagaagcattcaatataggctgctgtcctaggtgctaaggattcagagctggcccttcaagaatttgttctcctttccatggtgaccatgagtcactgaagaagcagcttaggatgccacccaccatgcccatgctgtagcttcaaatacttcctcagggcagaattgagcctggttgtacaattagatagcagaagcttcagtaattttgtatcagatggtgttccttatcccggacaccaatgaatgatagatgttctcaagaaaaaggatggtttatttgtatgcgtgtttgtgtgtgtgcgcgcacatatatgtgagtgtgtgtatgtatgtgtctatgtacctgtacatgtgtatgtgtatatgtatatgtataaaaggaatgttataaatacatttggataacagggaatcccttgcaatccaagctaaggaagctaatacgtttgggtagcaaaagatatttacaagaatcagtttggtccctgagtttcaggttgacgagcagagttcagataatgaaagattcatccaaaaacatgtttctatttatttggtcctgagtttaggtaacatgagttcagataacaggagttcacctagcaggagtttagacagcaggactagatttttctttcttggtgagagctcctgattatgtcaaccatggacaaaaccagaaagtgttttctgtgtggctctactaagtcttgactgaattcattatgctgaacttggaaaagtgaattttataaaccagcactatatctctttgaaagatcccgaattagaagctttattgttttaataatatgtttgtgtatccacactgttttcctcatgcctctggtatatttgtagatcaacattatttatatattcattcaacaaacattgagcacctaggaagagctaggtacaaagattcaaggtgaatattatactgtctgctgtcaaggaactcacagtctagcagcagaaactggcatgaaaatttctataaagcaatgtgaaataccactgtgaagaagtctgtgcagacagccatactaataatggagagggagtatttaaaaaactaaggataagttatatctgtataccatattctgaatatcaaatggctttttgcagatgatttcatttgattcttaaatcaagtcagcctctaggatggcacattgtctacagcatattatcatcccctctttagatgggattcagggagcttaagtgaccccaatccatacagctagtaaaagtcaagaatacctctcagactctggccttctgatcgttagaccactgcccttttcagcgttggacactgacttggatactgcatatttttgtgcttattcttttctgttccacaggcctgcagttgtcttattagtacctgaatctggtaatatctcacaggttataactagtaacccacaatgtcacaaagcttttcatatctgtacattcctaaaactttaatctggctgcaagtgaaacattggctctttcctttatgatgagagataatgatgttggcatgcgcccaaagccaagggatcctactatgccagagcccttgcactactgctagcagcaagccaatgtccccaagcttggaaagatactttctttggcatctcgcccccctgccggccataagaatattgcaagtatgcatgcattcctagtcctgcacatcaactgaaggaggaaaatatagctctggttgagtttgttccaaaaggccagtgcagagtgtggctgtcatttcctctgggctgttgaacaaacataggaccttcccctgtgtgccaacacccagagggtctgtcctaacaactggtcgctggcactggtggtcagctcaaaccaagaaaaaaaagacagggtatattttcttacaaatgtagaggtggtttctcggcagggatttaaccccctaactcttcgataaactttggagctaagatcttgttcattttggttcaacaccgtagaaggaagccacaagaaatatagccatttgactcaatttccatggtggtttctcccagacttatagaaacctgaaattcaggttcatggcactctcactgaaatcatatgaaaatgctttgcctaagcttgaggacagagcatccatgaactctataagggaacatggactgaaatcagaaggcctgagagtgcagcctgacatgctccctgttccagggtgcattgtgttgtgccccgtcccatccccgccatccccaagctcacatattgaagtcccaactctcagttacctcagaatgtgggtacatttgcagatacggcctttaaagaggtaattaagtcaaaacgaggatattagggtgggccctaatccagtctagctggtatccttaaaagaaaaggaaatttagacacacaaagagacaccacagatatgtgttcacagaggaaaggccatgtgagaatgcaataagaaggcggctgtctgcaagccaaggacagaggcctcaggagacatgaaatctgatgacactttgatcttggatgtccaacttctaaaacaagagaaaatacatttctgtcatttaagccaaccagtatgtggtgttttgctatggtagccctagcaaatcaatgcagtccctgagcaacagggtggccgtggacaagttttctgaggtctctgagctgtggttttctcaccagttaaacaggattaataaacctcatcagattgtagccttaacatgaaaatgccagccacagtggctggcagaaaatagacatgccatccctatttgtaaagacacccagaaacactatggaccacccttgttcccagctgggccccaaggtcaaagggaagtttttaacctcctgctctgccatccatgggaactgttgcctcacgggcctgtcagcactgtcaggttcagccttttgcacagatcccttgtcctggtaaataccaagagctgagaaaataaagtagctcctcttcactgtgggttctgcatttccccttcttcgtacttaatcctaattatttgatccttgccttggagaaggttgacacatgctacccgaagctgacacagaactctttgtcactggaaaccacaggtacatacctttcactgcatttctctgctcaggctccagggatcctccaaggtgaggaggctctggctgcagtgactggagttacaagcctttaaggctcatttccctgtaatgaccagcagagggcgcctgcacctcatacttcaacactgactcaggcttttaaaatgaagtcttgaatctatcaggttcagtactactgtgtccttggtgtggttccttgtgtatccttggtctatctttaaggaagtctgtatttgcagcttctcacttccaaaccacaacatgttgtcacgtaagcaggaggatgtgacctctttaaggtgtagtttcttactcccagccaccaaatatttctacctcacactcttccagttatgattccttacctttttttttttaccacacttatcatatcacagaaactcttctaaacactttacatgtattattttgtttaattccccaaaaatctgtatgaagcattattattatcactcttcaggagtccccgttcaaaatggaagtacccctgggagggtgatcttttaagtcataatcagctattaatataaaaatataggccaggcgcagtggctcacgcctgtaatcccagtactttgggaggccgaggtgggcggatcaccaggtcaggagatcgagaccatcctggctaacacggtgaaaccccgtctctactgaaaatacaaagaaattagctgggcgtggtggcgggcgcctgtagtcccagctactcgggaggctgaggcaggagaatggcgtgaacccgggagacggagcttgcagtgagccaagatcgcgcctctgcactccagcctgggggacagaggaagactccgtctcaaaaaaaaaataagatgatggatagatgatagatagatagatagatagatagatagatagatagatagattgattgatttatgatatgtgttttagcccgtggctgattgtagagtccactgagagagggaggagacccaggactgattatagttatggtaagagaaaaagaaagaggagaaggacaaaatgctaccaaggcctgaacagggttgtctggaaaactgagaagtcaagatatgtgctgaaagaagggcaggcagcatcaagggagagtttcttctgtcttctttaaagcattctcagcctactgagtatgtattgagctgtttttactatgatgtaaactgtgagtacactttattgctttcttctctatgctgcctgtggtagtttacacttactattaatgcagaaattatcacattgaattttcattattcctttatgtcactaaataactggctgtcacctaggaagcctttgattaataaaatgagactgaaagaccgttagtgagacaactgattaagtattggtctattaagaagccacacttagtgatcgaataactgtatatccatatgaaaaaagtaagccttgacctcctactttataccataaacaaaaatcaatttgagatggttcttagagctaaacctaaaagctaaaaaccataaagcttttagaataaaacataggatatgtttgtaaatttggagtggactgaagtggttcttagatcacagaagccataaaagaaaaaaaatggacaaattagaatctgtaaaaattaaggaattcggctcatgaaaatatgtcactgagaaaactgacagacaagctataggctaggagaaaatattcacaaaatatatctgacagaagaccagtatctaggctatataaataacttctacaactcaacaatttttttaaaagaaaatgaaaaaatgagtaaaagaattgaacagataacagttttactcataatatccaaaaaactggcaatagcccaagtgtccatcctgccagtgtaggaaactggatacacaaactgcagtatatacatacaatggaattctcttcattgattttgaaaggcaacgaactactgatacatgcagcaacgtggatgaatttcagaacaattatgccaagtgaaagaaaactcacgtgaaataatacatttttcatggcttatatgaagttttaaaacaggcaaatctaatctacagtggaaaaaaaaatcagtatagctgttgcctctgggagaatggggcaggtgttgatgaggaaggggcttgcaggaactttctggagtaccagttatgttctagaccttgatatgagtttgaattatgtgtacgtatttgtcaaaactcggcaagtgtaccattaagatttgtgaattttattgagcgtaaactttatgttaaaagaagaacaaattaaaaacagatattgaactccagttaatcatatgcatgctgaagtacttagggaatgtgtatagatgcttgcagttggaatatgtcaaaaatacaagatggattgatggaaggatagtgacagattgatggatagatatgtggtaagcaagtatagttaatggtgggatctaggtggtggatatatttgctgcaaaattctttcaacattgccatatgtttgaatattttcatgatttaaaaaaattaaagaacccattaaagctgaggctcttggtcttagtttttctttttcttttttcttttttttcagacagagtctcactctgtcacccaaactggagtgcagctcttggctcaccgcagcctcaaccttccaggctcaggtgattacccctcctcacagacagggtttcaccatgtttcccaggctgatctcaaactcctggattcaagtgatccacccacctcagccccccaaagtgccgggattacaggcatgagccaccgcactgggcctgatcttagtttttcaagttcctgttgacatggtatctctttgatgctggaagcaaataatctcctcttccagcagagaaaccctggaaagtgtaattttctaatggaatagagactacttcatccctgaaggagatataaagcttaaatggaaatacctctgaaagcttgtgctcttattaacatatttttgtaatattaagggaaatgttttatgtccatgtctggagaagaccctctaagctgtactgtatccactctcttcctccaacactttcctctgtataggaatcttcctgccatcctggactgggtgaaaactcagaagcctggagccatgggtgtcaacatcatcacatctgacttcgtggacctggtggactttgctgcgactgtcatcaagttgaatgacctcctacaggaggacacagctctggctaaatgctgatttaatttttaatttaaccttaatgttgaatttgttgatccagggtagagttctaaaggatgtcctgttaggatggcccctggggcagtgatgatgaagtaagaggaagatggcttttttttctcccttcctcacagggccatttagataaaattacagggctattaattgcatttttcccaaatgagactttttttaaaacttaagtccaagggaagaaagcacgcttcatgtgaccaaggtcaggacctccccagtggcttatggtggtgaatggaatttggaaataggatctctaggacccattggggtattgagtgtccccctaattggcccagctccctattgtcgtctggggtgttgtgtttgagccggtgaaaaagttgaaccagaaacacattcctggtgaaaaagactggctcattgcagctgtggaccaccatctggggtggatctaacatcaaccaggggctctgagggggaaaagagccaagcaccaggtctctctaggattgttggatgtcaccacttttctgagagagtaggactcatttatcactaagatgtttcaaacacaagctgttctttcatagcgtatactggtaactggtcacctcattcttcagataaacagtgcatactacccttagtatcagaaacatgcttcccagttttaaaacttggattcctttctatttcttttggccccttcttaaaagtgaaaagaacaatgatgggagatctttttagcgtggggcccaacaagagatagatatgcatgtttgctgcatgccagatatcttttatttaattctacagctttttccagaatggctgccaggtagagcacctgcatcattttggcaaagtcctctttggagtggggtcttcaagcctgatcttggaattgcgttttattattgtctgcctaggactcaggtctgcactgtgggacacaacgctaagtggaaggccccttatccatggcaccatggaagcaggcgcaggatgcatgggaaactgcaatggcattaaaggaggaagctccaagtggatttggagccattctataactccttgaaaacaagactacctcggggatatttaggatgactcgtgtgtcaccaagtgagaaatacctagtgttggaacatttccagtccttctcttgatggttctactttctgcaggttgttttgagcctaccaatcactactgcatgaggactttgaaactcgagagggaattttttttttatcgataagaggtgcttatctataaggagccctcttgtgttttgatttatttatttatttatttatttatttatttatagattaaatatctgccgtgcttcttacatcaagagcactcacacaggagcttactgaacttttcttacccaggatagatgctgctatggtctttctgtcctgaacaggaccacgcatctcagggctgtgagtgattcctgactctgctgttcatgtcctggctcccccagtcctcctggggacagtatacatgtgtggatgtggtctagatctgagaagtcactaccaagccatgcccatgaacgaagataaaatgggtcgtgaagaactattagttcataagtagaccctccagaagagtgttgaaaagaaaggctctagaaagaaaactaggcatggaaatgtgtgcactttgttgctcctcagcaccatctgagaatccctaaggaagtggcagcttctggattcttaagaaggaaatataaacatggagtcccgaatggatgtatgcatttataaagattgtcagactcttcttccagcagtttcctgtttctgtcttttgatgcccatagatggattttgcatgttgcttgcagagaggggtgtcctaggtgaggtactaaaagcacatccacacccccaactcttggtcttccaccctatacgttctgtaaaacaatttaagacctggcttttagcttgcacccttgaggaggtcataatagaaatgcctctgggaaaatctggttgaactttcctttttttgcatttgaacccctccccaaagggttttctgggataatgtcaaattctgtagggccttctctggataagagtaagtaagtgtgttccctcgttttctaaactttccttcaattctgatgctaaatgctaatgacaagctctgaaatccctggtctaccctcagggttttatttttgttgtcatttcattttgcttttgtttttaatttttggtcaattgctaggggctagatcatttccccactttttaccctttgttacttggcaaagagataaggaggcaagaggagaattactgttctctgttttatttgagcctcggctttgtccaggtgtttggtgctatgaggccaggtgtgttgacaagtatctacacaggatgccagtaacacccaagggctgctgactgttccatgaaatgtttacatgattttgtcctttagttcttaaatatatggttgcacttcacttgggttgtaacatttaagtgcacctcagtgtttgcatgataaatgtcatcaagcatgacacaaaagcccagaaaactgtaccaaggttgcatgcacggagtcctgctctgcgtggtgcgtgcaggtgctcactcctccatgctgcttggagctgccagccttgcttgcaatttgaaagtctgcacaagagttctgggagataggaggattatttacaattttcccttgataaacacctttgcatcagcagaatctctgcctcaagaaaaagttgcttaacatattgtaaaggatgtgtgccttctgctccttgaccgtgagaccagacaggagaactcaggcatgtgggacagagggaaaacagattttaggttcatgactcattctgcaactgccaacaataaaatagtgacccaaccacatcacttattctcacaagttctggagacctttcagatcaaaacaaggctctcatacttgctcagaactaacttcaagatcagctaagaagctacttgattgagccaaagaggactttagtttcacagaattttaggtcatatttattctgaaatacaactgagctattcatgagctccctggaccatttcccacacagccatatttccatggctttgtggcaaaggggaccatcaaaggttttagttcggttagagtagtgtttacaggcttgaactttgagccttttagagagaccaccaggatttcatggatacagaaggattggagagagaggtcgagatggacttaatggaagggaataagttattgaacattaaattttaaattagtggcagacctccaagagagtcatgccaaaaaagtttttatatttgctgtattaaactcaatggtaattacttttagtcattttccttagcactgaatctaaaccctgaattaccgagagcagttaagccacagtcccaggattttattataaactcaaagaaaagcacaaaatctgagcccaggtaatgatccatcttaggaatcctagttctttttacatgatctcatattcatccaaaaaaattgtttcttctcaataagacaacgtagtagagtattctggaattaaatgcagttttatggcgtggcgggactttccatctctcgttttgagaatcttgccatgagaaagtgcttcccaatgagacattactacctcccagctaggaggcttagcacaatgctaaaggtggagcaacagaagaaattcagatggaaatgaaactacttcttcctgggaagtaaaagagctacatgaaaccagtccatcctgcagatttagttcatgccacagttgaagtttgtgtgatgtttcttagtagctaatttcaaatttttactgttagattctaagaaacagagtgggctaatgattggagcacagccatgagactccgctccgttagctgagcatgtgatcctgtgctaaatctttcttggttccttcatctttgaagatgctgtctgctactttagtgctgactgatttgcaaatcttggttgattagctccccaatcataaggtccctaatgattagattaaatgccttatactcagggggtgtgcagatatgctattcttccttctgtggcttgggtggaaaagctgcttgggcttatttcccaacagtgtgatgtaggatggcagaacttatctaggaatggcacctttgatgatccatataatgaaatgtgtagagctcaaagaaatctgccaacatgtatgtggactcttgagaggtgggctttcccagtacatgctaaacagacttgttatgccaagaggaagtgaatagaaatgatagcatcaaatatccaaactgacaggaagtttcttttgcatagcatagaacatggttgtcttctgagttccactaatgttccaggatatcttggccctctgcctctggctgctccctggtgtttggcaccatagcgttgtcacttacaaccattgccttgggacacacagagtgaactgtttgagtgataagtaatttaggtagaaactttacccttaatttcaaatgataccaaacagctcattactaccccaagggacgctctccgtagcttctggattccccagtttccttctagaaacaaggactccaatagcactataaccctaaacaggccctaacccagaagaatacaccacaaaatgcgattgattttctcaaaatatcacagtcttagacactatacaaataattcaagaaaattctttctaccctgcagtggatatagtattctattatattctccagcaaaacttttaggacttttcaaactcatttctaagccaaatagtttagataaatatttacccttatatttggggggaattcaggctcaccatttgccgaggcaagcccatcaacagtctagaggcatattctgtgtcattccttcccgtctccttcatagaatactactttttccttttgtctcctggccattctccatcatctgctgattattgctaaccacaggatgctggcaaagcttacagtgataggcacgtgtgttcagtgatgtccaatacactcttatcacagtggttattgcttcttactcttttcaaatgcattattctacccctcaacctacatccaatcattagaactatactggagcccagaacttgggaccaatacttaattcaaatagcaggggcttgctcacaaacattaagcccaacaagaagcacagcactttgaaaagtcaaataggcctttggtagctctgtacatttgcagttttacatttgttattagtttatagcactaataacacttcagtcgtgaatctacagtctcaatatgataagtcttagaacatgttctagaaatagtggtaccttgctgctattatacttagtaacttataccccaatataataataagtattaaatacagattgtgtatgcattctttgtgtgtatatgccaactgtactacttaacctcactgatgagcaattagaaaaatacagaaattgtcatagtgaaaataagtcttggtcaattcagatgatacgtgaacctgataaatgctctaatagatatgctattttgtcctgtattgcttgttttacagtatggtgcatgttgtttgctaagtaaaatgataataataataaagtataccaattttaaggttagaattaaaattttgcacatatgcttcttgatattctgaaatgtattctgtggcttaattatcttattcatacacatttcacttggctttttacccctaggaaataattgtccaagtatatatctcgtcttctttcttgtaactttgattaaactgcttacttcaacttacaacattgtaaagccagaatacctcattttaacagtgaaaaaaaatatgatgacctgatgtgttctcttgtatttgatttgaactacctaaataggcttaactgtaataataaatatacaattttggcaggcattttttcctttgtttggatgaacattttgttattggtccacttctaattttgtcttaaagagttataaactcagtgtcaataaaacatcttgttatataatattggacaaaaaccctctcgagcatgtctgacacatatttggattaagtaaatgtgcttgcagtccccaagattgaacagtgcgtgaaatgtgtacacaaccttgaccccatgcttttccaagcttcatccttagcgcttcagttatttccactaagcttagaccagctcttattgacatccacactcacctgaccaccacctctacccacattaatttgagtgattgctaaaatgcccagaaataaaacaatgcagagataatatatttgtgtatacaaagattaaataagggtggacctgcagtttctgctgcaatgaagattccagtatcttcctcatttctaattattttaatagaatatccaagaccacttaatttaagtgaattctgtgtttcccttatcctctacaaaaaataatcagttgagacttttttgtatgaatttagcagagatcaaattaattctaagtaaccattaatttcatagagtcaaagtttaaacaggtaattaagaataattataagtgttgaagttaccatagcaatttaacaacatagtcatattcagaatgtttaacttatatttatagttatcgtttagtaaatctaccatactgtcctctggctggctttaccacttacagtcattcctgtgcagtttttaataataaattgcatgatgtagatagggctgggtccaaacataagcaaagcatgtataacctgcatggtgcaattgcaaagataccactggcctgcctcaatttctgaacatatacttgggtttaaacattgcctctataacaatggagctctcacattatgtgtgaattattttatatctattcacagattaatttatcatattacaacaaggttatgaacattctatttagcacagaagttaagtataggcatttcagaagtgcacagacctgggtttctatctcaactccataccctggcggagtaaccttaggcaaattaacgtctgtacctacatagaagatagggctaaaaataccaaccatgaagggtaattgagaagacaaaataagaaaatgcttaggaagcattttagcacggagcatggcacatagtaaatactccatagtagctcttagtcttagtaataagggactttgcaccctcctccttcaaatggcacccaacgatcacttcaacatgattgctaacctttgtgttaattggtagatgatttagcaggaactaattaatgagaggtaagtcaatataaatttgacagtgaaagaaaacgtgaaatccctttgtgtggcaaattcttgaggctctgcagtggaaggtcaaggcagctggatggtgctgagtgattagacttggtcattcatctctctgtctttctctctctctgtctttctgggtgtgtgtgtgtttgtgtgtgtgtaggtgagagggggatggttgtaaggggcaaagagtagaagagggcgggtgtgaggaaggcactagagacaaagtcctgggctttggctattggtggtttccacctctggaagcttcctaatctggaggtactcatattaatatatatttctgtacctgatccctgaagattatgattctttatatcttagggcatatcttaggaggaatacttagaaacatgtattttggtgtgtaaccagttggagagttactgaaccaaaaatgcattactcagagcgtagcatttatgccacaggtggtatgcaagatgatgtgaggtggaagatggccatatccttaaatagcattaatgtcattaatcacttaatcagttctgattagtcaagagggaagtctcagtttagtaatgaaacctctctatcccttgcttgtcaactaaaaccaaaaaggcaatagtgtctagctaacatttaatctcattttgttcgtactgtgtttacgttgtggttaccttctgtttgtagcaggcagtcctaggtttgcaatagtgatataaagtccccttcaaaataaatttatctaagttttttgaagagcccactatgaaaaagctatgagaatgacctaagtttatgatcctttccaggttgaaaaaaaaaaatacagttgattgtaccactcatttttgcctagaactgggtttgactttgttcttcgtaaacatttcttagtaactaaatacatgaagaaactgctatttggaatagaaaattatctgtttttttcataagggaacttcctttatgtttcctgtggaagtccatgctcagataatctatctccatgttgtcctgtagagcagtttaaactagggaaagaaaggtcatggagtcactgagtcccacctatggctgagcttgacaaacaagaaacgcagagtaaactccatttcttcaactttgaaactgattccctctctgttaatccctgaagtcaggttgcctgatgtcctggatttttgttgtgtttttttttcctaaggaattcttcctgatcagcaagaagtgatcgtgtttatccctctgcaaatctactcggtatgaccaaaggagtgttattatttttaagacttgaaacctttcattctcggagagggtgggaggttgcaagggagggacagtggccaaagcccatgtgcctcaaacctcacccgggatggcctggacaagtgccagtgagacaaaagcactagtcagaccagggtgttttcacagctgggcagtcagtgtttttggacagcatgggtggggaggaggccacagcagtgtcagcctctgtccagtagcatcatgcaattgagagaagccttaggcaggcagatggctttaatctaaggagctaagcatctaaagaataggatttatcctgtagagaaaggccataagaagcaatattcttgtaaaaggaggccactgaatgctgtttttttgtttaacctgagaactgagctactttttagcctggagactttcctaccttgatcctcactgggcatttgcacaatccagttccaggaggtgtttctaggacctccatgaagtataaggagatctggaagaaaacattaggctgccttttgcaaaaacttcccccaccaacaacttgtgagtgtagaactaacttacacacatcagaggggcagtgaactacttcaggggggctgaagtgccccaaaatgacacagacaattttagatgtatgtgcacttttttctggtagaggacccataacttgcatcaaattctcaaagaatttatgatcttaaaatgtgataaaccaccgcctttcaagggcctatgagaatgcattatcatttaaatgttgttaagcaagcaaggctgactaatttaggctagcactggcaagtctttgtccttcctataaaaaaaaatctaagattcttgtggaattgttcactataggtgctctgtttcgagaggtaaggtcagatcagacaacttgaaaagaaacagactaggccaagttcaaaggatcctaaggaatagttagatgagacccagcaaaagagtgtggtcagaggagccaggagaaccaggtacactagcagacaagaaatggcaggggcactatgtgaagacttgggcaccacatttcagagggaaatggctaaattggagccttcatagagaagagcaatttggagatggaagggtccagaagtcatgtcacacggaaaactggggtagttggaacaggaaacatttggagcaaggtgacagagatatcttcaagtatttttaaattgttacatgacttgagtttagaatattatggctttagatatagaagggatcaaagaacatttgtacaaggcattaatgttacaggagagaaaactgaaagccagagagaactgactggctaaggcagaggtaggactagaatccagattcccttcccagtactgtttgccaccatttccagctgcctccccaagtgccttatgtgcggggaagagctaggaccaatgaatggccattttaagaaggtcgagcttagcttgataaagagtattcctttatagaataggaaactaagtgaaacagtgatctcaccatcataaagagtatttctgaggaaatgtgtattcattttctatagttcctataaaaaattaccacaaacttggtagattacaacagtgcaaatgtattaccttgcaggtctagagtcagaagtttaaaatggtcagtggggccatgctccttctagaggccctagagtagaatccacttccttgccttttcagcttctagaagcggcctgcattccttggtttgtggccccttcctctaccttcaaagccagcagcatatcaatcacttaccctgcttctgtcatcacatctctttctcttttttttttttttttttttttttttttgagacggagtctcgctctgttgcccaggctggagtgcagtggtgcgatctctgctcactgcaagctctgcctcttgggttcatgccattctcctgcctcagcctcccgagtagctgggactatacaggtgcccgccactacgcccagctaatttttgtatttttagtagagacagggtttcactgtgttagccaggatggtctccatctcctgaccttgtgatctgcgcccccttggcctcccgaagtgctgggattataggccatcacatctctttctcttattctgacctttcataaggacccctgtgattacactgggcccaccttgataagccaggataatctcccatctgaagatccttaacttgaccacatctgcaaagtcccttttaccatgtaagataacatactcataggttctgaagattaggatgtggacatttttggggggctataattcaacctaccacagaacgtgcggaaaggcttattaatgctggtgcaggtattagaacagatctggattcaaatcttggcttcagtacctactagttgcatgaccattacccctttgagcctttgttcccttgtgcataaaatagaaataaaatctcaacattaccatcaggatttgtggtaatatgcatgaaatgcataacatataatactctctcaatgaatggtagccatatttatttaaaaaactaccagatgcttctcaccatacaagaatttaatagaagaaactccactattaaataggacatttgataaagtgacttccagatttccctctgagattgctgaaatctaaaggaataaaaatttcgtttcctctataaactattctcggggcctcttgtccacttcccagatgcagttacaagggaatcacttttctggatagccaatggctatcagactgtgctttctgccccccacagtcctgccatctgatttttccatgcagctctggttggatttaagcaggactagcagtctgtcctggtgtgtaatgattggctagaccaggcggctgaggccagggcagactccctccttcacatctgtcaatatacctggctgcaagcaagttgctgcctgtgaccacagtctgcagaggccagagagagcaggaaaggaaatggaaaggaacctcaccttcatgcttggggaaaaggagaaacctgtgttaatgtgtcttcccaacatcccactctcttcagcaatcgctggaacagccatgggccatccctgctgagtcaggaaagaagctgagggaagagtcgggattgaaaagcagcagacaaggtaggtgatctctctggtcactggcccttctcttgtaataacaaaatgagcagcatatacagcctcgtcaccagagtgtttctgaggagggtctgctggagatatggtagacccgggtgtgtgtctgaattcagtcatttttctatcagcctgttctggaaagcaggctgtattttccttctgtcttctatctcttctgaaaattgttgttgctcctgtacgtatttcagaaacttggaaggttttttaaaaatttttcattataacaaattatatgtgcgatttattaaaatgatttcattggtggtaactccacaagcatggttttgttccagaattttcgttgcataatttttttcaattttcaagacataccagagaggacagtgtacatatactgtagtatatggtatagaataatatattccgagaaatatactgtccattcacagggctgtcaacctcgtatgataggctctcccaggaagtcacgtatatttttctgctttggaacctagagagttaaaagtcctgaaattactggagcagaatcaagcctatttacctaagcttatcacatcggcagccaggtcaatcatttactgagactaggccgtttcttaccctgaatcaggaggaccaccaaagcctttgctggcctgagtccctctgtagcaaaggcatgggcaacacagaagaaatgctcctctgaagctatagtccagattctcttctcaccagaagtaagtttttctccttccgagaatagtaaatatcccaagaccccccttccccagctcaatgataaacaaacatgagcaaaactaatatgcaaacctgatgataccaatgccactctatgtacaaagcttgtggctttggagggagcttccctcatcactggaggtctatggggaagaaggagatgataactatgaaacaagttattgagtgattcttgaggaagaataaagttataaagtaatcaccaaggaaaacatggaaattttccccttcaagtctacacactctagaaatatgtaatttttatctaatatgattcactcttccttaagtctgaatataactcctctaattgcagaaatgttgtcatatggtcaccacatacaactttcgggcctgtgcagtggttcctggctcctatagtcattagttagaagcctagtaatgctgaagtcctatttttctgaactccctttagggaaggagttgggtcatgtaggacaaggtaatgtttgacattatttttgtcaatcagttgtggaactgaagtgactcccctcaggcagggtttgtggctgaatatttagtgtctgaggcagttaactagatgcaagagtggaggccattgtagacataaacccttgtgtgactttgggtaagtctgtggctacctctcaagaatgttgtggagaattatggaaaactgatacgtttctgtgaagatattaagcactgcaaaatgttaagtgtgaatctggctggtatccagaggatgttcatagataatgcaagtgatggaggtggttttgacgagggaaaaggatcttggggtgatcaaatgcattggctaggtcgggcatggcaacccatgcctgtaatcctagcactttggaaggtgaggcagaggattgcttgaagccaggagttcaagaccagcctgagcaacaaagtgagcctctgtctctacaaaaaattttttttaaaaatttatgcattggccatatttccccacattactgaaggctgccttagggacagacacacaggtctgacctgtcctttttttgtagcttctggctcagggcctaaaacaaactggaagcccctaagggtatgtacagctttttctttccatttcctgaatattggatagtaagtagagggagactattcttcagattgactagattagaataggcattgtcattgtttttcaacgttaggtagttagaatatagaagttaattaatttgcccaaaatcatgcaattagtctgagccaggattctactcagttctgccttgttcccaacccagtgcatttcccataaggtcatggagttgaccatgtggataagcataaattggagggtcactgaggtaagcaaggctgactaatacagtcagaagttctgaagttctccactggctcttggatgtgccatgcctgagcctctgtaacaaaaaggccagtagtggacttccaaaaaggataaaacaggcaagagcaaaagcaagtgtttttagtcatggcagtcactggagtcttctctgtcctgtatattttctaaataacccagataatcctcaggctaaatctttgtccctttttatactgtagactcaaattctgagccccaactaaagtacaacatctgaactctttccagagaagaaatgaccctatcccaatctttctcaaggaactcaagaatttactatctcatctcagcaaatacccactcatttaaatctaagagacttgggcacagagaggcttaaagcccgagaaaccatcaacagtccctcctgtcaaggctctcaccatctgcaacccaaagagacccatgtcggcttggagtctaaatggctttttggtgtcatttgagcagtgaatgagtaatgtacagcagaagccttaatccgccccccacccctagtttcacttttgttcagatatgtcctaaagattccattagctgtctgtcataaattccaaagtagccacaattcctgagcatttacaagatcaagataaagaaatgccatcatgaaatgaggtcgactaaatgtctttgaacaaagggtttctagtgacttgcctcacatgtatctcaagtgtgtgatagcaaaggcattacaaatagagattgcatcaccatgtctaccagcaccctttactaatcaactgaccttgcatgaactgtacttacatgccatcattttcattaaccaaaacgctaggagaaagaaagttgaagctaaaacacaaagactcatcacaacatttcacctgtgtcaagtacttattatgaccaaaacatgaactgctgccttcttatctacactttttttcatttaattttcataacaaacctctgcaacttgcccaagtcacagagctagtaagatgaggtaaaatttgagttgggatctgaatccaaatcccatgttcttcagcattctgttctgggaaacatactcacccaacagtgtctacactgttcacgttctaaatgtagaagagtaaaaaaagttctttctaaattatttgatcagatccttagagtatatatttattcccccttcccactcacacaagatgttcttgatgttcttgagtgtaagcataaaactcagtatgacagtggttttcctctcctctagaaaaggaaccacaaaacacacatgcacacatgcacacacacaatagcaattgcccaagagtcagtgctttgattcctttctgaagctgagagagaaaattgttcttatcatctcctagtttataaacattgttttgtttgtttgagtgattgactttaacataatgtacaagacaaatttgtcatttattttaccaagatttttttaaaagtttatttctgcagtgaaatttcagtctttgaaatcagctaaatttttcaaaactgtccagtatgtcaatagttgtatttaatcttcaccacagccctgtaagatgagtactgttttcagatgatatcctttcagataaggaacctgagactcaatacaggtgaatggccttctcagtctcactcagctaagtcccttagatcttgggactccaaattttttgttcttttttaaattaaatattcacgcagttccctggattcctaagtcctacaaatggtaggaatggggcctacaagctttttatttaaattttcagaaattaaaaatgccaaatgactacacagcctgttctcaggcagagaccactcaaatattgattgctttgctttgggctagaattctgtcaggtcagtgtggtaatgctgttattctaattagattttcacagagtaatgaaaataaatacattaattgttacttaataaaatcttccttaaaggcaaaaaatctttcaagcccatgtgcccatgagcaaaataagatatcaaaggggttcttgctagaaggataagccaccactgtcttctaatcagttgtgtgcctagagaacggtatacatgagtagggactagagaccccacagtgtcttgagatgcacaagccctctctaaccctgtaatcagatggatgtctcatgagtcaaacagttgccaaatggcatggaacctaaggaagtccttctacaaattgagaatccattattgtagtttcaaccctacagaaaccagctacagttacaggaggaaaccttatgccctaggaattccatttaagtcctaagatgttctgaagggtccgggagccctgcatcagctatgcatctggaggagatccagtgttttcttatccctaatgtttcactgggaattgcccctggctggctgcctgagtctccatcccatgcgacagtcatgttgtccacatccttgctttggtgttagtgtgcatcctcatcatactttttggtccccatttctgtgacttctgaggttctaatgatcttggtgcaggagaacccatagttttgggcagtgatcaagcagagtgaatgaaacttctgcccctgacccacccaaaacttgttcccctcctctctacagttccaaggtcaagtttcccatgagagcagtaaaggaactgaaggtcacaaaatgctggcaattcaccatgccttggaggggttcccagaaagtaaaatgaaaatgagattgttttcacataagacctctgtatttggaggacaggattcaaacagtttgaatgtgcaatttcactgtgcactgaggtaacccccacaaagtcttttttttttcaaaagccaaaataatatcaaaaatacttcctgcagagaactctaactaggcagaattcttttttgtcatcactgggttgatgttttcaaggattcatttctcaagataagccttatatagtgcatttggctggagctcatgtgtacttctgtggaatgatggctttcgtccatggggcctactttgtggtgatctcattaggtttcacaaggtaaacagctgaaaacttgtggttagtatgtgagcaggcttcaagagaagagaaaacccaggagaggtcggccagaagatgttgcagtgaattggcaggtggcaggcttctctctgtgacccaaggaaagccaatacccctacgaattccaaggagatgtacttttaatttcaaatacatgtatcccacaaaatttagctctgcttcctagctaggaatcctaatcataggaagagctaatggctagacttcccagaacgtgactgttctctactcaaattcatctcattttgcttttctttgcaaaatgaaaattctccattttccataagaatagtattgttatagaatacagttgtgttgataaattatagtccaacaaattaaactaaaatagcccaacagaggcatcctaggcctgacatcattgttgtctttctctgtggctttatgccaatttttacacatcttggggatggcttagtttcacatctttactcatctgcgttctaattttggataaccacaaacatttattgatgggttatccactcagttcagcaacaatcatctactctttcccagaagtgtgttagacactgtctttgacataggattaaataatcttgccacttaccagagatgagaaggttttaaatttatccagtaggccaaaccacagcttctttagagtcctctatatttgtgtgtatgttagtgtgtgtgtatgtgtgtgtctgcctgtgtgtatgtatctgtgtgtgtatgtgtacttttaatcattatacagtaccaagaagataatgggttctcagtaaatatttgttggtgatactaaactagtaatcagctaggaatttaatcaagaaattgatttataaaaagaaaactggaattgctaggggagactaaagaaagaatcagaagtgttaaccattggtgtagagggaatagggcatcaagggtctacttgctcttctgccaacccccaactgaatggtacagcacataggagacctcggttgtgtttgattctgctactacacacaccaacagggcaactctgggcaagtcacttcggctttcgtggcctcaattttctcattttcaaaatggaggcaggggattgagagtataacatctctaatgtcttctctagttttgatattctgtgttctatgaaaaactagaaaagtttacttcagaaagttctttacggaaaatacagaaataattttaatttatctagggagatcattcctatctcttgggtaaataaggggaatgaaaaagctgctcaagagatcccagctatgccaccttgaagatgttataaattggtgagtctgggcattgatctttactagagaagaagcccacttggctgggagagtaaagaaaccacatctgaattctcttgtccagcactcagctttgccacgcctgtgtgccactaatgcaagctccagcaggcagtcagtcatgactatcattctctctttataaataaacggaagcccttaaaggtgacgtgacttgcccaaggttacagaaacatggcagtgagtcagatggaactgtgtgtgtttggaggaggaggagaagatgacattataaacaaaaggcagagagtgagggacagatccacacctcttctgaagttaaaaaaaaaaaaaacaaaacaaacaaaaaaaaaaaacaatggtcacaggctacagaaaagctttgagtctgctctgaatcctgagatcacccctgtctccctgcctctccctgagccaccccaggcaccctgcccaggtttactcacccaggttgttgctaactgggtgcctgtgctcgtgtcccttcttgtaagcttcataaaaggctatttgtaatgaagagagggcatatcaaagaagggagactgcatcctccaggccccgaaccaaaaaggcaggtttttttttaagaggaagtctggtttccctattaaaatctgcagaaatgaatggtcctcaagatgactagcagaattatgacattctatttcaagcatttttaaaatttttttttacctgaggttattttacttctgtttgctctccttctccacataaaaaggaaagaataatgcttgctcactatgatactgtatgagagaaggcagcccgggcagtacaactcaaaggaacctactaattgcaccaaacagcaaggcacagctagacatttcagtaaataaagtgtgatatcatcatggctcacacgggtttaccttatcacccagacccatgcctagggagtgctaagaccctgaagaaccacaatcacaagtgatggcaaagaacctctggtccaagaagaaaaacgctgaaagaaattggacatcaatgatcttatgtctcagttgcatttagaggctgcatcactttgctgcctattattgtcctcattaaatatgagagagagagagagagagagaattaattaactatcatcaccaggggatatctggtaattttcgaggtacatgaagtgggcagacgatgccataaattcagtaagaacacactgatttcttggcggagtcttcaagtgactttctgctttactccacaaaaatcttactgagtatacccacttctctgtttctactctattcctaatatctaactaacttcttcttaggtagtctcttgggaagaaggatagataacacgtaacacaatatataatgcttagttgactgtcacaaccgtattaactacactcactttttagaagccacaaaactaacaatcaccaaaagtcacccttggcttgcccccccaccaaatacattcacttaaggtaggctaggaagaggacaggcttatgattcaaccatatagtatctcttaacaaagtcagagaatcagaacagcccatgagtccaacaatgattatcaatgtcaaacttaactcaaatacagacctcaatgcctcatttcatgcccatcaagttaaaaaaaaaaaaaaagaaacagtggggagaggagaggggggagaaaagctaaaaacaaagaaatatgaacaatgatgacaaggtgctgaaacatggagacaatctcacatagtcctaatgctaaccaccaagtaccagctggcacctttacaagttctccaatcagtgagcaccattgcttcttgaattgaactgaattcctattattggactggattctctagcactgccagctttctagcaggagaaaaagagtttcagagcatgaggtaaaatagaactctgttttcctactttcaaaaactcatctcatacacctacccacagccctcactcattgatagtcaaggaagtcagagtccatgggtctcccatctgtgcccgagcacctgtctcacagtgaaaaagggaagagggggcttatccagtagaggctttccagaagatgcagaactgtttctgataatcccatgcttcactgcccactaggccaaaagagagggaggcagcattttcaacagaggagactttcatgccataaatcttcaggcatttgtgggcaccaagtgtcttgctgtgactgagatggaactaaaataatttacaagtttgtgtgtgtccatgtgtgtgtgtgcatgtctctgtgtgtgtgtgtgtctgtgtgtgtgtgttacgtggaaagaattttaatatgagaagggcattaaatcagttttgcaacaagaaaaatcctttgtctggactatttctgggtgttggttacacaaaacctaaatagttgtttaatttctggaattaattagcaaatatctgtttgaaacactagtcttaaagacttctattgatagcatactcttttctctaaaattgccacaacacattttaatcatttttagaaaagatacactacaagatccttcagcatgtaaaaaattctttcatgatgtctaaacaaatctcaggcctggttaattatactgaacttcagatgtcttcaggtaattcttagcatgctgaattttataccccattaccaatacatcttattttagatggtgttatgagtaagattaaccaataaaattcaggtaaactcatcactggatacagcagactgcacatcatttggttagattgtatgctgagtctactctccaaatgtatttattctcctattctgcagacacatactctacacatgtctggtttggcttaatatttggctgttcccctaaagggattggttgagggtcaccatattttctcttttaaccagtatctgataaaactctaactgggatactactattcttcacatgcatttatatcaaaagctatttactcccacttcccccaggccaaagtcataatagcatgttagaatcaaatattttccattgttcttttatatatatatattttttattatactttaaattctagggtacatgtgcacaacgtgcaggtttgttacacatgtatacatgtgccatgttggtgtgctgcacccattaactcgtcatttacattaggtatatctcctaatgctatctctccctcctccccccaccccacaacaggccccggtgtgtgatgttccccttcctgtgtccaagtgttctcattgttcaattcccacctatgagtgagaaaatgcggtgtttggttttttgtccttgcgatagtttgctgagaatgatggtttccagcttcatccatgtccctacaaaggatatgaactcgtccttttttatggctgcatagtattccatggtgtatatgtgccacattttcttaatccagtctaaagttgttggacatttgggttggttccaagtctttgctcttgtgagtagtgctgcaataaacatacgtgtgcatgtgtctttatagcagcatgatttatcaaatattttccattgttctaacatagatccaataagaagacatttatagagtgcctaacatgtttgacaccttgctaagggatatagattcagagatgagtagttgacagttctgcccaaagaaagatcaacatgatcaacatcttatagagaaaatgaaccaataaaggagccaacacagtatcatatgtagtcataactgaacacaaagcagaaaagtttcagacgggtgctccccaactaccaaaggagttggggtccaagtggtattttaaagaaaagaaaatttggattcacagtcttcctttctaaaaatccaggctatgaagaaaaagctacttccttttaggaatttatctgaatatcctaaggaggtgaaattacaagagtagagacagttgtggtagccatggctaaggaagtttcgatccctggagaaagaggataagaggagagtctggggagatccttttaactaaaaggtaggaaaaagaattcaaactttgccctgaatcacagtctctgcctaattcacatcgtttggactggagacttaatttagaaaaattctgtgcagtccagggctcgcatgctctcccataccctagggacttctgcctcgtggacaagcttgttataaatctgatttctactcagttatgaattgaacttcatttttcctgggagcaactttaaacaggaatagtgaacaaagtaaaaatctagagaagtagcagtgagatcttctgatgtcagcagctggcaccaggtaggaagctcaaggttaaagaataaacatgaccaacccagcccccatcccaatagcctacattagcatccaaatccaactctccaatactacacattgtaagcagaatataagtcagaagggtcagcttagtagctctcaacctagcctggctggaaatccttcttaagttggcttaggtaagcttttagtgtataagtgaaaactttcatcatcttaagcaatttgcctgtttcctgaagtagggctaacaagatggttgaattttctgattcttttagaaactcagatcataaatcacactcttaatgaacaattttcatattggtttcatttttatcatccattggaagaatatctataaaagttaattaggatagatttggctacctaaatatttaaaacttatttacaaatgcttaaacaaaggtaaaaatagaaatagtgaactgagaaagtacatttgcaacataaaaaacagacgaaaggttactgttcctaaagagtacttataaatccttaccagctagaggcaataatagcccagtaaaaagttgggcagaaaatgaactgacaactcacaaaagaagaaagacttatgatctataatgatatgaagaaatgttcagccacagtaacaatgaaataaaggcaaattgaaacagtaaggtagcatttcatttttatgagattggcaataattgagtaatattagatgttaatgagcatgtggggagcagacccttccgcacattgctgctggtggaagtgtcaattgctacaacttcttttttaaggacagtttgtcaaaacatattttaaaatgttttaacaaatataactttggatttattcacttccaggacttatttttagaaaacaataatagcgcagtgcataaaaagtttcacacagtacttaaatatttttgtaaggtttgtttataacagcaaattttgaaaacaactgaagtgctcatcagagaggacttagatataaacacaaacatacgtggatactgtgcagccatttcaaatgatgagatccatgttgcagtagtagctccgagctaccagtagtagttcagtggccaatagatctgtgtttaaattttagctctattcattactagctgtgtgaacttgggcaagtcatttgacctctgtaagcctcactaatctcatcttaaagaaacgaggataacacaacttcctatatcttaacatcaaagtgaattatatgaaaggatgaatgaaaagctcttagtataccacctgacacacagtaagggcagaataactgtgaactattgttagtgacagcctgtggattcaatcctgctatgtgaggaaaattaagatgaaaatagcactgtcagtttctgtgcaagatggcaaactagctccatggcttttgatcctcccaagaccttattaaaataaatttaaaaccaaaagaataagctcataacagagaagaaagaaggggctatcaataaattgctggaagacagaaaacaaatgggacagaggaacaaaacacagagccaaaatagttgcatctgtaaagcaatgaagatactatttaaaaacctaaataagaaagttcttttagtgattacaattattagtcataaaaattaatagactggaaaattatgttgaagctttttgaaatgtagagcaaaatgacataggtggaaatgtgaaaaaacagatattaaataataacagttaaaattaagatcaccaacatataccaaaagcactagaatatttgccaggcactgatttatattaattgcatgtgttatttcaatccgtcttaccagcaatcctatgaggtagctaatgatattattctctcctaatagttggagaggttgaagcattaagaaattaaaaaggccaggtgtggtggcttacacctgtaatcccagcactttgggaggccaaggtgggaggattacttgccagaagtttgagaccagcctgggaaaacaggcaagacaccgtctctacaaaaaattttttaaaaaattagctgggcatggtgacacaccagtagtcccagctactcaggaggctgagacaggagaattgcttgagcccaggagtttgaagctgcagtgagctatgttcacaccactgccctccggcctgggcaacagagcaagaccttgaaaacaaaaacaaaaaaagaaagaaagaaaagaaaagaaaagagaaagaaagaagaaagaaaagagaagagaagaggaaaagaaaagaaaatttgccccaggccacttggctagtacttggggtgtgcacacagccagtgtagctctgtgctgaattgtctctgtcacctgagtacctccaaacctctgctgagagcacgaagaagcaggaacaacatttttcagagtgcttaccccacatggtttcagattacagcctcaagccagtatcagtgactggaaaggtattaaataagaaaagactattattctctaaaggcagttgcagacagatatatgggcaaaagttggatgtgaggtttgaagcagcttaacatttgagcatctagaatcaagcactttggagttatggactgagcgagtcagtgacaattcaagaaactttcactcttccagcccttccaatgcttattccttctgttgagacacttcctactgagagaacacagaaagtcttttatttccctgacgaactcatataggttccaaatgctgagacctaatcctggaagtccaatatctaactgacaggtgtttcagaaatagcacagaaaactgaagggaagaaattatcaaaaagtagaatcttagtgctcaaaagatacaaatcttacatgaatagggttcatgtccagcataatgaattaaaaagtgaaataggccagctgggtacagtggctcacacctgtaatcccagtactttgggaggccaagtccagaggatcgcttgaagccaagggtttaagaccaacctgggcaacatagcaagacccctcccctacaaaaaacttctaaaaattagctgggtgtggtggcacatatatgtagtcctagctacttgggaggctgaggaaggaagataacttgagttcttccaggagttcaaggttacagtgaactatgatcttgccactacactccagcctgggtgacagagtgagatcctgtctctaaaaattttctttttaatttgaaaaaggaaaaacaaatatgtaggcaactttttggtattttagaattttgaagactaaaaggacatatatttcagagaggagaaaaaagtaacctacaagaagtgcaaattaactggttctcacttctcatcaccaccatatgatgctagaagatactgggaaatgccttcaaagttagggaacgtttccacctagaattctatacccagccaaactataaatcaagacttagagcagaatatagaccttttctggtagtaaagaccaaaattttaacttctgtgcaaaatattttaaacaaggatgaaattctacttcacttgataaactttcagcagaatgcaagatgatatgtaatcattttaatactatagatttattcttatgagtattaaaaatatgtagcatagcaagcttccatagctatgtatattatttagaagaaaagtattacatatatttaggtattaaaaatacataatagaatagagagtaggtgactatggcaaaattgtgaagacagcacaagaatgactgaaatttgggaaacaccttgctaaagtaaatgccttaaggtattatttattccaaatatatctacattggtaaatatatttataaatatatttacaaaaatatttgtaaaagaagggactttcatgtaaaagaagggactttaaggacactacagagccaaaagcagaaactcatcaactgcagcaataccaggacagaggagcccagagactgtgatttgttggctcacccataaagttggcccagcttccttgacttagactcatattcattgttcttcccacccccaatccccagtagcctctgactatgtttcccaggaagcctctcccgcagggaagggaacatgaggatacactgagctgtgtgtttgcctacaagttccacttctcattataaagcagtgtttagcagtctgactcatgcatcaatacctttatttttacttcctcccattttctctcttattcttttatcctgttgggttgtgtctttttgtataactaatctcaaatgttatttggagtgagaaagagtttaaacaaatatcactaatgaccctaacttcactttcttgtgaggtgtggcagcccctggaccctgattccctgtgggcaactggatgcgctggagcttctggtcctacagagctgggattaacccagctcttttgatatgttgctcagggttcttggttccacaatcagactaactcaagctgtaagcagaaaacaaatttattgaaaggaggtcaaatagtttacaagagagctaagaatgctggtgaatgaggcctggtgtatgggaaaaaaacacaggaagcaaaatagacccaagatggcatgtgaagtctgtttaagaggctaccattggcattgtcaccatgaccactagctatgatttcaccagccacacctgactctaccctccatcagaggcaccaaccttaatctctaaaggttcactggaaatttgcattactcagtgaagaatcaaatcctagccagatgttcctagtggcctgagcttccggggaaggaaatgtctaaccctttgggcttgggctttctttattggtatttcctgaaataggagggcagggcaggcaaaatagtcaaaagtccatttcacttggtgaccctgtgaggctctaccagagcagccagccaactcatgtccctgtttattgtcacctcttttttctttttcttttttttcttgagacacttgttgcccagactggagtacagtggcgcgatctcggctcactgcaacctccatctcctgggttcgagcgattctcttgcctcagcctcccaaatagctgggattacaggcacacaccaccatacccggctaatttttgtatttttagtaaagacggggtttcaccatgttggtcaggtgggtcacaaactcctgacctcaggtgatccacccacctcggcctcccaaagtgctgggattacaggcgtgagtcactgcacccagccatcacctcttttttcttgtcaaatttagcagtttgcaagtcgggatacttatgctacattagttatatttgtataatatatattttttacttatttccaagtcatactctaaacatgagtttctcatttacatttttagagtctttttatgtgtacttctgaataaacatgcatgaggctgagaagtctttcctgttaaattctactgggacataagtttcacattacctatgagcctttttcattgaaaaacaaaaatccttccagaacaagagaaggctaaaaaaaaaaaataagaagaataaaaataaaaaataaaacagagaaccattttgaggataagttcaaagagactgaatgttccaatgtaattaaccaccaacaatgtaagatgcttatttcatgaattcttgaaagagatcttaaactatgatagcacagaaatcactgaattgcttaactcaagagttaaatagatgtctctggtaaattggtaccaaaaaaaaaatctgtgaggaaacaaagacatccattttagtggcatgtgaaagatgatgtaagtataaataaagaaatatcaaccgttggttgatactctttgcactaaattatattcgtaagcaagatttgtatgttttgttggatctgacttttcactaccctgttacaataatatttcttttgtttgttttagtctcctttacatttacagtgtcctggagggtagtggtgttaaatttaatttgtcaacctacgtttaattttacaagaatccagatcaaactgctatataaacaagaattgccttgcaggaacttcttagtgattaggctggagaagtcacagctgaactaaaaaatatgctgccagtagtactttttcattttcccccttataattttaatggcccaaatgaaagagccttttttctttaacaatagtatccttgttgaaagtcctttaaagaactgttctacgacactgaaacagtctaattaaaccattaatataacaatgatgtcaagagctgctaaattcaaagaaggcatttccatttcatggtaaatattgaaggtaatttttttctggcatgtagcatgagtcccagtttgggaactcttgtccattacacgtttccttgcagagaaatatcattaatctgtgatacttactacaatagtgtattatttgcctcaacagaggtagtcattgaaactgcatattatcaaggcagctggcccattaagtttttacaaaggattaaggggttatatgagtacccaacagctgcaccagctaagataaaacaaaggttcccaaatcttatgcctattagtatatggaatgaaatgatacattctttatccatgcagtaggatattcatatttaaaaagaaaattaaattagaaataaaagctcattcattcaaatgcaaagcattgtgcgaacacaaatgaagaaatgtagaaagaaatacaaaacatttccccttctcttgagaagcctacagagtctcagtaggcatgatttaaaagttcaaaacattaaataaaattaaagatttaaataaaagcctgagtcaccaaagaaattctgcaagttagttcatgaataactgctgaacaatacacatggctgcaatgcaagtttcagaagtgagaacatttcagggccagaggttaaaggagaaagttgacgtaatcaagaccttaaagattggtctgaagtgtgtgtacgaaagttggaagtaatctgagagatcatcttctaccccagtgtttcctaaacttacctgttaaaaagactcacatatgagaaatctaaaaataaaattccccgggggccggatgcgatggctcacacctgtaatcccagccctttgggaggtcaaggcgggcagatctcttgaggccaagagctcaagatcagcctgggcaacatggtgaaaccccacctctactaaaaatacaaaaattagccgggcatggtggtgcatgcctataatcccagctactcaggaggctgaggcatgagaatcacttgaacctgtgaggtgtaggttgcagtgagccaatatcgcaccactgcactccagcctgggcgacagagtgtgaaactctgtctcaaaaaaaaaaaaaaaaaaattcgccagttcttttctctgccctattgaaccatatatgccagagaaagagcccccaaactgtgttttttaaatgctgcaggtaatcattttcatctggaagttctgggaaaattgttctaagccaacctgtgatctcagcaaataaaacactaaacaaataccaaatataaaaaagaaaaaagcagaaaggagacaatggggtgtgtgtgtgtgtgtgtgtgtgtgtgtgtgtgtgtgtgcagacagatagtaaccaccagggagtccagcagggaggaagatttgcgcaggagccagggccaaagggctatggcccaatgcctttcacataatgaacactcaagaaatatcttgcactgactccattaaaaatgaagcaaagaacaaaacgagctataactttcaagcatttgatgacctatttattacttattaccacctatgttctactcattttataaaacctctccttagaaacacagcccgtgaatcttaaagtcaattgtggattgtgtagcaagacagagtcaaatccctcagtgcccaggaaaaatttaaatgccaaggaggtaaagagacctatgttctactcattttataaaacctctccttggagacacagcccatgaatcttaaagtcaattgtggattgggtaacaagacagagtcaaatccctcagtgcctaggaaaaatttaaatgccaaggaggtaaagagattttgctggggggaggggggagggatagcattaggagatatacctaatgctaaatgacgagttaatgggtgcagcacaccaacatggtacatgtatacatatgtaacaaacctgcaccttgtgcacatgtaccctaaaacttaaagtataataataataaaaattttttaaaaaagagagattttgctgcaatgagctagaaagttgaaattcaagaaaaggagactctgagctgcatctcagagaatctattcagatgcttattagattgtggtagattttgctaaggcatgtgatagaatgaatagttcacaaaatgattttaaactggcttagaacaccctgaagaaaattgttcaaaactaactcaagccctgagcaaaccacagaaacataaactaccatatgggggataatctcactgtggcagggtggagcaaatgacttcatgcattttttcaccatcccccaccatcagagctctggttcttaatgcttctctccgcatttctctagtcagtggaagtttctaagtgtgtgtgtgtgtgtgtgtgtctgtgtctgtgtgtgtgtgtgtgtgcattttaagacacaaatgcctgtactcatatcctactaaactctaaaattctatcattcgcttttctcataggctctctacttttttaatggaatttgtgaagtcccttaataacaagttgatttataaagcttaaatagaaataatgttttcacattaatattttattacttgacattttagtacatgtagtttaaatgtcagaatcagagtttactaaaaacatcaagttttcattcgcttattttctaacaaaaatattccaaatgcatctattttgctgttagtatataaatgtcagaatcagagtttactagaaacatcaagttttcattcggttattttctaacaaaaaaatttcttttttattattattttattttattttattattattatactataagttttagggtacatgtgcacaatgtgcaggttagttacatatgtatacatgcgccatgctggtgtgctgcacccattaactcctcatttagcattaggtatatctcctaatgctatccctccccactgcccccaccccacaacagtccccagagtgtgatgttccccctcctgtgtccatgtgttctcattgttcaattcccacctatgagtgagaatatgcggtgtttggttttttgttcttgtgatagtttactgagaatcatgatttccaatttcatccatgtccctacaaaggacatgaactcatcattttttttggctgcatagtattccatggtgtatatgtgccaagttttcttaatccactctatcattgttggacatttgggttggttccaagtctttgctattgtgaatagtgccgcaataaacgtatgtgtgcatgtgtctttatagcagcatgatttatagtcctttgggtatatacccagtaatgggatggctgggtcaaatggtatttctagttctagatccctgaggaatcgccacactgacttccacaatggttgaactagtttacagtcccaccaacagtgtaaaagtgttcctatttctccacatcctctccagcacctgttgtttcctgactttttaatgattgccattctaactggtgtgagatggtatctcactgtggttttgatttgcatgtctctgatggccagtgatggtgagcattttttcatgtgttttttggctgcataaatgtcttcttttgagaagtgtctgttcatgtccttcgcccactttttgatggggttgtttgtttttttcttgtaaatttgtttgagttcattgtagattctggatattagccctttgtcagatgagtaggttgcgaaaactttctcccattttgtaggttgcctgttcactctgatggtagtttcttttgctgtgcagaagctctttagtttaattagatcccatttgtgaattttggcttttgttgccattgcttttggtgttttagatatgaagtccttgcccatgcctatgtcctgaatggtaatgcttaggttttcttctagggtgtttatggttttaggtctaacgtttaagtctttaatccatcttgaattaatttttgtatatggtgtaaggaagggatccagtttcagctttctacatagggctagccagttttcccagcaccatttattaaatagggaatcctttccccattgcttgtttttgtcaggtttgtcaaagatcagatagttatagatatgcagtgttatttctgagggctctgttttgtgccattgatctatatctctgttttggtaccagtaccatgctgttttggttactgtagccttgtagtatagtttgaagtcaggtagcgtgatgcctccagctttgttcttttggcttaggattgacttggcgatgtgggctcttttttggttccatatgaaatttaaagtagttttttccaattctgtgaagaaagtcattggtagcttgatggggatggcactgaatctataaattaccttggccagtatgtccattttcacgatattgattcttcctacccatgagcatggaatgttcttccatttgtttgtatcctcttttatttcattgagcagtggtttgtagctctccttgaagaggtccttcacatcccttgtaagttggattcctaggtattttattctctttgaagcaattgtgaatgggagttcactcatgatttggctctctgtttgtctgttattggtgtataagaatgcttgtgatttttgtacattgattttgtatcctgagactttgctgaagttgcttatcagcttaaggagattttgggctgagacaatggggttttctagatatacaatcatgtcatctgcaaacagggacaatttgacttcctcttttcctaattgaataccctttatttccttctcctgcctaattgccctggccagaacttctaacactatgttgaataggagtggtgagagagggcatccctgtcttgtgccagttttcaaagggaatgcttccagtttttgcccattcagtatgatattggctgtgggtttgttatagatagctcttattattttgagatacttcccatcaatacctaatttattgagagtttttagcatgaagggttgttgaattttgtcaaaggccttttctgcatctattgagataatcatgtggtttttgtctttggttctgtttatatgctggattacatttattgatttgcatatattgaaccagacttgcatcccagggatgaagcccacttgatcatggtggataagctttttgatgtgctgctggattcggtttgccagtattttattgaggattttcgcatcaatgttcatcaaggatattggtctaaaattctcttttttggttgtgtctctgcccggctttggtatcaggatgatgctggcctcataaaatgagttagggaggattccctctttttctattgattggaatagtttcagaaggaatggtaccagttcctccttgtacctctggtagaattcagctgtgaatccatctggtcccggactctttttggttggtaagctattgattagtgccacaatttcagagcctgttattggtctattcagagattcaacttcttcctggtttagtcttgggagggtgtatgtgtcgaggaatttatccatttcttctagattttctagtttatttgcgtagaggtgtttgtagtattctctgatggtagtttgtatttctgtgggatcggtggtgatatcccctttatcattttttattgcgtctatttgattcttctctcttttcttctttattagtcttgctagtggtctatcaattttgttgatcctttcaaaaaaccagctcctggattcattaattgtttgaagggttttttgtgtctctatttccttcagttccgctctgattttagttatttcttgccttctgctagcttttgaatgtgtttgctcttgcttttctagttcttttaattgtgatgttagggtgtcaattttggatctttcctgctttctcttgtgggcatttagtgctataaatttccctctacacactgctttgaatgtgtcccagagattctggtatgttgtgtctttgttctcattggtttcaaagaacatttttatttctgccttcatttcattatgtacccactagtcattcaggagcaggttgttcagtttccatgtagttgagtggttttgagtgagtttcttaatcctgagttctagtttgattgcgctgtggtctgagagacagtttgttataatttctgttcttttacatttgctgaggagagctttttacttccaactatgtggtcaattttggaataggtgtggtgtggtgctgaaaaaaatgtatattctgttgatttggggtggagagttcagtagatgtctattaggtccgcttggtgcagagctgagttcaattcctgggtatccttgttaactttctgtctcgttgatctgtctaatgttgacagtggggtgttaaagtctcccattattattgtgtgggagtctaagtctctttgtaggtcactcaggacttgctttatgaatctgggtgctcctgtattgggtgcatatatatttaggatagttagctcttctcgttgaattgatccctttaccattatgtaatggccttgtctcttttgatctttgttggtttaaagtcttttatcagagactaggattgcaacccctgcctttttttgttttccatttgcttggtagatcttcctccatccttttattttgagcctatgtgtgtctctgcacgtgagatggatttactgcatacagcacactgatgggtcttgactctttatccaatttgccagtctgtgtcttttaattggagcatttagtccatttacatttaaagttaatattgttatgtgtgaatttgatcctgtcattatgatgttagctggttattttgctcgttagtggatgcagtttcttcctagcctcgatggtctttacaatttggcatgattttgcagtggctggtacctgttgttcctttccatgtttagtgcttccttcaggagctcttttagggcaggcctggtggtgacaaaatctctcagcatttgcttgtctgtaaagtattttatttctccttcacttatgaagcttagtttggctggatatgaaattctgggttgaaaattcttttctttaagaatgttgaatattggcccccactctcttctggcttgtagagtttctggctagagatccactgttagtctgatgggcttccctttgtgggtaacctgacctttctctctggctgcccttaacattttttccttcatttcaactttggtgaatctgacaattaagtgtcttggagttgctcttctcgaggagtatctttgtggagttctctgtatttccttaatctgaatgttggcctgccttgctagactggggaagttctcctgtataatatcctgcagagtgttttccaacttggttccattctccctgtcactttcaggtacaccaatcagatgtagatttggtcttttcacatagtctcatatttctgggaggctttgttcgtttctttttattcttttttctctaaacttcccttctcgcttcatttcattcatttcatgaatggagctttcagctccatcagctcctttaagcacttctctgtattggttattctagttacacatttgtctaaatttttttcaaagttttcaacttcttcgcctttggtttgaatttcctcctgtagctcggagtagtttgatcgtctgaagccttcttctctcaactggtcaaagtcattctccatccagctttgttccgttgctggtgaggagctgcgttcctctggaggaggagaggcactctgctttttagagtttccagtttttctgctctgttttttccccatctttgtggttttatctactttttgtcttcgatgttggtgatgtacagatgggtttttggtgtggatgtcctttctgtttgttagttttccttctaacagacaggttaacagctgacaacaggtctaacaacagacctcagctgcaggtctgttggagtttgctagaagtccactccagacactgtttgcctcggtatctgcagcggtggctgcagaagagtgaattttcgtgaaccgcgaatgctgctgtctgatcgttcctctggaagttttgtctcagaggagtacccggccgtgtgaggtgtcagtctgcccctactggggggtgcctcccagttaggctgctcaggggtcaggggccagggacccacttgaggaggcagtctgcccgttctcagatctccagctgcgtgctgggagaaccactgctctcttcaaagctgtcagacagggacatttaactctgcagaggttactgctgtctttttgtttgtctgtgccctgcccctagaggtggagcctatagaggcaggcaggcctccttgagctgtggtgggctccacccagttcgagcttcccgcctgctttgtttacctaagcaaccctgggcaatggtgggtgcccctcccccagcctcgctgccaccttgcagtttgatctcagactgctgtgctagcaatcagcaagactctgtgggcataggaccctccgagccatgtgcgggatataatctcctggtgcgctgttttttaagctcgtcggaaaagcgcagtattagggtgggagtgacccgattttccaggtgccatctgtcacccctttctttgactaggaaagggaactgcctggtcccttgcacttcccgagtgaggcaatgcctcgccctgcttcagctggtgcagtgtgcgcgcacccactgacctgcgcccactgtctggcactccctagtgagatgaacccggtacctcagatggaaatgcagaaatcacccatcttctgtgtggctcacgctgggagctgcagactggagctgttcctattcggccatcttggctcgaccacaaaaaaatttcaagtgcatctattttgctgttaatatagcttgaagaacccatggcttgacatgtttcataggattgcagccatgggaggggtgagtcatcaaccacgataaactcatgaagatggttttataagctactagatgcggcacagacagagacaacaagctatgttttgctaatgggtcctatcaatatggggcccaggccatctttagcctataagcttcatcccagaaactaggagtcagtcagtagagtttactgtgatattttaaggaagaaaggagaaaaatgactgctcttcagagctgattagagtaaaaatgtaattatatatgtgcataaatatcctagtgatatatcttttttttttttcaatgattgtcttagtccactcaggctgttgtaacaaaataccataaactaggtagcttatgaacaacagaaacttatttctcaccattctggaggctggaaaggccacaattaagacaccagcagatttggtatcaagtggggatccactttctggttcgtagatggtgccttctcactgtgtcctcacatggtggaaggacaaactagctctctggggtttcttttgtaagggtaccaatcctattcatgagagtttcagccttacccaaaggctccttctcctaatgctgtcacattggtgattaggtttcaatttatgaattttgaggagacaccaacatttagaccacaacattgagattttatatatatttacatgtatatatacacacacacatatgtatgtatgtatatcccgtgtgtgtgtatgcatgcacagtgaggaatatatgtttagcatgtaaagttactctttgcaccaaatggtttcaagacagcaaaataatataacacctactaaaggccaggtaattggacattatccaaatcagtcatcatgcaaccctataaggtggaaatttttatccccaatttataagtgagcaaacaaatctcagattaagtaatttgtctaagggcacacagcttacaagagatgacgtcagattttggatttgagtttctctctttccaaattttttattcttaatcaataggctataattgggtgacaatcaagagttcgttgggaatattgttggttcataatagcaacaatatgcagtttgtaggacaagaggctttaagggcagagatctaaatgtatctgtcaaacagagaaagccatgtgaagtttctgtgtcttcatgcctctgtattggattcaggctgtagccacaatacttatgcaaaagcatttcaggggagacattgctaggcaatcttcacttccactaggtcagagtttaatgcacataatacttcttgccttcatgtgcatgttgctaacccatattcctgactgatattctttcagtatgtccacaatgaattaaagttaagaccagagagcaatataaagtgctgagcaaaactcttttgaaattcacaaacattgtccatcagcagaaaccatgtttacatttttaaaattcctattttaccttacgtggactgtaagatggaatccaaagatccctcaaaccaaaacttagtttcaatgcatctttgttgagataaaaaaaattgtcctactccaaagatactaaatacaggtctcatcaataaccatagcttccattttctgtcaaagtcaaataaaattttctactatttttcaattaggaaaagcagcatttcagataaaaaactaggcttttgtaacaaactagcaaagttggagttctttttattgaaatttatgtttacatggttattaaaaggtttgtgttggactgcgggactcatcttactctggcttctggggagtgaactagaaggcagaaaacgtgttctgttttcttgcttctgcgatgtgtatacagttttttgtttgttttttttttcctgagagccacgtgggactggtgaggctgagaagcaaaatttgaatcagagcttagattaaaaaactgaagcaataattttctccattttcagttttagttgttttatcttttgtgataaattgtaggtgagaagtttgggagaggggccaggatgctacttagttcattcatagcactgcttggaacctttagaactaagtcggccaggtgtggtggctcacgcctgtaatcccagcactatgggaggccgaggcgggtggatcacgaggtcaggtgattgagaccatcctggccaacatggtgaaaccccgtctctactaaaaatacaaaaattatctgcgcgtggtggtgcgtgcttgtagtcccagctactagggaggctgaggaaggagaatcacctgaaccccggaggtggaggttgcagtgagctaaggtggcaccactgcaccccagcctagcgacagagtgagactccatctcaaaaaaaaaaaaaaagaaaaaaaaaactaaacacatttgaatactaatcccagctttgtgatcctcctattccacctagaactacagtgttattcaatttttttgcttctgtcatgaagataatttgaagctaatcatccacaatgggaaatgagcaagtggttccaaaagcagaagtgggtatgggtacacatgggagtgtataaagctcaaagtctccttatacacggcattgattcagaaaggaactgacactgttgatgaaatttatcacacaagatgggacgtgaacaaatccttcatcctaaaaaggcagaaactcagaagagaatgactagggagaatgagtcactagcagctgttaagaatcatagttagatctctattcctgatttaactctctgctttatctaccccagaggccagtcgttctcaaacttcagctgcattcagatcacttcaagggcttgttaaaacaggattgctgatctacacacccagaatttctgattcagtacatgtgggtggggcaagagaatttttagctctaacaagttcccaggtgatgctggtcggggataccacaccataagacccactgctttaggcaataccggtttcagaattgagccacagaggccatgactggtttatttacctggaaaaccagcccaacatttttttttaatagcagaaaaagcatacaaatttatttaatgtgtatacataagaagaattacagagtaattacccccagcctgacatttccttaaaataggtgcttgtatgttcacctaaaaggggcactgctaaaagagaggatgaggggtcagaggaacacattttatccaaaaagggatgcccccccaatcccatccgccacattcagctgagaaccagaccagcgtcttagctattagttcattgcatgggttttggtgccagactagacttagatttgagatccaagtctactacctaaggtgataaacttaagtcagtcacttacttttctaaactgcagtactggaaggataacacaattgatctcagaggactgttgtgaagtttaaagaagataatgtttaggaagctttaacacaatagctcatgtatagtaaggcctcaataaatgctaactatatgtattatttaattatataactagcattaccatattattattatatagccaatatgtgtaatgttttgacactgtcaataaattttgaggtgtttatcccattttcagatattggaaactaaggcacagaagggttaagtaccttgcccaagggcatcctagggagcgctctgaagttatgccttgtgatgccacaattatcatcattctaatcacaggcctctaagtgtgatctgatccagaccttccacccagccctcccaagaacctggccacactcgtcaggattaaaggaggaggtattatttcttcaagccctcctggagtctctcttggccttttttggctcacatactgctgtacgtagtttgtgtctgaaatggaaaatttctgtaacacaatacccagctctgatccccacagactctcaaataatctttctcttttttttcttttggtttgggttaaaatatgacttcatgtgcaaaaaagaagcctcatttcccagcactctcagcagattcataaacattgcagactcaaagccctctggttcctaagagttccaaagaattaattctccttttttgaaaaaggagagcaatgactaagaagtgagaagagaaatggaaagattaaaactagctgcctgtttggtgcagggtatatagctctgagagcccaccctcttctgcacctgcaagaatccttgcatgtctcccagcacttctacaggcagccccaaggaaaggcagggagccatagctgcactgagctttatgatcctgcctgaaagtgagtatgttaggaaactggacaatgcaaatcaaggattttaggtatttgattcattgactccctagcattcttctcccctggagagtcaactcttcacacactgtttatgctgtgtgaacaatacagtgaatttcccttgagtgagttatttctatgacaagttactctaacataatagcgaactgcaaactgcacagggctttggagcccaactgtttgactttcatttccacctctaccactttctagctgggtgacctagggcaatttactcacactcttcatgttttagttcgctcatctgtaagtgggacttgtcatcaactgtacattgtgagattttcctaggaataaattacttaataaattatcaagtgcttagggcagttcctgatacatagtaagccccatatgtcttgctattactatttatttttattattattgttactacaactactactctactgcaaggaaaagagcagtgctataatctgaatgtttgtatccccagaaattcatgttttgagatcctaggtgatggtattaggttgtagtattaggaggtgattcgatcacgaggacaaagcccttgtgattaggattagtgccctcataaaagagaccccagagcaggccagccccttctaccacatgatgacacagtgagaaggcaccattcgtgaaccaggaaacagtccctcaccagacactgaatctgttggtgccttgatcttagacttcccagttcctagaactgtgaggaatgaattctgttttttctaagctacccagtctatgataaattgttaaagcagcccgaacagacgaagacaagcagttatggctatgtttgctcaagaaaatataatgccaaaatagaaaggaagcagtttggccttctggtaatggtataactctggattcagacagacctgcacatgacctttgacaccgctactcaagttgtgtgacctttgacaagctatggaacctctttaaatccactttcccgtttataaaatggagatagtaacatttacctcatagggctacagggaagatctgatgaagtaatgtttgggaagttctcaactgttggtcagcagcccaggaatggtagttattgtgtggcaaactggtcacatgaacaaagaaatccattaagtaagtttctcctaaaagcacttacaaccaccctacttgatacaactgactaaaacaatcccaacatctgagattcttaccaaatatacacagacagagtacatggtaaactagcacggtcctttgtatatttttctgtctcctgtgttaaacatggattgttgttaggttgataaattgcctatcacccctattcccaacctccccttctttatcagtcacacttttgtcccagcatatacatgttgatgtggtgaggttttgccagatttcataaagggaactatgataaaaaaaaataccccactgatcttcaagtttcaattttcagattatatgaaatttgtgtgatgaaataaaggttcttgaggaatcacaggtagggcaccagcatcattcaattccagggggcactgtttccatcatactgtattaaagctaggctccaagggcgcctttaatggagaacacaataggatggttgcctcctggagttgtgcaacagaatagctctgatctcaaagtgcaggaaacaaggtccactgacacagacttggactctaacctctcttctttttgatgagtcagactctgtcttccaaaagttaatttatacttgctgagtgagaacttgctaatacccaagcgacatcaccatgaagaggaattgtagaatcacagatctgagagttgaaagaccagcactggtcatcgggtccaccctctccagtgccctaggggaacatgccagtgcagttccagtttgcctttgttaatagggccaaaaaaagtctgaggcttggcttccaaggagtattagagttcaacaaattctcattctcaataggcaggcgtgaaacactcttaacccttggctcactccaccagcacatgtgtttgaagccccttagtcttcactaacgcactttctaaagaagtagaaggaagttgtgatatcagcactgaagggtggtgagaaaaaaatggatggacccaaacaccaatggaagaagatcatggaaagtattgactccagaacactaacaagtgactgtgctttttccttttatactttccccttctgccacccccacaggcttcttacacaatgtatcatacagcactttaaagctgaaagccatccacaaaattatcttgtcctaaggcacccagttttcagatgagaaaatgagtctcagatgtcaggcagtgcaaagcatccaggaaagataatcgatccaaaaatcacttacatttttagctgacttaaaacggagagagaaatgtattcaggtcagagcaagtggcatttttaactccattacataaatatagaagctaatgctcaaaataaaatggtgatgtaaacttggttcataaacttctctgctgggttagacagtctatggtgacatcagggcttgaagtgaagattggaactaggttatatccagaagttccctgagaagggaggctgagaggtgagtgaaaaaatatgttcccattatttgaaacttaaggtggaaaagaagccaacctctaatcaataatgtagatttactttaacatttcattgttgccatttcttcttttatatgcacacacacacacatacacatacacacatactgcaaatcagaagaatagaaatctgaagtcaaaacaccaggatttttaatttactacctgtgtcatctttctcagtttcacattgtcttttccataaattaaaatttattatagtgtctttcttacagctttgttgtatagatcaaataagataatgaagtgtacctgctttgtaaatcatgaagcagtaatttttaaataccttttttcaagaaccttcttaagaatctgattaaaggccaggcatgatgtcttatgcctgtgatcccagcactttgggaggccaaggcaggtggatcacttgaggccaggagttcaagactagcctgggcaacatggtaaaactccgtctctacaacaacaacaaaaaaattagccgggcatggtggtatgcacctgtaatcccagctactcaggaggctgaggcagaaaaatcgtttgaacccagaaggcagaggttgcagtggaacccaggttatgccactgcactccatcgtgggcgacagagtgagactctgtctcaaaaaaaaaaaaaaaagaatctgatgaaatctaagaaaccttaccaaaatttttacacgtgcataaaaagagttttgcatgtaatttcatagggttttcagacattctgaagacaccaatttaacacctgcttggatagtgcttaccaaatgtagaatattccagcctggacaacacagtatttttacaacatgggataaattaagatgagtcatttatttatttgataaacgtttactggacccttactaggtagtgcgggctgcagaggcactgatatccttgtctttcaagagttagcaatccaggttgtgcgcagtggctcatgcctgtaatcccaacactctgggaggccaaggcaggtgaaacacctgagatcaggagttcaagaccagcctggccaacatagtgaaaccccatctttactaaaaatacaaaattaccaggtgtggtggcacgtgcctgtaatcccagctacttgggaggctgaggcaggagaatcgctggaacgtgagacgcagaggttgcagtgagccgagattgtgccattgcattccagcctgggcaacagagcctgacttcatctcaaaaaaaaaaaaaaaaaaaaaaagcagtccaaaaacagtattaaagcaaaggagtctctttacatgcattatatcaactgagaaagtcaccttgctatggcatctgtccccagagctccagtgtctggttactctgttcagatggagggtagtctgggtgtctctgatttgagacagagaacctgcatacagaaaagtcaagggacttttccagtggacttggtacacagaaggatttgggtacagatgagcagagagaagctgtattcaactttggctcctcataatctcctgtcttgaacccttcatgtcagtgaaaagacatctgtaaacatctgtcgttcttccacatttcattaagtatgcttcttgtagattgttgacaccaaactagtgaatcaaatatctgatgacataacttagaattggaaacaggcattttcactataagcagaagtttctaaaaaattcctgccatgtagggttcaaatcatttcaccactttctagctttgggaagcacacacaaaaaatgtatttttattatctgaaaatcaggatgataatcatgacttccacatttagctatgaaattaaataattcctctgaagtacttaaaactgtacctggcatatagtgaaagctcaataaatgatgattattataactgtcattgttctcattctcaacagctatctcttacccttgtaggtattcttacccttgtaggaagcccattggttttactggcaatggaaaatatgttttgttgtagatgctatttcctaaaatattatgattttttaaatgtggctactaaatttgtctatagagatgttaatttttgtcttgacttaggtttgattttccaagttcctgcttgggttgtatatgaatagggttatctagaggaagcaggtagaaattgttaagagctggtaggatgtgataaaggttgagatttggaagttaaatttgaaaaaacagaatcagagagagggatgattgatcctgattaggattgtctagaagaaaatgaagaaaaggtgagagttgatagccacaaataggggagtttcccctattagaaagtacccaggaaagctattgtttgccctggccattgatattcaggcaaactacccaatttcgttttaggtgactttgatagaaactggattgcaagaagaagataaaatttcttcatgaaccagaatgaggaagtggtggtatactcagaagagaactaagggattcaaacaaaaaatcctgttgagtccacctggatttgatggtggggttgcctacctatagtttgtaacaaatgtttttcacgtttaagtgagaatattattctctgtaaacagcagactactattatgatgggtgtgtagaggagaaaaatgtaagaggacaactggtgagaggtgtagtgctaaaactatggcctgcagaggagctcttttctatttgcagacctagccccaacccatgaatgaaaacaatagaaatgatctgctataagatttcagggagtttaggggagctccggagagctgtatgtccacacatcagccagccagtccgtccctcacccacaccctcggatcctgccacaaatatttgaatcactgccatagcaatgttcatggacccatgccaaacaaaggtccatacgactgcctgggatttaaatgtcttcctgtgtaatctcatcacccaagtccacccacgtacttggagtttgctctgccctgccagcttcttttgcattgtctagctggacctacattcagaggtccttggagacaatgcttggattcatgtctggaatgcttcagcataccattgaacccactcccacttcatcattgcctggggaagagattcacaagtgcccaaggagcccactggttgccaatgagcaatttctcgagcctttaattatgggccaatgaaaacaatgcctttagtgaactgctgcctccctttcacctctgacccatggtcagacacgtgactgtgagtgttgccagatggaaattgttagtgaagaaccacatttaacagaacttttatttatcaactgagagcagcactcatcagttatcctgtgggcttgagctgtgtttaatatataagtaacctcaatattgtatgggcaacactatgggtttggatgaggattggcctatgaaagaagaatttgtcccctccaagttcccttatcaagcactaggagcatgaagagtatggaaaaaccagtccaaattattaggtaataatgttctgggaggcagcccaaagtccaagtaaatattctcacttgtgtccaaacccttgcttggcagctctgtcagacactgtcttttccccatattctaccatcctagagagtaaaagacaaactcttacctcaaaaacccctgccaaccaagtattcattatctgtctttccctcatctgaacagtttgtagctcagatcaggtgtttgttggagtctgattactctattttcaaataatacagcatacgactacagtgctgatagcaagtttaagaaggttcaacctaagggaagagtgatgttagggaactggagttcctcaattccaacattttccaggtctaaaagtgcactttgtagaaaaaacaagtgcttacattcttagctgtctggatgtgcaatattatctacaacctacagccttagaaacttttcctttgaactcgtgtttcgttccatctctaaactgtatgatctttagctgctctattcagtaagtatttgggcagatggatgcaaattgatgaaacacatatgtttaagacagagattaagaatgctgctgggttaaatatatctgtgtagtgatttccataagtatcttagctgttcagacaacatagataaattaacccatagaatccattgttgaattttagttactttactttttagcgtctcagataattttaccaaatttatgtcactttccagtatttctgtaaaatattttagagaaaaagcaggatcttcaattcattaatggaaaactgatgtaatgagaaaaacaggccagagccacacagctgagagtcattggttgcatctagaagcccatgtttcccttgtagaaggtgcttcctctgggaagggtgcttattacgtcatcaatgtattttttccagataccaggctcttttttgggatatgggaactcagcctggggaaacatttactatccctaagcaagtacttagatctttgtaagaaagctcattattttttttctcctacttttctgatgtgtgtatttccctttccttagagactaccaattagtaagattgcaaatttagtttggcatctaatttatttgttactatttttaatgcaaatgttaagtgggctagcctctgagaatctgtgatttttatgctgttgttccccagacacaacaattctcttgtctaagttagtgcaacacctacacaaacacaaaatatgccaggttataagactacagacacgcacttgggaaaatgctgtgtagtgtataaattaccataacttgtgttattataggaatctgtgagagaattcatatcactttacccatttcataaatggaaaaacttactcagagatatgaaatgacttctccaatattacacagttcccacctcacagaggtagaactggtcaccaaaagtaaaaatcttacttctcagttgaagattttgccaggatatgccgtaagactcttcttagaagatgagcaaagggagacaagaataaaaatcctagtcccagagggctggtcaaggatctgaccacctgcagagaagaatgaccccagaactaaacagtgattggtacgaagccagtcagctgtagcaaagcagccaggatgaggcagcttgaggagagatgtggagcccagccgcctcatggcatgcaggggtttctcccaaggctctgcacacaccattgtgcagctgcccctttctttaatgttagttctcatgaaagttccagtgcagatgaaactgtcagcatctcagcaatcatgggttttgagaaagaagaagcggtgcctagctaaatgtatttgttttctagggctgccattacaaagtaccacaaatgggtggcttacacaacataatttcgatttcaaaatgtcagcagcgttggctccttctgagggctgtttgggagaatctcttctatgcctgtcttagcttctggtggttttctgttacactttggctttccttgtcttgtaaatgcatcaccccatcactgccttcatcttttttttttttctttgagacagagtcttgctcacttgcccaggctggagtgcagtggtgccatctcggttcactgcaacctccccttcctgggttcaagtgattctcgtgcctcagcctcctgactacaggtgtgtgccaccacgcccagctaattttttgtatttttagtagagatggggtttcaccacgtgggccagactggtctcgaactcctggcctcaagtagtccgcctgcctcagcctcccaaagttctgggatacaggcatgagccactgcacctggccactgccttcatctttatatggcattcttctgacatacacatatgtgcctgtgtccaaatttctcctttgtgtaaggatgccagttatactggattagagtctaccctcatgactttaacttgatcacctgcaaagaccctgttcccaaaaaagatcacattcacaggtactggaggttaggacttcaacatcttttggggggacacaattcacccaacacaaaagagtaaatgtttcttcttaaatggaatctcctaattcaaaaatagtcattcttcacatgcttattttagtgttacttacctcaaaacataaggattaactgtcttttttataaagttcaattttttcttgttaggtttttaaatttttttatattttgacaaataaccctttgaatttggtataaaataccttctgctcctcaaaaaaaagactaatgctgcattgaaatggaaggctgcaatcattatgagaatttattactccttcttacttgaactgtgaactttcattcacatcactgagaacaaattatatacttaaaatggctcaaaacctattgtctttttcttactgttactatttttccagaggagaccctgttcagaggaagttattttccaatgtgcccttggaaaagttctacaagtagtattttcaaaaggacttaatttaataattctattttttaaataaattatatttagactatattaacagaaagatttttaaagtggggttggggagaagggaaggagtaaaaagaaggaaaagaagaggaagaaggctaaacctatgaaggggagtaaccatataaatgactaaggctacaggtttttgtttggtttaaccccaaagctggagggctttttaaagctctctccactctctggtccctgaactcagaaatgcctagatcagccctgcctggctagattctgggaataacatttttcttgtagaggaaattgtaccagggacctagccaagtctaaattatctttttgggtttgcattggcatttttcttggttcaaattcacaagtaaaggttgccgcaagagaatatccagggtcgttttctttaccgaagggcttagctatacctatagagcttatctgtttgccttgactgtccatggacctcagggaaagacatgatttcataaacacctcatagagcccatccctgcacactttttttaacaggccccacaggcctgcacccctgaaggagggttggtgtgtatgaggaatgcaatttggattttcttcacagagacgtgagaattcctaagttgaggccaacaactcctcacctatccatttccactcatgtgcaaatcatatatttctgattctcagcactcctttcttgagtttaagtatagaagcaaacaacttcagtaaacagataggtaagaagttttatgctctaaggattgaaattgtaaaggtctaagaaccagtccttattgaaacagacaaacaggaatctcagtgctctgatagcatcgctcgaagtgcagtctgagaaccacttttagcagaattatcagaaaagcgtattcattaaagttaacaaggtttcccaggctctgctccaaacctggagcagaagttcttggagtgagaactcatgaatctcatttttaaccatttcccaggtgccttcaattcacattaaagtatgagagctattgcatgacccaaatgtatgagaagacagccaagggttgtgaatatggatcccaacataggcttgagggggtcccttaaagactaataaaatcggtgatttgtcacacaagctttagagaaaggtgaattttagatagggtttttcctgacttctgatagctgtagcaaaatatgtttccacgatcttatgctctctcaagcactttgcattcatccctgactttgagttacccagatctatttacctgaatttctcctgagacagagacaacgacttcgtatctttctgccttgatatatcccttgactggcagagtgcctgtatgagtaggcacttaataaacttttgttgattaaataaataaacatagctgctttactcatcaggaacttagcaagaaaagagtttatgcttattctcagtaaactattatgatgtactataacataggtttaatatgaggccaggtcttattggatctttatttctaatatctcaaaacattagtttcttctcaaatactaccatgtcacttcttgtgttgaaaacttatttatgcactctcttcccaccacttactgggaaagctgccgtaacagcaggtaccaggaaaaagccaaactggcctaaataaagagaaattttcaaatgacatttagttcatctgtattcagtattaaggtttcttcttcacttagctgagctctataaacacctgtcagtggcactatgagatacagcctttagaatattgctgcttcattcacacagtggactgtagggaggagaaagccagtgccagggagggctccttagttattgagacctcaccttcccacctctgttgtgtgctcttgggagctctaggtaggggtctcactcaagtaaggctgtgagaggtatctgggtgatggatgtgcttcaggaatgcatttcacagcagatgtttttccagacttgctgttagggtgcagtttcctccttcagggagggtttagtggctcaggaaattaataaagtcagacagaaaaaaaattgatcaaagtcctggtgctaatgtatgctctatctcctggaagttaatggagatcagacagcaaaatgctagggatgcgagccccgagtggcttggcgcatctgcatttagaagcactggctgaagaagcatcactgctagaaatgtaagacatgcagagtcctgggaaagggcaccactggggcttggagtggttttcatggtttttttctgttttcatctttcaaagggaaaaattgctgaaataaagctgacttgaaatcatttcaggcatgtgtgtatcctgactagcacattctttgtcatgttaacttcttttgatttcaaagaacactgtcaatttactaggccccaaattcgtggtgtttttaatttaaacagagggttgccaaacctatccctaagagaaatattttcatgatccagctcttttgtcaactccacagctcgggtgtggtttcattccccagttcagcatccctctgtgctgttgagaaacccaagacaatgtcggggaaacatgaaaatactctcgatggattggattctgcctgaatctcatcagaaggatgtgccataaggagtgagttggagaaacaagggaaccgaattaagatttatatttaatagcacaatgtgtggtataaagaaaatatgagagtcttataagaattcctaataatgagataataatcatagctatcaatcagtgaacaggggagtcaattgcagagcacttctcttgtggctctacagatatctcatgtcatcctccaaacaaccttatgagtagatactatcatcatcaccatcatttatacatggaaccaaagagcagagagatcaaaaagagatgactcggactatcattttgctagatgcagggttggtccacacccttagaaaacaaacatcgagaacccaggtctaatctattcagttgagattacttcccccaccgattaaacagatgagtagtcatggaagaaaatcacatagaagagcatgtagatgatactttagaaaaactggttagtcaagaagtaagagtgggaggatgcagagcacgtatgctgcaggtgtgatgctaaatttgatatagcccaaagcattcttctagcagaaagggtgttcaggaaggggtttggaagtaattacacaataatcaattcagatttttggtcatccttcctagaccttttcctaattgttccattttgtaatgtcattcgagtcatgtgcatagaatctggtttgttctgaaggttaaatataaaagaaactagaatactcaggaaatgtaattataaaactagagataaaattttggcttaaagtttgacccagagaataattattttagatatgcgttcccctagtgaataaagtaggagaatgtttacatttttctacaattgaacacctgggaacccattgatatcttactgctaaattagtgagagctcagaatttgcactgagtttatggaaatgggcatttctttctaaaataagttttaaaagtatgcttcattgctttgctataaaactggccctgaagtgttctgacagctgctggtgaaagctttggaacgtatttagctctttttcagagatattgacctcctcacagcaattccaaaggcaagagattcttaagcatagtgggacaatacagagcaagcttctgggctgatgcttatgaataactagactgagagcccctcataactgctatttaggaaggcagtcatgtaagaatcagtcttattcaaatgtggacctttagaggaattacctataggattagagtataagtggatctgagaaataatcccctttatcgtataaactctccttgagtcccattccacatctctttgtcaatcaagtggcactaggggaaggaaaggggatagaaagagaagatagaaaagcaaaatctctttctttaggactgtgtatagggtgacattttaatataagaaattccctttctattaatgtaacctattttcaaagtatttataatttatgggatttgatatctattttaaatcaaatattaatttactaactgagtgcacgttcctacattgcacctctcactccagactaatacagttggaatctccctgcagcatcctggaaagtttagcttcctgagggcaaatcttttcctgcctagatactaaatcaactacatcatattctagaaaactggaaaatgtgaaggaagggatttgtaataactcatacacctagatgtagaactccaagaatctaggcctgcataagagtgccaaggagttacagttcccccttgatgtttcatataaacttcaccttccctttgtcatcaggtaattcaataacgtgtacttcctttagatttggcaatcagtcctaaaaccagtggtatttattatgctttctcccttccaatctttctcaggtagagaagatagaaatacattctgtccaaagatgcttaagctgaagacacttaagtatatttccaaggaaatagaaaatagattcttatctctaaggagcttacagtcaagccaagaaaatttggaaagtgtgtacggtgaaggggccaaagaaataaaggccaccaatcagcataaaaaagagaagccagaaagctgagagccagttacaggcaatgacacaggaggcccagacagaagggctttgatgaggaggcagcatcatttgctgcaggaagttctaagaaaatgagtcttctacaaagaaagtgattcttactagaaaaaaaaataactaggaatcaaggcatcttctcaaggaccaagcaaaatatatttttttctctcaaaatgtcaaaacagattactagtttttactaatgaaacaggtatctatctccattacacaacagtaataggagttaattattaacattgacccagtatgatcttctaaataaggattatgcttctttctcctattttctttctttttttctcataagataatccaaaataccacataatataatttgaagttaatattcagctctaaaatttaggctcagaatttatggtatttctttttatcttattttctaacaaagggatatttagtacagcatcttaaatcagaccagtccactctcaaatgtgaatatttttagaagagcaaaaagactaaaggcactttggttccacataacaaaacagctctttcattctgtgttcatctttatgtgatttctttctgttatgtgccacattttttttcttccaaaagatactcacttgtggtaaccccatatgcatcatatttgcaacttgttgtttgatgccatctgtttaatacaataaaaaagaattagcagtcctatcacatgagctgaatttcatctgattcctcttcaaagaaataggaggcactattctaatgggcaaaaataatgagtgctaaatccttcaactagttttagatgtaaaacacctgttttaccccagtatagatgttacatattcttctacatcattaccctcccttttttttaagctaaacggactggcttctggcaaatccagaccatttaacaaactccagcagatatgttttataagcgtaggagctgactatattgtggagagctccggatttacatttcatcgcacaatcaacctactgccccttgggcactcatacaacctctctgtaggtcttcattttgaaaatagggatactgttatgggttatgtttccccaaattcatgtgtagagtcataaccaccaagacgtcagaatgtgaccttatttggaggtaggtctttacaaaggtaatcaagttaacatgaggtcattgggtaggtctcctctactatgatttatgtccttatcatagggaaatgtggacacaagcacatgaagagaacaccatgtgaacataaagatggccatctacgagccaaggagagaagcatggaatggatgcttccctcatagccttcagaagaaaccaactttgccaacaccttgatttcagacttctagcctccaaaactgtgagacaataaatttctgttgtttaagccacccagtgtgtagtattttgttatgggagccctagcaaactaacaagatgcattatgaatcccccgcattaggctgcattaaggattgcaaaaatatgtaaaatgttcaacccaccctcagagccgtaactgccctttctagaaaaatgtacttgaccatagttttagtgaacttggaaggcaactcgtgctctcatgtaaaatgtgcttcaactctcattacagagtccatagccttagagtatcttgctcagaacatctctactttctacccagggctcaagtcaggacaatttggtcccaagaaaccacagtgaaatgtgaatccctaaaaaaaacatggcaagtgttgtgtggatatacatcaacagaaactgaaactgagggatcacactttctccccagttctcttctgtcatctaatccactctcttccacctaaaattttcctttgctcacacagagttccttactgattccctttagcatctatgtggttcattaggccactcaggcagcctttctttggctactttctcaatagtggctctcaaaattttagcagcatcagaatcacctggagggtatgtaaaactcaggtttctgggccctaccttcggagtttctgactcggtaggtctggagaaaaaactaacaagttcccatgtgatgttgatgctgctggtccagggaccacctttaagaagcactgttctatagtatgacatttctgcttcagttttcatggattacttattataacctttcaggttcccaaaatctatatatttttttctttttcaacttttattatagaatctggggtacatgtgcaggtttgttgcaaggatatattgtgtgatactgagatttggggtatgattgaacctgtcacccaggtactaagcgtagtacccaatagatagtttttcagcccttgcccccctcctccctctagtagtccccagtatctattgctcccatctttatgtccatgtgtacccaatgttgagctctcacttgtgggaacataactgtatttagttttctgtttctgcattctgtttctcctgttctcttaggataatggcctccagctgtatccatgttgctgcaaaaggcataatttcattcttttttatggctgcatagtatattccatggtgtatatgtactacattttctttttagcctgggcacccacagtggattgggcactgggcccttgatgggcacctgggttcattccacatttttgctcttgtgaatggcgttaagatgaacatacaggtgcatatgttcttgtggcagaatgcaaaaatctatactcttaagaggactctgacctccatcctctttttgcctttgctacacaggtctctggccatcctctatatggaaatacttagggtaagtagtcaatcagccatggccaatgaagggttgggtcatacacccaacacttggctatttatcaccccacacattcagatttttaggaagaggagagtcgaggactctgacatgtgtctattcacaaaatgtgagccaaacattcatttacaagtcaattatttgtcacagtaagttctcagatgttcacttcattctgtacattattagaaaggctaaagtatagctcttctgtggtttggaatgcccccaccaaaactcatgctggaatttaattgccattgcaaccacattgagaggtgaccttaaagagaaggttcggcaataaaagtgaagctgttattgcaggaggggatttgctaacgcaggagtgggctcctgatttaaaagaagaagaagaaaagaagaagaagaagaagaagaagaggaagaggaagaggaagaggaagaggaagaagaagaagaagaagaagaagaagaagaagaagaagaagaagaagaagaagaagaagaagaagaagaagaagaagaagaagaagaaaaagattagttcggcccaactttctgtttcacatgccttgctttcttttccattatgaaataacacagcaataagaccctcactggtgccagtgccatgctcttagacttctcagcctccagaaccatgagccaaaataaatctgttttctttataaatgttggagcctgtggtattccattatagcgacagaaacctgctaagactaagacagcatctcagaaccatatgagttttatgctaatagaaaagcacatttagaattctaattcatgtcatctggaactctcatatcagagattattcaggtaaaattatgatgggttatggcagacttgcagctttgatgtccccgtggatagacccaaatgcatcaatagcagcagaaggaaagacaggatcttataacagatgttgataggtgttttcatatgtgagtgcattaactgaatgtttacaaaggactatctgtgtgtcttcacaagtagattgcctgttcctctatagcacactgaatcttgattttcccccaaatcaagcatagagctatacatatagtagatgattaataaatatttaatcaacaagtgaatgatcgtcatccattatgtttgtgtagttacttagaatgttttcttttgcattatcttcctcaacattaaaatgtatggagttttctctaaagtcattttttagcttttatatttcaagttgacctcattatgggccagtcatggagtgatgtcataatcaagaaaaactaaatgccttaaaattttaaaaacataacttctttacttatgtctgatgaactctattgaccatagtgactatttctttaaaatctccttatctctctccacctgctttccttatgctctggagctgctcccaagcctatttttaaactcttgagaaaagttttccctcagctctaatccacatgtctcccatccttctttatccctctcccttttccccaaatcctgtattacattctgtatccacagccctcctgagtcaggattgccaggaaagcttgaactactcatgtaatgctccaataccaataccaaacttaatttgggggctttttatcagcatctccccaataacaatgacttcatcacaatagccttattcctccaggattctttgttctaccttctaaataattgtgtcaagttacaattaatttctcctttgtggatatccacaacaagaacaggctcacatagataacagaaatgatcattagtttttcaaatatgatttcatttaaaagcaagaattttcttccgccttctgctatgcagatgcattcctttctccccacactctcaactctcaaattcttaagcatagtaagtacagtttgggggaaaggtgttttttaatctagaaaagaatccggagaactttgcaagattttctcaagtggttcctatactccctttagtgcagattaaatacagtcctctaaatgatgagatggcagctgtaaacagaagcagtattgccgtggcacaaaactacctcagtcatagggccagaatgcaacctgcctattttgaatttggtcaagcaaggaaagaatgccttatctctatttccctcaggccaagctctgtttacttatgtactgtctcaggaatatgacaggatccaaggccagggtcaagatatggagataggatgtaatagagaaagactaagtgtgaagctaaacttcattatttgcatccaaatgataaaaataatagtagaatctagagatgggtaatgactgcccttaaaattggtagcaaatgttcaggtttttactgggaacaaccttagttatacatggaacttcctattctcagtccaatggccactcttgaaaaggacattacgttcctggcaattaagtcaaaccttaagctagtctcatagttcagtgctctcagttccaaaatataaagcgaggatagtaaaaaaggagagatgctctggcctaccatgagcccctcaaaattaccactctttgagctcaaaagctcaagcttgagcttttacactcaatcaatttgttaagtttttgttcttactattccctcggtccagaatgctctctactctccccataagcttggcaaattctttcttctctgttttggtttcagtttaaacatcacttatgccagagatccttccctggcccttcctattcccctttaaactgggtgagactcctgctagagcttctttctgtagtaccaagtactgaccccactgggtacttatcaggcacagcttaggaattgtctgtctttcttcttaacaataaattccatgaaggcaacaaccctctctacttttctcatcattttgaacaagtgcttagcacatatgaggtgataaatagagctttatttttgttctcaggctattcagagagaaaaaagttttgaaatatttttagacatagtgtcttcttttttaggattctctatatatacattttatattattgcatagcttgaattagtcttgcatactaaccttatatcacatataattttgtcctacttccagtttttcctttttcttcttagttcctatctgttttcccctcctctgtccccagctgctattccaggacagcactttctaaaattccatagttctctgtgcttcaaaattttgagaattcttgctcaacatgactatttctagaaactgcttgcagcagttccaaagtccatggcttcagcatcaaggtcatgggaaaatctttactgttcagagagagatttctagagccctccagtgaatatgtacaaatcttctacggggcaatagcagaagagccaacacgtgataacctttgcttataatattctttctgaaatgggtagcctcaactggcaatttacatctaaaatatccactttgttttagaattaagctctatttatcttagtagtggcacgttctttaaaataaaagaattatttttcaagactgaggcttggagaaaaaaataaaataaaataattgaaaaaacactactagggaaaaagagaaacatgagcaaggtaaagaaattaaaacaagacaaaacaaaaactcatcacctttaaatgtgttcaaatctccaggtccagattattcagaacaaacttgcagatcaatgagggagcaagcacccagggagagaaacaggttgaagataaacattaataactataaaggtacttgtattcccgagacagaaaattgaccttctaatttagagattgatcagcttgctgttgatcactagcaaaattctaggataaatattaaaagccaatttgtgaacatttgggccagaaaaatcttgccttaatcccaaaggagttttttaagatcaagttatgccaaacttgaaacactacatcagatgaatatcaaagagaaattcaattacagtaaggctcttgacaaagtttgttatctttaagaaccagatggtaaactgagggctacataaaaatacagttgggtgaattcagagtcaattgaataagtatattaagggcaattgtttagaggatccatgtcctttgagaggaattctctctccggaatgatcaccctgcctggtgtcactgatgatgatttagatgatattttcagaactgccaaataaccaaactgggagggaaaatacgttggttaataggatcagatcaagattgagaaatattctaacaggcaataaatatcagagccgagaattccacaaatgcatgattaaggacatatgtccgaacaggaatttctcttaataaagtattatataggttgacttacaaaaatcaggaaacacaaacaagcaaacagaaaaaactgtaaatgtgatagtcattaggactgtctgcaaaaattgttcttctgagctcattggaagcttgcatttctttgttcctttgaagtgaggcatgagattttctttgaacaacaaaataccagaagtgtcatgcagtgtgtgcaagttgcctcatccttttttcctgcctcagtggtagtggaagcttctggagccatctgtctgtgtctgtgagtgggtgtgatcagtaggcccctctctcataaaccgtgctgataagcagcataagcaagaactaatttttgattgtgtttagtcactgggatttggggattatttgttcagtataatccaacctattctgagtgatgaaactagtatttcagaacataaagataagaaaaagtgtgtttgtgctgtgttaattccaagacttttagcacacatatgcaatatacacataaattataaaaatgtcatgtatattgtaacatacttgtttacttcattatattgtgaagtaagtatatttctaaatcagttttttaactaaataatagtaatggtccattacttgaacatgtcatacctaaccaattccctattgtaaaaactttattttttctattttgatattataagtagtgctatgataagactctttgcacacatttttaatatttcacttagaataaattaggaaaagtgatatttttgagaacaaattaattgctttcttaagctttgatcatatatttccaaattatactaaataagtaataaaaatgtatagttccatcagctgtgtgtgagaaaatctgtttttccaagtatttgtctgcatagaatattggctattaatttcatttttagcagtttaattttgccagcaactttggcatctagcttgtttgaacatttcatcacatgtttgtgagccattttatttcttcatttgtgactcacttattcatgctctttattcattgttctactgatattagtctatttcagttgattctcaagggctcttgagatattaagtctgttaacccctacatgtattttgcaagcatatttctgttttctgtttattttttgatatttttattattcttccactttggagctttaaattttagttggcaaaatatagcagtctgtcttatgtgacttatatccttgaaggatacatttggaattctcaaatctccaagtaaaattagcattttcaaatataatattttcctctagttctttattttgtttttacacatacatttttaatccatctagaatttatttctgaatattaaatatgacaggattcttcccctcccacccaaaaatacctagtgtttttaactaatcttaaactcaacaagaagcattagagaggcaaacacacacattaatgcaatcttaaacttctttaacaaaatctaggacacaccaagaaggaagtcataattctactactcttcatctgttagaccacttctaaaattcaattaggacattgataaataggaggatagtcagagaagggcaaccagaatggtggtggttcaggaaaccatatcttttgaagaagaattcaaaaaatgttttgctcgggaagagatttatattgacatgaaaattgtattcataattaggaaggattggcatgaaaatgtggtagattcattctgtgtagttctagatattggcatttggcacattaaaatttatagcaaatcttacttaaataaaaggaagaattttatattcaaaaatgaggtacagttatccctcagtatctatggaggattggttctaggacctctcatggataccaaaatccacagatgctcaagtctctgatataaaatggcatagtatttgcactggacctatggacattctcttttaaatcatccctagattacttctaatacctaatacactgtaaatgcaatgtaaatagtcgttatgctgtatcgtttaaggataatgacaagaaaaaaagtcaatacgtgcttagcacagatgcagtttttttccccaaatatttttcattcatggttggttgaatccattgatgcagaacccacagatacagaggactgactatactgacatcctactgctgtaggaattcaaacaattactaaatgccattcaagtttgtacaggagatccttgcttgggttgggatgttaaactgatgacctctaaggcctcttccaaagtctaagattttatgattctggattgtttgacctagctgaagaaaatgacctagtaaataactattgttactttcaaaaatttaagtctgagttctgaaaaaggcttaaagtgggaggataagacagagcatcggcaacttaggggattggcagacaagcccaggccctcccacccaatgataagcagtagaatcttaggcagatcacttatctcacccgggctacagtttgtcattctaaaatgagagagttgaactaaaatatcattaccagatgatctaagagtcccctcaaagcctaagatcctataattctatgtttaataaataggtataataaatgacatagtcaggttttcaaatagaaactcctatgcctattttaataaactctggctgtctcagtgacttgtcctattgagagcctcagatgcaaaaaccagaggttaaatccaaggttcacacatttgtcattcatcaaaaaaaaagtttaagaacttattttgcatggggcgcaatgctaggtactattgattcaagggcaattaaagtgaagactgttgtactgtcaaagatctcacagtttagtggtgatgacagcctagtagaccaacaattatgctactacataacaattgtgttggatgtctttaactgccatagtgtcagagactgacagcctacttggcctttagatatctcaaatataccccaagagactctagcttataatttctatcctcatgcttttgcgttactgaaggtgaatgtgttccctgtttaaaaagtttaataatttgccatttgggagtatttactgtgtgctctatagcatgctatttaatcagaatttctttagagaacagttaactttaaatcaaatggaacttataagtgagatattctcctttatctttggatatttttttgcacttgggtttcaaatgctgaaaatgaatgttctctccatcataacattcacagacccttttcctgacttttcatggtgtgtgactgtggcctgacacttgctacagatgagaaccctttcaagctagaattggagggctcaatctacttctaccattttcaaagacatggttggtagcttgggctactctaggctttctcttctgtgttctctggggctctgcttctgacctgcctttttcctctttttccttctggtccacttcacctcaaagaggacacatgggagataggggaggcattccacagccacggccaagaagaaaggaccaccccggggtcgagtctctggcagcgtacccaatctattctggggtgaatccaacctgattgcatgtttctctaaaatagatcaccaagttgaagatacaccaatttttttctacagtttttaaataaacttagactttgtagtccgccaaaataaacattagagaataaagcagtaaatttttcagtaaatatattagaaatagagggtaagaaatcctccagtctggcaaagactggaatgggagcatgaattggaaacaggtcaagactcctggccataaatagtcttctcactttaaccaagatgtttgtctcatgcattctgacccaagaaggttactagtttccaggaggagaattggtgggacttttcagccctaaatgtgcttaaaggacaaaggaaggaaactcagtcacagaaacgagtggatggaaaaaaccattatgctattttttttttaatgtcatttcaaagcagtaatttggatagatgtcatgttgtttcctatgaatgccatggggttatatctggatgactaccttcctatgaccaaaaactaagagtgacatagtgataaattcacccaggtcagaagtagagtctgggacttttgtgtgtcagtctgctatttaacaccaaggcctttgtcctctaaaggtagaaaagtccaagaggagaaagcatgtgtcaatattattttaaatgacattaatttgatattccctaaatgaaaagaagatctttataaagaccctttgtctcttctcctgtttacttctcccatctatctaccttttattctttctctctaaaaagagcctaagatgatgcagtaagattgaaatagctaaacctaccacacagggatgctttaaagcaagcttgtccaacctgaagcctgcaagcctcatgaggcccaggacagctttgaaagcagcccaacacaattcataaactttcttaaaacattaggagatttgttttgcaattttttttcagctcatcagctatcgttagtgttagtgtattttatgtgtggcccaagacaattcttcttcttccaatatggcctagggaagacaaaagattacacacccctgctttaaagagtaaaagaataacttacgggaaagcacctatcagacacatagtaggtgctcagtaaaggaatagctccattttctttccttgttggcagaggaaaaacattgcaagatcgtgggtagagaaatgaaacgatgagcgctatattatgttcttctccctgttggaatcatattggtgagaaaggaatgccaggttcacacatcaaatccctgagttttacttttcccaatcgtcactgcaggtatttttatcaaggcgatggaaaaaacagtgctccccactcctggtcaatcaaagaggtctctgctaaacaacaaattatgcctgttgctcaaggttctatcagatgcctggcatcagattaggagttcctttgaagaaaagactatagactccaatagaactccttattagtctgctttctgagaaggtgtaataatatgctctctatgggaactacgtagtcatttgttcaaccaacaattaaggaggcaccactcatagttggttacataattggcagatatcttccagtcaggattattttagaggccataaagaacaaaatggttttgctataagtacattctccgtttaaaaaaagaagaaagatttaactgctctgacatatatacatgggaagccatgtactatagtgaatgagagtgcagattttggattcaaatggttctcagttcaaatttctttattaattttgtggactttggaaagttatttgacttttctgaaatgccattttctcacctgtaaaatagcaatggtaatagcttactttgcagagttgttcagaattacatgagataataatatatattatgtgcttagttcatatggtgtctaaccctataaacagcgaccaacaaatagcagttaccgccgtgccaaaattggacaagctatcatcaccggggctatgtgccctgagtatttttgtttggcccttgtctttagccaactgagcaatacaaaactgagttcctgagaaatcttggaaacaatgattctttggttctcaccacccccatattgtgaaatccatgatcttcacatggcagattctatccaaccaaagccccttcagaattttggaatggaattctcataccacagccagtgctatcatgactccatgggcgtgaggagcctgactgggggcagggcgttcaaattgcccttggatcttatcagcacctcagaaatgttacagctagtcagctactaggaagtggaggcctagcctcttaattttgttcctgcttagaaataggcatactctgggttttcataaccctgaaaatctcatagcatagccctgaatattcagcttcccttattagaaataaagaccactctccatttagagactggccaagaaagagactcctgctgttgtagtaatatggttgccctttgaccccaggaagttcattgtgtctcctttctgaccacaaaagtttactccaactcctcaggtaaatgtctcttctctgataaggtaccaagctccaaagatcttgaaaggtttaatatataccttccagaacttttcatccacacaactagtagtctcttcatactctcttcacagcacttgaggcattaggagttgctcagtaggttgctgaattattgcaactcaggagccagactatgacagtgaactgacatgtgtttgtggccacctaagcactgtgttttgacaaaggaaaagaacctttcgcagatgcaagagagacttctgtttgatgaggtgagcgcagtgcaagggaagctgcctctttaggatactctggacgtaaaatgacataaaatgaagacaatcataacagaacagcctccaacctaaacagtgttctggtgcaatagaatttacttttcacttttaaaacttttttaaaaatacatgattattgtagacaaatatagtaatatagagaagtaaattaaaaaattaaacattttcaagaaaaccaccaatatctagtattaatgatataaaatgtatcctcctagtctctttttaatgtatgtattcattttataaaaatggtgccatggtaagcattctgatatgtaatctgcttttcccctagtacactgtgaaccttttccataaatatttctctgtaatattatcttccctaacttttggtaatgttttattattgtgtcacaatgatttaaccagctatgaattatcaatatttagatagcttccagattttcagaattataaaaatagtttgatgagttacactgtaggtgaatgtttgttcttaaccaatattcttttgttataataaatttctatatatggtatctgctgggtgaaaggctatgtgcaagactgtgttcacacgccctgctatgaactttcctatacaggacccctgtgagcagatgcaatggtttgcttcctgtgagtggactttctgggtcttaggtaaatgacaagatgattctgttttcccatttcagtcccagtttacactttcttatccaaggactcacaggactaactcattgttagtgcccccattttattctcaaaagtatctttgttgaggcagcattgtataggcaatttgtcacggggtagataaatgcttacctttaagagataatgcaaaactgttttccagagttgttgtaccaactcaatctccctggtagtgtataagcaatgctgtggatctgttgtcagacttttttgcttttaatgaaatggttataaaatgctattttatagccacatgttaaatatactttatcttttttttacattctaaatttcgtcagtgatacattataattgtacatatttatggggtacatgtgatattttgatacatgcatactatgtgtaatgatcaaatcagggtaattaggatatccattgcttcaaagatttgtcatttctttgtgttgggaacatttgaaatcttcttttctagctactttgaaatatccaataagttattgttaactatagtcaccctactgtgttctcaaacactagaacttattctttctatctaactatatttttgtacccattaaccataacctcttcatcccttccatcccctaaccagccttcccagcctctggtaaccatcattctcctctctacttccatgagatcaacttttttagctttcacatatgagtaaaaacatacaatgtttgtctatatgctctactaatgacttttatacttttacatgttttcatgatgttgattactgtctttttgcttccagatgcaggactcccttcagtatttcttgtaagaccagtctagtggtgacaaatatcttcagtttttgcttgctttggaaatactttatttctccctcatttctgaaagaatcattttataattctgatatgtatatatatcctttcttatataaaagagaaagcatgagataatgaatatgagattcacattagctcagataggagggaggcatagggatgaaatgtggagaacttacaattagctatcagttatcatcaagatctgagcaccaggcatggtggctcatgtctttaatcccagcactttgggaggccaaggtggaagaatcgcttgagcccagaagttcaagaccagcctgggcaacataaggagacctccatccctacaaaaaattttaaaattcgccaagtgtagtggcacacatctgtgttcctaactactcaggaggctgaggtggaaggatcatttgagcccaggaatttgaagctttagtgagccctgatcacgccactacactccatccggggtgaccaaacaagaccctgtctcaaattaaaaaaacaaaaacaaaaagaaaaactaaataaacaaaaagatatgaacattcactttggttggtattttctaaggatttatcagaaacaaataagcaaacaaatgcatgccatgggtatgtactgaaccaagattatgattaatttatttctgtgtacaagaaatccaatgaaaagaaggaaggatgtgaatatttgaaggttatttatagctgagggtagggagacacaagcacccctgtggccaccaacactgggactacactgattcagacccaaagctagcacagcactgggtcttacccaaggcccatggcgaccactgcctaggatgttccctcaaagcccaagggctctacagtcagcaggtgccaaatccagccaggcttgtggtcttgccttcagggggcaagcttcccccacccaacccagggcaggtccagaattgctgtctttgagcaagggcccaggatcaggaactttaggaatctacctggcgctctattctactgtggctaagctggctccaaagccacaagacagtcattcctactcttccctcccctttcctcaagcaggggagactcttcccatggccaccactgccccaggcttgcagaaaatactgcttggctactactgatgttcacttaaggcccaagagctcctcagtcagcttatggtgaacactgttagatctgggtctctcccttcagggcagtggactcccctctggtccagggagccaaggcctggaattaggaaccctaagagcccacttggtgctctaccccactgtggccgagctgataaccaagtgcaagacaaagctccctttacactctgctctcctttttccaagcagaaagagtccctccccatagccgccacagctgggaatgtgctgggtctcacctgaagtcagcatgggactaggtctcatccaatgcctgcagcaaatactgcctggctaccactgatgtttattctaggtccaaggactctttggtcagcaggtgatgaatccttccggaactggattcttccctctaggcagtgggctcccttctgtcccagggtttgtctagaaatgtcatctgggagctagaacctggaatgggggcctcaggactctgcctggtgctctaacctactgtggctcagctggtatccaagtttcaagataaagtcctctttagtctcccctatccttcctcaagcagaagaaaggaatcagagctgagagccgtgctgcctggagttgggggaggggtaactcaagcactaccttgtcatcccagctggtgtctcactaggttgtgtgtaccccaagtctactggcaagtacagcactgggacttgccaaggaattgcagtccttgtggcctagactgcctttcaagtttatttaggaccccagaccactttagtccagagtggcgatgctttccagaacccagtcgctgggatgcatgattcccctctgactagggctggtctaaatgctccctccatggacacttgccgatttctgccctgctttactttccaccgtgaaaggcagcactgagttccaatgcaaagtcccgcagtcactgcaccctctctcccccaacatgcagattctttctctgggccatgtggctgccgctgcggaatagaggaggggtggtgttggcaattcaagacagtctttcctatcttcttcagtgcctctttcagtgatatgaagttaaaaccatgtactgtgatcactcacctgattttggggtcttatagatgctttcttttgtggatagttgttcaaatttggtgttcctacagtggggacaattgctggagggtgctatttggccatcttgcttcctgaagattatttgtagataccactagatctgccctcaagaaaggttaaacaattcatattgtcacaaaaatgtataagagtatggatttcactgtgtcctaaattgctttataaggctaaagtgattggattggatccacctgggccatgatacacacctgagctgtggaacttcagtccctgatacatgaatggtaaggcatttgatcaacccttgccattctcatctttgcttgaggcctgctcactttggtgtggtattggagctagcatgcaaagcagggcctacagcatgtagctgaggggtggaaccatctggaatgcctctgccactgttgtctttaatggctttcagatgtgaagaggatcacatgctctccagctgtttttatgttcactccaggagcattgtctcaaaatttccaaaatattctaaaatcgggggtatagctcagtggttgagcatttgactgcaaaatattctcaaatctaccagttctgcaccactatcatcatgagtggtaacaactaatgtctagtttttgtttaaggtgccataattaaaaggtatgtaaatgaaagaagttcctcaaccctcagagttgcacttctttattttaagaaatcagataggtattcttaggtctccacccttcagtcatgggaaactgcatttcagtaatgtttaagagctccttttcctcccaaaaatgatacaagagtggagatggccaaggagaggatgtaccctaactggaaatttcagtcgtcaccaaagtgcacattgtccaagacctatggtccatttgaatgcagttgcttctgttctctctgtggtaagcctgagctgaggatctttcattaagagtctccacacagtccttcacaatgctgcctccatcaacaatcttgccatctccagtgagtcacatgggagcagaactaggtccctacaatatttatttgaaagtaagtaggcttttgataaataatctcacttccatacatcttgaagtcttgggaaatcccactctctttcccacccacactgcctcctttaatccttggagctcctcctccttttggataatcattcaacatgcctcagtttacctagttttcataagtaaagacctgggtaggttttttttggtttttgtttttgagacggagtcttgctccgtcacccaggctggagtgcaatgatgtgatctaggctcactgcaacctccgcttcccgggatcaagcgattttcctgcctcagcctccccagcagttgggattataggtgtgtgcaccaccccacccatctaatttttgttttgtttgtttatttgttttgagtctcactctgttgcccaggctggagtgcagtggcgcgatctcggctgactgcaacctccgccctctgagttcaagcgactctcctgcctcagcctcctgagtagctgggattacaggcgcccgccaccacgcccgggctaattttgtgtatttttagtagaaacgaggtttcaccatgtcagccagcctggtctcgaactcctgacctcaggtgtctgcctgactcggcttcccaaagtgctgggattacaggcatgagccaccacatccagccaagacctgttttctttagagggagagaggaatagaaaaacgccttttcatttttactagatgtagtgaagacaaagtaaatgaaacctaaaaagaaacaaacaaaataccagaagtgttaagacactgtcttgttgattctgccctcaaaatatggccaaaatctctccacttttctccagctcctttgctgttacctagttcaagctgctatcatcctgatgttatccctttcctaattctggtaattctctatatctccttaaaccaatctctgaatccccatttgttcgcttctaacagattctccacagaatagccagtaggagattttattttattttttattgtttttgagacagactctcactctgttgtccatgctgaagtgcagtggcatgatcttggctcactgcaacttctgcctcctggattcaagcgatttttgtgcctcagtcacctgagtagctgggattacaggcatgcatctggctaatttttggtatttttagctgagacagggtcttgccatgttagccaggcagttctaaaactcctgacccgccttgaccccgcaaagggctgggattacaagcatgagccactgtgcctggcccaagagggagattttaaaaacacaaatcagattgtgtaacatcctcaaatagtaagatatacaataataaaatgtaaaattcttatcaagatttacaaggcctataagccttctagtgttattccctattgctcttctctaggttattgacatgactggttttgtttgtttttaaacttcctctaacccttttctagctcaggattagtctacccttttacctaaaatcttcttttcctgcctaccttctggtcatgcctcatgtcttagctaaatgtgatctcctcaaagaaggctttcattgattacataatctaaatgagtgaccctgctttagtttctcattatatttactgtcattcttagcattgccacaatatgtcattatctatgtgttgacgtgattattgactcaatatctgtttcccccactgaccacatatcaccagtgcctaatgaatagcagatgctaaagaaattaacaaatgaaaaagaaagatgtggaactttgaatggtttaagttctatttaggcagacacacacacacacatacacacacagagagtagttattgtgggttatagaccatctcactttcctaattcttatctcagacactgaataactagaggcccagccattgccacagaatttttccttcatattcttgttgactgccttacttgaaagcaattcaatccatgtgtaaggattccgtaagacagtctgtcatgagacaaaggcaaaaatcccttggttctatttttgctaccatctgtgtctttttaaactcctcctatatgtggaactttttcattgctttgtttgacttctgtaaatctgctaaatatgtttacaagcaactttcacaacccttctccaccatcactcccactttgatgtcctaccattttagaactggatagatatttaagatgctcttaactttgcagaaaacagaacaaccaagcctcagagaaatgaagtgatttgccgaaagctacgcaattgtgattactcaattgtagagaaatagggtagggtgcagtggtttgcgactgtaatcacagccctgtgggaagccactgtggaaggatcgcttgagcccatgagtttgaggccagccttggcgatatagtgagacacccatctctataaaaacataagaacattagctaagtgtaatggtgcatgctagtagtcccagctacctgggaggctgaggtgggaagatcctttaagctcaggaggttgaggctgcagtgagccaaaatcatgccactgcactccatcctgggtgacacagtgagaccctatctcaaaaaattaaaatttgaaaaatttgaaaaacaattgtagaggaatagaaaacaaggtgaacttctaagaccttggcctttataatttactcccaaattttctatcttaaaaaaagaagaagaaaaagaatcagggaacattctaaatctgagagtgctctaatttttcaaaagatgtttaaaaagtcaatttttaccatcattctaaagaaagcaaggaaataagacctaaaaatatttaaaactcaaatcatctgtataggagaattttggtatgttctaggcttccttgtgtttacttttcatactgctttctgtaatcaagtaagattaagtgaaaattacctgggccacaaaactgcaatgaaattattaaagcatttatttaaaatattttcagtcaggtgcagtgtatcatacctgtaatcccaacactttgggaggctgaggcaggaggatcacttgagcccaggaggccaaggctgcagtgagctatgatcatgccactgtcctcaaggctgggtgacagggccggagcctgtctctaataaaaataaaataaaataaaataaaataaaatgttattttatctttaatctgaacaattctaggatctggcatctttgatgtttccaatacaatcaatttcaaaatatatgctgaatttctactatgcaaaggagtgttgtttagacctcatatgagggccaggaaggtgagctaacatggagacaggctgtatgagtccactctcatgctgctaataaagacatacccaagactgggtgatttatgaaagaaagaggtttgattgactcacagttcagcatggctagggaggccctaggaaacttacaatcatggcagaaggggaagcaaacacatccttcttcacatggtggcagcaaggagaaaaataagagccaagtgaagcaggaagccccttataaaaccattggaccttgtgagaactcactatcacaagaatagcatgggggaaaccacccccgtgattccattacttcccactgggtccctcccatgacacctagggattatgggaactaaaattcaagatgagatttgggtggggacacagccaaatcatatcacaagcattaagaagctggtactcttattataatgggagaggcccacatagccaaaaaaatcactctgaaatctatcatggtgtcagcacaatttgaacacagactgctgtaaataaaagaggaatagtagtctttgaatttaatactagaaaaaagtattagaaaagaaaattaaattctacttcagttcttcacattggtgaggtagacagcttcaattggtctttaaaaatatagactgattttctataaattatttttttgaaagctagaaatactttagaaatatgtcatcccaatcagaaaaaagaaattctaaaggaaggtgagggagaagaacaaacaagtaaatgtgaaattgtctcaaagacatcaggttgggtactgaattaagtttttcttaaaatcaaattataaagacttccagcaatttcactgctggaaatttatactgtgaatatcttcctatgtgaagatatctattgtggttttccataatttacagaaactgaaaacaatgttatgtattcatcagaaaggactgctttatttaactgtgttcaacacatgtcatagagtactatgcactcctgaaaatgaattagggagatctatagataccaatatgggaggaggtctaaaaaatattactaagtaaaaggcaaggaaaataactatatagaaatataaatagaatcctatttgtgcaataacaagagtgtataaatgtactcctcataaagcatttctaggaggatactcgagaaactttttttttgagacagagtcttactctgttacccaggcttgagtgtggtggcacaatcacggctcactgcagactcaacctccctgggctcaggtaatcctcccacttcaaccttctgagtagctaggactacaggcatgcaccaccatgcccacctagtttttgcaattttctgtagagatggggttttgccatgtttccccggctagtgttaaattcgtgggctcaagtttctgcctgcctcggcttcccaaagtgctgggattacagacgtgagccaacatgcctggccaagaaactcttattgagcatatctttggaaaatgagactgggaaattacatgaaaagaaatttttattttataccctctgtgccttttgattattttaaaattatggagaggtattacttttgtattactttttgtttattaaattcctatactattatgcatatatcattttaaaactatagttcttttaagttaagtttacttgggcaaatgtcctaatttcttttctcactgtatatctttagtttctatattccagtgactttgttgtggactatgtgtttgcctcagattttcccatctctaataatgtcatgaactggcatttctgaactttcatttttactattggactctttaatcctgcttgttttaagaagcattttgcaagttacacgttaactaagatgcagtacctgatttaaaggggacatacaatgcaatgagagagacagaaactatttttacttcataaaatccagttttataaaaagctctgttaataacactgagggagtgtgagaacacaaaagaaagcttactaaatttggctggggaaagaatcaaggaagatttctaagaagttatgccaattaagataaatcttgaaaagatgaatcagctggtacaagtataatacattgccttcatagatcattttgcaagacttagaattagtgaaatttagacatagaagagaccttaaataatattaaatgtaacattctcatttttaaaatagagaaatgtgacttgttaaacaacatgagctgtggggtcaaattcaatggccaatacagagtagacacttaataaatatttgctcccttcagaactggccacataaattacagggcccagtggaaaatgaaatacaaggccccttgttcaaaagttattaagaatttcaagacagtcacaacagagtgttaaaacaagcataggcccctctgagcacagggccacattgaaataacccacagtcctggggttcatgaagcaggcctccctccctcctctaatctaagtttcaaggggtaagtagacacagaaactaaacaagaactcaggtctcctttggatacaaagacctcaaaattttaaaagctcataaacaatctgttcacccaatatttttaactgaggtgatatgaagatctcatatttatctttatataatagttaataaatttgtgcctttattcattcatgtcacaaatatgaataaatgtgtcccaagagcctaggacaaggctggttcataataagtattcagtgaagagtaggtgaaggatggatgaccagatgaatgagtgactaaacaataagctacaattgagtattattgcccataaaaagaaataaaattttgatacatgtaacaccatgaatgaaccttgaaaatattatgctaagtgaaaggagacagacacaagagatcacataacatataattacatttatatgaaatgtgtggaatagtcaagtctatagagacagaacatacattagtggttgctggggactgggaggagggaagagtaaggagtgactgctcatggatatgggtgttttgttttgttttgttttgttttggaatgatgacaatgttctggaataagatagcagtgatggttgcacaactttgtgaatgtaatcacaaatatcatcaaattctagactttataaagggtggatattatagtatatgaattctatctcaatttttagaatgtaaaacaataaattaaccaggatagaaagatttaagtaacttgctaaaaattgatttgtgttacttgtgatgattatgcatctaacatcaaaactttggctcctagttcaggctttctccagtctatcaagctactgcacagaaaactgcagagtgccaccagctatctctatggctccatggagcactgtgcttacatacaagaaacctctcttgtaccaaagtgtaaacacagtggtggctgcattctgcctccagaggatctggcctacagagtgaagaataaaggggagacagagcaaggggagagcactttccaagagcttcctcattttctctgtgttgtcctagacaccacccactagccttgtatctcaggtcttggttgagaaaccaaaataactaatgacactcctatgatgccttggcagcattccctgataacttagaatatttatttcctgttttcccaactctcatttatttccatgctagcatagagcaagatgacgtgtaacctcttgtgaaatgcttgatatttgtcccttagaagagacattagtactatacatttagcaaatagtaaaataacaacactcatagcttgttcttgtgagtaatatgtgaaagttttctaaactgtattttagttttaacttacattcgttacagcagagtgaggcaagcatcatgcattctctctcttttaaagaaaaagcactaaaacttccattttttcacttctagtttatgatcctctcttcttccttaccatgagaatcaataagggtgggtggtgtgaacacatgttttttgtcctgtcaggaaaagttaaaggttatggtcctgctcccaaatgatagataattaatcatctttaaaatggcaacctgtcactggaaaaggaaaagcagaaatataaaataaagcagatatatgatatcaggtagcaacaaggatgtcacagatttaatgagtataggggatgttgtacaaaaagttttatactaatctctagaaacaaaagaaaaagcagaaatgatctatatgttcatagtctatatggccatctctctaattttgaaatcagcagtcattccttggttggcatctgctacttgggagcagaggatggaagaacacagcaaacaaaagtttcatcgttaagctgtgaagcagagggaacaggcagctagccaaaacttatgtggttcttcaaatttctgatggggatcagagtgcctctccctcactgacaaatatggaatggaatgtaaggttgctactaacagggttctctgcaatcctgagattggttctgttctagccaaagctcttggattcctgtaaactccagtccagttgaaacttcccgggagaatgtgcccccaccaccccgtgcagaactcctggacatcttagtgacagccccacccccaccactagtcttcccagaattcgagctgtgagaacacatcaattcctgactcaggcatttgagtcaattttcagtgaactcaggatagtagaatggaacaccatctcacccaccagcaatccctggctagcacatgagtgggaggaaatcatgggctttgaaatcaaacaaactcaggttcttacattcactaattacactcagaaactgtgtattctttgtagaatttgaaagtgttaacctcattgagcgttacttccctcagctataaaaaatggatataacaatttttttctctgatgttgctttaaaacaaagtgagataaagaatgaaaatttccaatttacaaatatttcttaacaaagcgtagatttgttcctttctattccaaagctaatgacttcaggtgaaatggtatcttgagagtggggggcattctgaggaatcagtctcagaccaaattcatgtaatcagttgaaaacgtcctgtttgattagtccctttaaactctttatgtgcctttcctgtcctctaattcagtttctaaacttttgttcagtatcacatccctaaagaagcctttttagacattttttctgatcgtcctctcctccatgagatttaatgccacagagacaccattatgttgtttgtgaactgtatataggtatatctgtgctttatacattaaaatagtaagaaaatgttaaaccccccaagaaccaattttcaccctttggtggacaatattgttcctattgagaacacatggtctataaacaaacaaaaagttagaagaatctttgaagagataatcttttaaagcctgtgaaagaagacattattgaattcttctgaagaacagagtcttcccttcatcatctcttaactattagaggtagaaaactttggcgaagttttaacaatttcttgatttcctatgtttagccaatgatgttcaggtcaacctgttagaaataaagaaagaagcctcagatgcaaaaaagtaaatgatgatgctaggccccaacctactgatgtattgttttctacgcagagtataagatatactatctgcagcataagtacagtaataatggagctaaacctcaaaaaattagtcccacatcacttgactaataggtttctactttactccatgtggatgtccagattttgcccaattaaactttcatttcttatttaaaattacagctaatacttaccattgaaattttggggggaaaactttgctaaactgcagtgtttatttgactttttaaataactgtgatgctgaacagtaagaattaatttgcacacagggcttctaaaaagtgggccacttcttattttgagaaaaacttcaaaattatgtaataaatttcactgagaaataaaatattgacataaataacaatagaacaatatcaagtttttggtaaaataaaaagttattcatgtgaaaaataaaataatagaacaatactaggtgctggggaggatgtggagcaaccagaagtcttatacactgctagcaagaatgtagaatttgaaagtgtcaacctcagtcactttggagaacagtttgacaatttcttaacacgttaaacatacgtgtgccttgttacccaacaagtctactcctagatataggaatttacccaagagagatgaaacataagtccacaaaagacttgtacataaatgtttatagcagctttgttcattatagccaagaacaaattatgatatatccatacaagctaatactactcaacaataaaaaaaattactggggccgggcgctgtggctcaagcctgtaatcccagcactttgggaggctgaggcgggcagatcacgaggtcaggagctcgagaccatcctggctaacatggtgaaaccccgtctttactaaaaatacaaaaaaattagctgggcatggtggcgcatgcctgtagtcccagctactcgggaggctgaggcaggagaatggcacgaacctgggaggcggagcttgcagtgagccgagattgcgccgctgcactccagcctgggcgacagagcaacactccgtctcaaaaaaaaagaaaaaaaattactggataaatgcaacaacatggatgggtctcataaacagcaagcttagtgaaagaagccagacacaaaagtatacatactgtctgattccatttttatggaatgctagtaaagacaaatctaatctatagtgacagaaagcaggtcagtggtgcctggggccaggggtggtgagtgggagtgttgactgggaaggacacagggaaattttgggatgatggaaatgtttatatcttgattgtgatggtggttgcatagatgtatgcaaaaaaaaaaaaaagaagaagaaaaaagaaaagatacaagaagtcaagaaagaagccagtcacagaagactacattttgtattatataaaattccatttatatgaaatttctagaaaaggcaaaacaatagagacagagaattggtcaagagttatcaattggatacttaaatgggtacataaaaaaacaggtcaaaatgttgttaaagattcaacaattcaagttatctgctgtgaaaatgccataaagagttagtatctctagaatcattatagcagtcatcttctagtgcaagtcccagtaccatttttaacagccttattgaggaataatttgcatatcataaaattctcccattgtaagtgtacaattatagaatttttgatgactatatatgattatgcaaccagcaccacagtccagtttaaaacatacccatcacaccagaaagttccctcacacctgtggcagtcaatcccctctcccaccccagccaaccaccgaaccaattctctgtctctatagttttgccttttctagaaatttcatataaatggaattttatataatacaaaatgtagtcttctgtgactggcttctttcttgccttcttgaatcttttctttttttttcttcttttttttttcttttttttgagacggagtctcactctgtcacccaggctggagtgcagtggctcaatcttggctcactgcaacctctgcttcccgggttcaagcaattctcgtgccttcagcctctcaagtaactgggactataggcacgagccagcacacctggctaatttttgtatttttagtagagacagggtttcaccacactggccaggctggtcttgaactcctgacctcaggtgatccgcctgcctcggcctcccagagtgctgggattacaggcatgagccactgcacctagcccttctttttttttttaataactttttttttgaaatggggtttcactgtgttgtccaggctggtcttgaacttcttcctaggctcaagcacccttcctgccttggcctcctaaagtgctgggattacaagcataagccaccatgcccagcccctttttgttttcttaagatgaagaagttctagttatgggacttgtaagagacattagttgcaggtccagagcacacatttgccgattctcagtccaggacttagctgtgacaccatgctattgtcaggatacagtatactagatacaggatactagaataggaaaaaaataaacctggtttaggggatcagaatggctatttctagccatccaactcaacttatctgagattcaattttcccttatatacaatgaggataataatgtctaatgcatagctctgttgtgaggaataaattaagtgtacagagtaccaaacatagagacaggcaaacattaggaatttaataaatgataattgctgactagaaaatcacttaaagtacaaatgttcatcttgagacaaagaacataaagagggaaagtcataaatgttggaaactgaagattagggtttaaacattgacttatttaaatctcaaaagaagcatgaatccctgccaggcatagtggcacacacctgtaatcccagcaactctgggaagccaagttgggaggattgcttggggccaggagtttgcccaggaggcctgggccacataggaagaccccatctctacaaaaaaataaaaatttaaaaaaaatagccaggcgcgtgatttttttaatttacacgcctgtagtcctgtagtcccacttgtagtcctgactactcaggaagctgaggctgaaggattgctcaagcctaggaattcaaggctgcagtgagctatgatggacccactgcactacagcctgggcgacagagtgagaccctgtctcaaaaaaggagaagaagaaggagaaggagaagagaataaggagaaggaagaggaataggaagaggaggagaatgaatctcacagatttaagacagtgccagctaaattgggaattatttgctaaatgtagttaactgaacattgctttatttctttgataagaggaccattttataaataagctgggtgttttttttttttttttttgcctaattttatgagtgactcaatagttctcaggcctggctgcacattagagtcacctggggagtgttaaaaattaccaatgcctgggacccagcccagaaattctgatttcatcggtctggaaaggggctggggcattggtgattttaaagtttctcctggcaatattaatgtaaaaccattgtaaagaactcacagcagcattaacagtttgattctctgggtcttagggaatgtgttcaaaattgtggggtgaactgtctttagagtatgccactctgacatcttagaaagagacaaaccacagagactagctgtacccacccagatgttctatccacagatgatcttttcttatttttctacatggtgttgtatgtttgtgcaatcaaacataagggctttgcatgaatgacattagctatgtctgctcggaaaaaggaggttgcccttcacctccacatcctgtgctgccacttttcttttgagtcctcggtcagagctgggtgtttaaacatatattctgggtttttttttttttcatcttttattttggattcagagggtacacatgcaggtttgttacatgggtatactgcgtggtgctggggtctgggacatggatgatcctgtcactcaggtagtgcagaaagagtaaacatgtattcttaagcaatacatgtatatctcatgagtcacagcttcaagaagacaaatacaatctgcatggactggtgctctaattaaaaactctaaagactcaggaggcctggataagtctcctgccctctttggtcttcaaatatttaatttgtacaattaatggatttccttttataaccctaaggtattttccagttactatgattcactggttgtaattctcataactaatataataaagagcaaattctttatatagcatccatttagaactctactactagtactaaacaattcctaaaataagggtttatatctctgttaaagtcattagtacatacacataaataatatcttggtctttgactagtatatttatttaccaagaaatgcaatggcttaatctatactttccagaaggaactgactgctgtcatcgaggaggaatagtcacataaataaattattgttcttcacacatagtactcacaaaaccttagttaattgattattcaattatgatattgtgaaactgtaacatgacattaatcattacctggtgaaatgatcatgggcctttgtgtgatgctgcggcttcctgggaaactcactaatgtattcacataaaccagatgtgccagaagaaagctcttgctgtggaattgatggagagtttgtttaaagaaaggaaaacaactctaaatagtaaaataaatattttcttctgcctttgggtgaccttatgctcaacctcttcccttatgagaatgctgtctccaagcctgtggttctatggcatgtcagtaatctgaaaagtctatctgaagtccagcagtgggccactgcccagcctcacaagcctgatttcctcttcttttctccacaaacacccacatacttattagctccctcagttcttaaaatggattctttttatctaatgccaacttatcactgtatatcaggtctttgaccctgaaatatctttagtaagtttgcttttctttgttgctaaggcaaagcctggcagatttacctatcatcaagaagctctgatttgtggtggtgctaagtttggaagaaatatgaatcaatgaaataacttacctgaagtaagagtcactttaaattaagtttatcagcccagtcacttgtaaaggtttgaagacaatagtcatgatgtaataaaagagtatgcaaactcaagagtttagatacacctcaagcatataatagagtaacaaatttcagttatgcaagatgaagacgttctagagttctgttgtacaacctatagttaggaattctccctcctcagcctcccaagtagctgggactacaggcatgcatcactgcacccaggtaattttttaaaacttttttgtggagatgagctctcattatgttgtccaggctggtttaagagcgttagtgcatcatgttatggttaacaatcctaaggaaacaccagtagggcatcactctaacactgccatggagctatctgaaagaagctagaggctattaagccaaatgcaaggtgacacacacagaggccatacacactaaccacaacctgagagcacctgagataggaaatatgtgttccaggaaggggcctatctgggaccatattaccgtgtgttttcatgtccatttctgaaactaggcctactctgcatgactatcttaatctcctcaggctgccataacaaatactatagactgggcggcttaaacaacagaagtttatttctcacaattctggaagctggaaagttcaagctcagggtgccagcatgctcaatttccggtgggagccctcttcctggcttgcagacagcccccactttgttgtgtgctcacatgatctttccttggtgcatgtatgtgaagagagggctctgtctgtcgtctccttttaagaccactaatcctatcagattaggaccccattcttatgacctcatttaaccttaattacctcctaaaagttctctttaaatacagtcatattgagggttagggcttcaacatataaattttccaaggacgctattccgtccatagcaatgatatagcaacccacacagactatccctaaatgtagaaatcagtgttactcttcaaagcaacacatttttaaaaatatgtcttccaaatgccttatttttgacaacggaatcctttgtccaaaataaattttacaaagatcctcagtatataatataataaataaatacactggacagtaagtttgggaaatgtgtttgatctgtgtagggatgtacagttgtatctgcactaaactagctctgcaagaggatacagaagagatttcaaagagctgtcatcctaggtaaatggcccagatacatgctccatgaaccccctcagggaaacatctttgctattaaacaggataatctgtaagcagagccaaaaaggactttggatgcaagaagagaccaggggatgtctcatcctgagtcatcaggatatttctcaggaggatttaagtaactggtcttacagttaaagcctcctataaaaatgtactccatttagcatttaactaataaaaccaagtacctacaaaactagaagctttatcccattaaggaacctttcaggacttggtgtttgcatgaaacagaaagtaatcattgctataggagagtccaagtctcttcatgaaatcattttaaaaaatgtattctactgtggtcaggagaactcttgcattatgcatattttgctaccaattagtcttggtgaagaaatggcccagttttctcactggcaaattaaagggtagattaggccagtgagtgtcaagctttaatgtacaaaagaaatcgttaggcagtttatttattattaataatatgcaggtttttaacctgtaggccccacaaaaattttgattcacttgctctgtgacaagattcaggaatcttaattatttactggcaccctattgattgtgatacaggtaatcaatagattcctcactacacacacacatacacacacacgaaaaaatgaaatgatgatctttaaactctttctgtctttcagatactataattctgtttttaaggttcatataagcaaagcaggatattaggcctacattcctgacctatctgccaaagaattattaaaaacaaacatcttttgctcactctaagcacactggatgatgccattatgataaagtccaggagagagaaagagatgaaatcatgatgtctaaactatattcatttttgtgaccttcatcctatataagctgctttccaccttaactgtgcatgttcaaaacattgccccaaggtgagagaaaattgcttggaatgttccttcatcaacatctgctctctttcttctggccctgctatcaaccccgtctctgtgaaatctcagaacctgaattccagtatttagattaaagaaaaggggcttctctgctgtctcttatctctgattccatttccaaggccattaatatatttcaggcagacagatttttgttttacagactatttctttttctaggatgttcccagtcatttagaacatcatccatatatccaggccatctttctgtgatcaccatttgttttcagttgatacaaatggagtttaagacagtttccttgaaggcaggaatgctgtgtgtgaattgtgactctatgaaaagttacagtgaacacaaaagctaacactttgtaagaacagtactctgcaaggggaaatggagaggacagtataaacatatgatgtctgaattagcaaatgaaacataagtttatgtgatgatccaatggaaggaccaggtaactgaatgttttcatggagtttctcaactttggaaggaatcagtgaatgaggaggaattaatgacctcattgggagattttcagctggcttcttctacactatgagaccatctccaggcttaggatgagtttgcttagtatgatcatcctaggacagtccctttgctgcctggttttatcccaactgttcaaagcagcttcattaagattttttccctgagagaactcagattggagcttcatcaaataccactagcctttgactttctgcagagaaagttaatgaatatagcttggagccagacaaattaattttttacattttctgtttatttttaactcttgtttcaaaagggtagagagagtggagacataacaatcaagcttttacagccaaaatccaggggtgaggtcatgtggtcctagaaaggaagtgtggggaaaacattacaaacattggcaggatgcttcccccatagcattatcacattgctttgtgactggtatttaatagctatcctttctcagactagaagctccgctaaagaagagaccaaggcttcaataatcaaaatctagcagagtgctttagcacataatggtagtttgtagcatgtttaacttaaaagactccagctgaatggacacttcccattcaagtataaaaaaactgtaggaggagttgggcagatgttagtaaaaggatacaaagtttcagcttggggaaacaagttcaagagagctgttgtataatgtgattactatagttaataacaatgtattgtacttttgtatactacatatgacatttttatttgtccattaaaataaataaataaataaatccatgtacaatatattttggaggcttagatattttttttaaaagggaaaggatatttttagtatatttagtttccccctcttttggtctttagttaatccttaacatgtaaaataattgacaggtgaaatttttgtggcttaaggctaaagcaaacctaccagcctttgggcttttatgacaaattttccctcctatcagaataaatgtaatagtaaatgttataactgaaagtctaaaacagcgtgttacacaacattcaaaattatacaaatctttggaattcttagtggaaaaatgactaaaaggaaaggaaaatggaagagtgccaaaaattgctaataattataaaccaattggaaaaactacaaagtatatttaaggctgcaatctggttcagactttctcttctttgccaccagttcttgagctgagtgaagaagtaatgtatttggatgcatacaattcattgtgtgatatttaggccacttaattagagcaaacacatagttttatcaaaaaactggggatgcttttgtgagtgaaaaggggcactaaagaaggcctgtttcaaacaacccaagatatgtggttgctgtgctcttcatccacttaaggggcttctttttattctatgtcatttgttcaaaatgctcaatatttgctaagagggagatcttaattcaactcccacagtgtgccaggtagaggtgaacataagtctccttcaaatacccaattgcagctgagctgtaaggacatggtccaaaacagtgtattccaaaacgtgggatacaccactgtgatagttaatactgagtggattgaaggatacaaagtactgatcttgggtgtgtctgtgagggtgttgccaaaagagattaacatttgagtcaggctagggaaggcagacccacccttgatctgggtgggcacaatctaatcagctgccagtgcagctagaatataagcaggaaaaaaaaatgtgaaaaagaaagactaacagcctcccagcctacatctttctcccatgctggttgcttgctgctcttgaacatcagactccaggttcttcagttttgggactcggactggctctccttgctcctgaacttgaagacagcctattgtgagactttgtgatcatgtaagttaatacttaataaactctcctttatatatgagcagttcttaaaataagattggaaaacagattttcttattgtaccccatgatgttaagttttctacatagatgtctgcatggttcatgtagtgttattaacagaatacctgaaatgaagtatttatttaaaaaaaaaaaaaaagcagagaggtgggggttggcttatgattctagtggctggaaaatttgagactgggcatttgcatctggtgagggcttcaggctgtcctcatggcagaaagcaaaatggggagcttacaagcacaaagagagggaaacccgaggaacatcctggctttataacaacccactctctcagaaacaaatccatttttgagagaactagtccagtcttacaaaagtgataatatggtttggctgtgtccccacccaaatctcatcttgaattataacttccacagttcccacgtagtgtgggaggaacctggtgggaggtgattgaattatgggtgcgggtgtttcctgcgctgttcttgtgatagtgaatgagtctcacgagagctggtggttttaaaaatgggagtttctatgcacaagctctctctttgcctgctgccatccatgtaagatatgacgtgctcctccttgcctttcaccttccaccatgattgtgaggcctccccatccatgtggaactgtaagtccaataaaccactttctttggtaaattgcccagtctcaggtatgtctttgtcagcagcatgaaaatggactaatacagtatattggtaccagtagagtggggcactgctgagaagatacccagaaatatggaagtgagtttggaattgggtaacaggcagaagtggaacagtttggagggctcagaataagacaggaaaatgtgggaaagtttggaactccctagagacttactgaatgactttgacaaagtgctgataatgatatggataataaagtccaggctgaggtggtctcagatgaagatgaggaatttgttggaaactagagcaaagatgattcttgctttgttttagcaaagaggctggtgacattttgcaccttccctagagatttgtggaactttcaacttgagagagattatttagggtatctggccgaagaaatttctaagcagcaaagcattcaaggggtgacttgggtgctgttagaggcattcagttttataagggaagcagagcataaaagttcagaaaatttgcagcctgacaacactatagaaaagaaaatcccatttgctgaggagaaattcaagctggctgcagaaatgtacataattaatgaggagtcaaataatccccaagacaatggggacaatgtctccagggcatgtcgaggtctttacaacagcttcctggaggcctaggaggaaaaagcagttttgtgggttgggcccagggtcccatgctgtatgcagcctagggacttggtgcccagctgctccatatgtgcctgaaaggagccaacatagagcttgggccatggcttcagagggtgtaagccccaagccttagcagcttccacatggtgttgagcctgcgagtgaacagaaatcaagaattgaggctttagaacttccccctagatttcagaagatgtatgaaaacacttggatgcccatgcagaagtttgctgccagggtggggccctcatggagaacctccactagggcagtgcagaagggaaatttggggtcagagcccctacacagagtccctactgaggcactgcctagtggagctgtgagaagagggctaccatcctgcagaccccagaatggtagatccactgacagcttgaactgttcacctggaaaagccacagacactcaatgacagcccgtaaagggagctgggagggaggctgtaccctgcaaagccataggggcagagcttcccaagactatgggaacctacctcttgcatcagcgtgacctggatgtaagacatagagtgaaaggagattattttggagctttaagatttgactgccccactggattttggtcttgcatggggcctggagccctttgttttggcaaatttctcccatttggaatggctgtatttacctgatgcctgtactccccattatatctaggaagtaattaacttgcttttgaatttacaggctcataggcagaagggacttgccttgtctcagattagatgtcggactgtgaacttttgagttaatgctgaaatgagttaagactttgggggactgttgggaatgcatgattggttttgaaatgtgaggacatgagatttgagaggggccaacagtggaatgatatgacttggctgtgtccccaccaaaatctcatcttgaattgtaactcccacaatttccacatgttgtgggaacaacccagtgggaggtgattgaattatgggggtgagtctttcctgcagtgttctcatgataatgaatgagtctcacaagatctaatagtttcaaaagtgggagtttccctgcacaagctctctttttgcctgacaccatccatgcaagacatgacatgctcctccttgtctttcaccttccaccatgattgtgaggcctccccagccatgtggaactgtaagtccaataaacctatttcttttgtaaattacccagtctcaggcatgtctttatcagcaatgtgaaaacggactaatacaagcgattaccagaagaacagcaccgagctattcatgagggatccacccactagccaaacacctctcactatgccccacctcccaatactgcaactctggggatcaaatttcaacatgagctttggtgggaataaacaaacagtatccaaaccacagcaacatcttatgttgctttatgcacaagaagagaagtttatttaatgtttcttgcatataagacgtgaatgaggatccataccagctgacttaaaggtataaaggagaaagaataggattggcacagtgctggtctttatcatttcttagtaatagaagaaaatcattagaaaggtcactttctgaggatgtcacctttaaatcctttacactaccatctttttattctttacttttcaaattaaggcacaagaacaacttgtatcccttaaccaaaattattttcccatattttctagcattttgttagacctttccaaactcttatctcatagccaattgtacttaggaccgtggttccccaggtagacatagcccagcgtatgaaaataggctcagaatatctagagtgctggagaccatgacttctcagattctgtaaacacactaataataccacagtttagctgactgagttataagcatcaaatcagactgagcagaaatgaaagtgagttttgtttactttactggcaatatgtctcttgtgggagaagataggctggtaatattaatatattattgaaattaataagtacaagacaagctaacatttgtagctcatttggcctttatttgttctttgatgagctatggtgccttattttattcgtttatgcttttctcatttttgttcactaatgttcatctctgagattgatctcttgtgaaaaaaggcctttgatataaggttatagtttctattaaatgtaagctgactcatagggataggttttgagaagccagtcttgcttaaaaagaaattttttaaaaaactggtgtgtgtgtgtgtgtgtgtgtgtgtgtgtgtctgcatgtgttactatttagtaaagtatcaaagagaaatgtagtggccttggaaatggagagatgatagaccttgtttgagatgaaggaagtggaatcctcttagaagccatgtatttaataaatggtacaacctatctaaactcagcacaaatatgttcacaaaattggtcacatttttgttacttacttgaccctcttccctaacatgggctattagtactaagcccagtttctgcctttggtacaaagtctcaaatcttctacttaactgtattgttcaagaactctaggaactgacttttttcccagtaggctagtcctgcttccactctctaagttaagagtctgattggatgactagtgccatatttccacaatgccatacactgtcacagctgaagatgggtcttacaaattctaaaagctctttgcagtcatggccttgctagctagagccttactagcaccagagtgaaagacaaaaatagggctttaaaatttcagctctcttatgccattttccacaaggctgacaccagtccagatctgctgaattctaaaaaaattctgccattggctccatgctgggccataataatcactgaaccccttgaaccttggtcactatactagatgcctcctctcctcaaggttggtttcattccatgagttttgttacttttcccttccaatgcaccttccaaatttcatgtccacctgtcctagtcaatttaggctgccaaaacaaaatgtcatcaattgggtggcttaaacaacagaaatgcattttctcacagttttggagcctagaaatccgagattagaatgccagcatggtcaggatctggtaaggacactcttcctggcttgtagatggctgccttctcactgtgttctcatattcagagagaatgtgtgtgcaagttctcaggtgtctattcttatgagggcactcttttcatcatgaggtctaccattgtggcttcatttaaacctacttatctcccaaatgcccatctctgactgggggttagggcttccacgtataaatggggtggggggtggctgtggggcaaaattcagtccatagcaccatcctagtttacaacgacaaatcttcgagacttcaaacatgtagaattgtaaccaatattttgtcaagggaatccataaaaagccaaggtagataacccatctgaattcaatgccacttagtctttttcaagtctaatcatctgaaatagaagacctttctgcatctttaattcatggcaaagccagagatatctgactacactgattacttcccacctgggggacaatgagtacaggagagcttcatttcaagttctaggcattcttcttttctttttgagagaatttgtacaacagagaattttgagaagctggataaaatgcccaaaaaaccaaagtgggtgtcctagaaatatcatgagtacattctctatggatatactatgcttcctctcagaaaacaaacccactattatctcaaccccagtgtcgtttgtccttcagaagataccttgcttatttgtcctttagaatatacaatgacttattctaattttcttttatctgtttaccccaaagacaaacaaataccaatggaatctgagagtttaattgtcaagatgcatccacatttatcaaataaattactgagtttgaaaccaaacaaggttgacaagtcctcatttagtaaccgcatctggcatggtatgaaatgtcttgcaggctttcgtggtaatgaagctttgaagaaaagtagtgttcacataggaagtctaaccaaaaggaaacttggattaaggtcaaaccatccttgccctagtggcttgaggttgttcctctttgtttttcttgagctctctagagagggtctgaccatattcttccgcccctaactaccacatgtagaatcacagcattggcaggggacttggtggtcagctaatctaaacctttatttgagtcacaaattcctccactgttgtaatgattgacagagatggtctagagtacaaatgaatgtctgcatactctgagtcgaaatagttcaaagttaaaaacgaagttaaaatggttaaagaaatgtttttttcttccaaaattgattttaaaaaataccttgataacctcttggaaaacaaaattgaagtttagaattctcagaccccttggcattctactctagtggaactatatactatagtggaaacactatagtgatgcaaggaaagctagtcctggctcagactgaaagtcctctcttttcaatctcttttgtgatccattctacactatatttactgtgtctcatatgtgttgtgtctcacactagcccacaactataagttcaatccacataacttacaaccagtggccccatggccacctctcagatctaaatgtatgtacctttgagagagcagatcttcacaggccctgaacaaggaagttgggcatggaatttccagacctggattctccagtttgtggtcaagaaggaggaggaagaagaggagtaaagcaaagaagatagggccagaggggcatggccggaatgaggctctataaatgtgagaactatggcacatatcccgttgcccaagtataaggacagtactatagtttatcaacaccaggagttgtcaggatattaacacacttcagaattaaaatagcagcatatcactagaacaaattccagagtcaagcaagattttgccttcagacttcagcagccaaaatgtgctagttgggagagtgcaattccagaaccgaggtttagttccaagagcccctgaagttctcctctcctggagacttcaggaaaagtctccttttaggtcttatgtgggttccatgtcagggtccccagtgattctgagtatccagtgtaagtcttagctgaatcgggcctgctttcagcaactgtcccaagatgaaacccaaagaaatatatgtcccactgccatgatagattttgaatgtcttttctggtcagaccaggctcattgttcttctaagacccaagacactgcgccagagagcctaaatccatgctgtggagaatatgtgatgcgtctgtattagtcaaggttccccagagaaacacaaccaatggatgagagacagaagtgggagagacagacagagagagatttattttaaggaattgactcacatgattatggagactagcaaattcaaaatctggagggtaggtcagcagtctggagaccagggaaggtttgatgctgtagctcgaggccaaaggtagtatgctgatagaattttttctttttgaagggaaattagtcttttttctcttaaggcctccaactgatgggatgaggcccatccacaatatggaggtaaactgctttatttaaaggttgctcatttaaatattaatcttaaaaaaataccttcacagccacattagactagcatttgaccaaatatctgggtaccatgatgtagtcaaggtgacacacaaaattaaccatcaccagctccatgacagctaatttgttcttgaacacaacagcaggtgatgctactaaaaataagacgttgtttgccacgtgctattacattttgtaaagttctatttgaacatgttcctcttactacctacccaggaaaataccagtaacctaggggaggcccagcaggctctaatggtctaatggtctgaaacttcaggctttattttcattccaggctgctggcaggcaaaaatgtttagtattgaaaagatatataacctctgtggggtagcagctttactaggcatgaccacatttctacaggaagagtttgaatttcagttttcaggaaaccctatatttggcaaatttgggtgatatgtcaagccccataaataaaagcaggccaggttatatataattatactgattacctttccagtccactttttgatgccagaacctgaggtagtatatttaggtattagtttctcacatgttgctctcctctatttccttcatactttgcatcagaaaaaaaaaatgtttctttctctctgtctctctatctttatgtatgtgtgtgtgtgtgtgtgtgtgtatatatatatatataatggtacactgaaaacaacttgttctgccaatattcgaacaactgttttccttgtgaaaatgaaaggcaggtgtagaagagatacctcttagactcctctcaattccaaaaatgtcaaggaaagtcaggaactttcagtgaacatataaagtagcctcaactgtcagaattgaaaatctccttgagcagtctttagaccaccacacatttctagtatttgcttgccccatcttaaaggatgggaattttctgtattacagtgaaaattcaatgtctaaaatcaaaatcagatacagcacctttcctatgagctctggtaaacattggcaagttgcagaagataaagcctgacgtcaaaggaaattaagctaacaacgtgagctcttctcttattccaatcttacctccttggtccaaattccctgcttgggaccaataccaaaagccaccagaacttttctttcctttatttactgatcacatactatataattaatacagctctataaatcatgaaagtccttgtcttggaagaactctctgtttagccctcggaaaaaaaaatatgcacataattataacatgtctggttaagtaacagatttatgcagcaatagcatggggacaaaggaagggcattggaggcactaggcaacatgctttcctggaaggagcttcagtgatgatgtctgtatcacatggtcaaaggagcagcagcagtgccattagcagcacatagtaccaccaaggtgatgctggagtactcaaccaggacagcttccaagtggttgcaagccaggaggcctaagggaccaggaggaagtgggagttgggaaataccttgatcatctcctccattttgagccaaagttcttgacttaatggagctgcaatttcaacagttccccctaatgagagctgggatgtggaataggtgttcaataatttgcatataccccaagctagcatgcctgagaaaatacttattctgttattttcagagacttccagataataccccatttcaatgaattcaacttagaagtttcaaaaaagttgcaccatatcgtagtgcttgaaggaaggtatttatcactgaattgtagattcatatttgtagatgacaagtttttaaggaaaacaatgcccctaatcactgatctcaagagtcctcttagaatagtcagtgggtcaacggagtggaatctgcatgacattcctctcactagcccttaggtttctacactgaccaaatagtttaccagactttcacaaacctagcaaagtcttatctattcacatctacatatagataaattcacagcaaacttaaatgacagacaattgtacaatcacgatcagtatgtgttaactttttttgatctttcaaataacttggtcattatataatgaagaaatgtatgctgggttcacataccactgagagctataaagaaaatatgtcttgttttccctgtgactggcctgacgttcctcaccagcccccttgcctgcatagcactgcagtatgtgtgtatgtgtgaggagatggtggagggggtacagacctagtttaatccactagtcgtatctgtctctttaggtaacttagtttcatctgggattactcataaaaagtttcagagcctcctttcctctattaagagtgagcaagaagttctgacacaaaatgtgcttaagagcagggcagtcagtcacaggattattgctctattacttctctgtctgcagataacttgaaaccatcctctctccttgctttgaaaagcaataaaattcttagccataccctctgatcttccaacccacttgctggtcggttcttttctctctgtcttctccctataaacaggttttttatctgcctcatttggtagcttcgactgccaaatcttactccgtatgaatttcacagtggttttcttccttactgcataggcctactcctcccaggaactctggagtggctgttaatggtggcctaaagcatccattttcctttcttcctttccaacagaatggaagatatccacccctttctggccaggtatctacttctttctgactcagcccacaacctcaatagcctgactagccaaagagttatctaataacttttcccactgttggttctggagtgaacgtgtgacccaaatcaactaaaggtctccagaggaaacgtttccttatgcttgagggacctttcaggaagcaagtctttcctacaccagaagtggaagtaaaagcatgtagccctgattgcagctggcagctgtgggaaactgtcctcagaatgaagcctgtgttcagcagaacctagagctgaaaagcatctgagtccatgaacctgaagcccagtgaatctatgatgtatagttacacgagtcgatggttttcaacatggcttaagctaatttgacaaacttgtggctgaaagtattctaacagacgcaaacttcgttggacattttaaagtatgtactctgtggaaaagcaactgataattgccttttttagttataggtgcatgaataattcactctgcctgagtgttcttgaaaaatgtggaaaaattgttccttatatatccacttgtagaccctttacctttctatattatctcttaatggcctcatctgctcacgtaaataacttaaaatttaatctctacatttaaaggaagactatttcatggtaaacccctgagaagaaatttttgtgcttttagcatgctcaccatttacaggtaagaagacaaaaatactgagaagaaaaagatttgctcaaacctacaaatttccataatctaggtaattgtcacaagtacaaatcactgtaggacaattgagcaaacatacaaaaggttgtgactttgacaagctggatccagattcttaactttgccagtacaattctactttggtgatatatgaagattattacactatcaaaaagagaggtccttggggagactgtaagctattagtttcaaaagattctcatcttcttgaagacagatgtaggaaaatcatattgaccatgcttacagtagagtaaaaaaaatagccattctacattgaaggaacatacaaatcacatttcctcttttgtgtgacgtaatctccctctgttacccaggctggggtgcagtagcaccatctcggctcatgggagcctctgcctgatgggttcaagctgttctcgtgcctcagcctcctgagtagctgggattacaggcgtgcaccaccatgtctggctaaattttgtatttttagtagagacaagattctgccatgttggccagactggtttcaaactcctggactcaagtgatctgcccaccttggcctcccaaagtgctgggattgccggggtgagccacctcaccatgcctgcccacacttcctcttttaaataaccctttaagtgctgcatctttatgaaggtttttttaatttgaatcttcttaatttttggctcacaaacctttataagagagctagaaaagaaaaataaggttgaaataaaatcaattggttgttctgtggttattttaagaagtgtaatttaagtttcatttaagaaagttttctgtaataaaatttggattattttatttttgtcatttttccttattacatttattattattaatattattattaggccgagcatggtggctcatgcttgtaatgccagcactttgagaggctgaagtgggaggatcacctgaggtcaggagttcgagacccacctggccaacatggtgaaaccccatctctactaaaaataaaaataaaaagaattagctaggcatggtggcacgtgtttgtattctcagctactagggaggctgaggcaggagaattgcttgaatctgagagatggaggttgcagtgagccaagagcatgccactgcactccagcctgggcaacagagcaaggctttgtctcaagaaaaaaaaaatttaattcaaatataattttaaataagaccttgaaaatataccaatcaagtaaaattgcttcaatagggtatttgctgggggatttccaattattcaaggggataaagctggcacattggtgagaagaccacccacatactctttacatctagaaagtgtagttttcttaggtacgtgggcaatcctaaacacttgtgccagatttcctttccttgccaaagcactgaagaatcttggcagctaaacaaagaattgaaccctacattttctatcaggtaagtagagttctggctagatgaaagcatgataacagtaaaacaaagaggaaatccttaatacccaacagtaatgccgcagttttgctccacggccagggtaggaatgcaggatctttggcaattctgccaggggaggtgtagtcatgtggtggtggcgtgggagtgggtgcagggagtggtttgatcagctgaaccagagccgtctgagagaaggttctatggctctcttcttctgggagcagcctgcctctaggaggctgctcattatttaggatgagtagtaagggagaaattactgcctctgctgatgatgatgatggaaatgacgtgatgatttagaaaaagaaaatgatgatggccgacatttattgagttcttgctatgaactgcagttaaacgcaaatgctttttgtgcattagctcatgtcacaatgtccaagagaaaaaaggaaaggaaaaacaaacaaaaaacagaggtgctactaagtcacttccttataatttctcacctagaacaacctgcaaactagtctctttaggcttgtcctgttcaaattgatcctccaacctatcaaactgacttatttaagacagaaatgtgaccacatccttcctctaaccttttaaccagctgtctgttgcctaccaggcaaaatccagggcccttagtatggcttttaaggagagcctttcagaactgagctcctactgcctctgcagcctaagctcttaccacacccgactaccttctggccaaatcccactctgttatgactcggttaaggaaagaccaggccgggcgcggtagctcacgcctgtaatcccagcactttgggaggcccaggtgggcggatcacgaggtcaggagatagataccatcctagctaacacggtgaaaccccatctctactaaaaatacaaaaaattagccgggtgttgtggcaggcgcctgtagtcccagctactcgggaggctgaggcggagaatggcgtcaacccgggaggcggagcttgcagtgagccgagattggagattgtgccattgcacgccggcctgagcgacagagcgagacgagaatccgtctcaaaaaaaaaaaaaaaaaaaaaaaaaggaaagaccaaaaactgagcaactcggttcagactgtttcttcctgggaagcttcatgctcacccacttgttcaactgcattataaatatgctacactgtgagcttctgtaggtagagtctcagggcttactagagtgcttggcacagtctaagggctcagtacatatttccaaatgaaaacaatgaaaagatagacatggaagtctggcagaaggagataaaaatgtcaccttcattactataaagctgacaaaggagggtatagcttacgtgcagtgcaacagaggacttcctaaaactgcattccaaaattaggtagactaacagctattcacagtgcacctccccataggggcctgcctctgtaaaccagaccacaaaggagctcagccactgtagctcctgaggtcagctagctctcaactacacagaaccagtgtatttcccaaatgctcccatggaagagtttccccttctcttctggggcagagtgaaccaactgggagagaaaggccaagagagttatagcaactgaagtccaactgctttgtaaacacagaggcagctgaagttgccctgccccagccccaatatcctcctgtgcactgattgatttagatgctggtaatgcttcctaccagtgacagggaacttccagtctatctgtcaatggatcatcttttgatttcccctatctaatttcccctgctcaggtaatctatgaacacatattgaatgacatacttaataaacattttatgaatatttttaaatagttttggcttttaaaagactgtggccaggcacagtggttcacgcctgtaatcccagcactttgggaggttgaggctggcggatcgtttgagcccaggagttcgagaccagactgacaacacagggagaccctgtctctacaaaaattagccgggtgtggtggtgtgcactggtagttccagttgctcaggaggtgaatgtggaagaatcatttgagcctggaggcagaggatgcagtgactagccaagattgcgccacagcactccagcctgggcgacagagtgagatctgtctcaaaaacaaaatgaacaaacaaacaaacaaacaaaaaagattataccttccacttgactcagtcaatttaatgaaacctagaaaacatctattgagtccctgccaaatgccacacactgtgtagtataaatatgaagacatcacagtggtcctctggtattagccaaccagccaaacctactggatcttttctcttagaggaaagggaatatagacgcttgttagatcaaaaggaacacatataaatgttgacaatgttttttctaatttccaaatgtttttctgagtagctaagtgactgttcacccagagttttagacatttcccttctcctattgacagcattaattagagccaacacactaaaattctaaaaagtcatggaaacctctgaagggccatttatcttcccacatctctcccacattgccccatctcgcaaaggcatgcaattactaaagagaagaactgggtgaaagagttggatggattgttcaaatccatcactatgactgaaaaacaactcaaactagccaatggattgtttctcctccctaaaggaaggtatcatgctcactcaactctcccatcctggattcctggttcttccattattcttttgtttaaaaaaaaaaaaaaagtcctaacatctgatatttctttttctttttctttttctttttttttggtttttttttttttttgagattgagtcttgctattaccaggctggagtacagtggtatgatctcagctcactgcaacctctgcctcctgggttcaagcgattctccttcctcagccttctgagtagctgggattacaggcacatgccaccacgcccagctaatttttgtagttttagtagagacggggtttcaccatgttggtcagggtggtctcgaactcctgacctggtgatccgcccgccttggcctcccaaagtgctgggattataggcatgagccaccgcgcccgaccaacatctgatatttctaagaattctattttgtatattatttaactaggttctagaagaccacccacagtttttcactagatcctaaactcacaatacttttttttgttttttttatttcatatcaccttacattttcttatcaccaaactgacagaactattcaaaacacacacacacacacacacacacacacacacacacacacacacagcaaaaccaagaattcctaaaagatttagattcagagtctactctcaatttcaacttcttagccaagccactaaagagaaatttgtaattttgtttctcctatccactcaccaactatagtaaatgatgcatataaagctactaaaatttggagcaggcctccactttctctgcattgttcctgactgccagcaaaacagcttttactctttcctcctacttcgaggcctctatcagattagtggtggcagcataaagtaatttctaaaggtacttccattttcactttgcaattgcttggaagcatatattgcttaataagcagggaaactgaggctggtatttctgcttagaaagaaacgagactgacaaaattaaagcaatctaaaattctttatcttacatgcgacatttttctgttaatttatgagatatcatatggcttgataacagtgatttaaaaaaaagaatatatgtggcttcatgggtatgtataaatcttttgttctgaaataccatgaataaggaacatggcaaaaaaaaaaaaaaaaaaagggccgggcgcggtggctcacgcctgtaatcccagcactttgggaggccgaggcgggcggatcacgaggtcaggagatcgagaccatcccggctaaaacggtgaaaccccgtctctactaaaaatacaaaaaattagccgggcgtagtggcgggcgcctgtagtcccagctacttgggaggctgaggcaggagaatggcgtgaacccgggaggcggagcttgcagtgagccgagatcccgccactgcactccagcctgggcgacagagcgagactccgtctcaaaaaaaaaaaaaaaaaaaaaaaaggcagcacatcccagagtctaagcatatcattgtcagcatgaggggcggtgggatcttaggggactcattatatttccacattttattttctagaaagaaagaaaagaaggaaagaaagaaagagaaagaaagaaagaaagaaagaaagaaagaaagaaagaaagaaagaaagaaagaaagaaagaaagaaagaaagaaaggaaggaaggaagaaagagaaaagagagagatagagagaaaagaaggaagaaagaaaggcatgagccatgacactttttaaaaatccctacctatacttaatcagaatctacaggagatacgataaataaaagaaaattgtagatagtagaatcataaatattttagggacttctgcaaatcactttgcatatgcattttttaaaatctcaaatgtattatttatacttatacaatatgcattaaatattgaaaaggatttcgaaagagactttcacgtattaaaaaaattcatcattgggctttgaagataatgtttatttaataaaaacatccaagtgtttctttgcccaaagcattttaaagtaatgaagagaaagtgggtcttcccatgagcacatttgtagggacagtaggggggagtttgcaaaaattttcttacagtcatcaatttaaacccatctggagaagcaatcagtaattctataataaaacactggctctacaacataccactataataccccatgtgggatccatttttataatgtgcttaccctatatttaatatgtctcaatacatagtattgttcaagaccaagtttgaatacctgctaatttcacatgagaagaggcagacagggatatctatctgtatctatctaaacagatagataatatagattatagttataggtatgggtgatatagatacgaatgcagtgcagatatagatacataccaacttaaaaatgtaaataagtttaaggtgggaataggcaaattaataaagattagtttcacaagtaggatgttgtagtaccttctgcctctcctattatgttgaatccagggtaaattattggtcagtcagacagatgtcctaagctggcctttagggtgaacaaggctgtgtcagagagagttactccctccaatcctaggacccagcagcagtaaaaatgatctgtggtgctgcttcccatgacactggctcatgagttttgcctttgaccctccagtcttagctgcaagctctattcatatcaaccacatcttctctgagccctacaagaaccacaacctggaaagcctgcccagatacacccttgactgctgccagcaactaccacaactctaaccacaatccaaccctttggtacagcaccacttcataccaaatacaagttaatctacatctctttttctttttacaagttaatctatatctaatcagtttctttcccctgaatccaacaatcttttcaactttactgcttctgttaatggcattgtttgctttaatggtatgaaatttgcaaatataatatgttcttattttttaaaaaaacaaaaaacaaaaaaacaaaaagataaattgtaccaattaatcaaagtaaatcttgtaagaccactccattcccacatccttccatccccattccccagaggaaaacagcattaatcttagtgttgttattttccgacacttaggctttttcccgctgttaacaaaaatcatatggcattatatatatataatgccattatatatgtaatattatatattatctctatatatatagatacatatcaacttaaaaatgtaaataatgccattatacatataatatatataatagaattatacatataatatatataatagaattatacatataatatatataatagaattatacatataatatatataatagaattatacatataatatatataatagaattatacatataatatatataatagaattatacatataatatatataatagaattatacatataatatatataatagaattatacatataatatataatagaattatacatataatatatataatagaattatacatataatatatataatagaattatacatataatatatataatagaattatacatataatatatataatagaattatacatataatatatataatagaattatacatataatatatataatagaattatacatataatatatataatagaattatacatataatatatataatagaattatacatataatatatataatagaattatacatataatatatataatagaattatacatataatatatataatagaattatacatataatatatataatagaattatacatataatatatataatagaattatacatataatatatataatagaattatacatataatatatataatagaattatacatataatatatataatagaattatacatataatatatataatagaattatacatataatatatataatagaattatacatataatatatataatagaattatacatataatatatataatagaattatacatataatatatataatagaattatacatataatatatataatagaattatacatataatatatataatagaattatacatataatatatataatagaattatacatataatatatataatagaattatacatataatatatataatagaattatacatataatatatataatagaattatacatataatatatataatagaattatatatataatatatataatagaattatatatataatatatataatagaattatatatataatatatataatagaattatatatataatatatataatagaattatatatataatatatataatagaattatatatataatatataatagaattatatatataatatatataatagaattatatatataatatatataatagaattatatatataatatatataatagaattatatatataatatatgtaatagaattatatataatatatgtaatagaattatatatataatatatgtaatagaattatatatataatatatgtaatggaattatatatataatatatgtaatggaattatatatataatatatgtaatagaattatatataatatatgtaatagaattatatatataatatatgtaatagaattatatataatatatgtaatagaattatatatactatatatgtaatagaattatatatattatatatgtaatagaattatatatatattatatgtaatagaattatatatattatatatgtaatagaattatatatattatatatgtaatagaattatatatgtaatagaattatatatatattatgtatataatagaattatatatataattctattatatacataatatatataattctattatatacataatatatataattctattatatatataatggcattatatataatatatatatcagatgactatatatatagtcatctgatttttatatatatgtgtgtatatatatacacacatatagctttacaacttgctcttttcacttacaacttatcattcaggtcagtttatctagatttacctcattttcatatcatttgattgtatgaacatatagtagtctacttaaccatgaccttactgatggtattatagtttctcaacactgtgttatcacaaacaaggatgcagtaaatatctctgacatataactttaagtactcttgccctcatttctttataagacaaatttttagaagtgaaattgttgaatcataggggatcctttaataaatgctgccaaattattgagaccaattttggacttgcttttcttattttaactttttccttggtagactcaaacccagccaatcaaagactatggaaatttcctttgtaatatcatcctgcaatttattcctgacctgatatccccttggctatatttttaagtcttttttagaccctaacattcttggacactgactttagcttcggaactggtttttatatatcctttctacacattattgccatagtaatcttctcaaaccttgccttatgcatatcacacctttgtaattttccatgagtccctaatgcctaaaaaaggaaccttaactatgcttcaagatccctcacaatcaggctacaatccttctcattttgtcccaaaatttaagagagaatgagagagagatttaccatgagcctctcattcttaggcacttgcacatgccttaaatatttaatccttatatcagtttcagagtttaatgatatttttattaccataaaaatatagaaactgatggattggggaagaaacttgcttcccatcacacagctgtagcatctagagctgtggtttgtgtagtatatctgactgctaaggtcatgtacttaactatcaagccatatttcaactcaatttagcaaatatttattcaacatatactacatgcaaagtactttattaagtgttacagagatttaaaaatgtgaaacggatggcacacaattgacacttaataatggtgcctgcttccccagcagcagctccttccaggtagctatactttatgccatgtgactctgcctctgtcaatagctggtgaaaataatggtaggcacctgttcccactgtcgattgcagtgtaacagacaccccaaaactcagcggcttaaaacaatgacagtatttatgctgctccaactctgcaatttagctaaggttcagagagaacatcttgtctctgcttcactcagcatcagctggggacacgaaaaggataggactaggaatcatctgaaatcttactcacttgtctggaggttggtgcttgctgtcagctgggtcctcagcaggagctgtcaccaggaacaccttacatagtgaccccatgtagtctttcctcttcctcacgactcagggcctaggttccaagggctagcttctccgaagggccaggaagaagttgtctgccttttagagcttagccttgaaaagcacatagcatagcatcacttccactagtatttacaggcccatccagatccaaggggagaaatgtagaccccacctcatgatggagggctgccaatgtcacatggtggcatgagcatgtaagccagtggggccatttttgtaatacaatctgccacagcacctacagacatgccaatgtcctttcagagaaagataatccaacaaccaaattctttttcaatgatatgacttaagaacaacttacagaataaaacagctgctggagactaatctgaaaggacaaaatgcagaaagagaagaaagtggccatgatgaagcatgtgttcactgaagttatgagccaaacggaagtcaggaataagaagccctgttcacctttaagtccccaacagagcacagtgccaaatgcatggtaagtgctcacagttgtcatatgaagaaattcatgaatgctggaaagagggaaaacaaaaggaagggtaagtttggaaagggaagatgagattctacagagatatgttaagtttgagaatccagttctagctcctcactgacgtgtctaacaagcagttagggatgtagatctgtagctcagaagagagagcaagcattagggacagggcttaggaagccatgaacaagggaagctttggctttgaataagattaccaaagaatctcgtattagtccattttcacatgctataaagaaccaccggagtctgggcaatttataaaggaaaaagatttaattgacttacagttccacatggctgaggaggcctcagggaccttacaattgtggcaaaaagtgaaggggaagcaaggcacatcttacatggtgacaggaggtgagggggactgccaaaaacttttaaaccatcagacctcatgaaaacttactatcaggagaacagcaagagtggaccaccccgatgatccaatcatctcccaccaggtccctcccttgacacatggggatgacaattcgagatgagatttgggtgggacacagagccaaaccatatcaaatctacattattcaggtggaataatgaagtggttaacattatagactttgaatctgagaacctggatttagtgtctgtaatacctgcttcaccacttactgtgagttttcttaggtttagttgtttaatatctctgtacctcagtatcctgttataacattgttatagtaatgaaactacctcagagggctgtgtattaaggggtataatgcctgcaaagtgcttagaacacagtctgcatagagtaagaaatcagtgcacatttgttaccataactgttatcggtttttaaaaaatatctaaagtttaggaatgaacagaggaagagccagagaatactaggcaggaagttcttacgcaaccttgtacaatattccttataaaagtttgaagttacattcattcctgagttgcctaacatcaaacagttgatctattaataaagagggggtggcatggagaagagtgtgttctatatcaatctctctcaaagtcgtgctctttggggtgcatagtaatttctgttgtgtcaaaaaaagtgtgtgctgtactcaaataaatctgagaaatgctggattacacaaaattaagtagatgtttcctcagaccctatactaaatgcatatactaatatgtcccatggcttgctaaggaggggctatagaatgcatcatttccaaaactccttagtttttttatgggatcattctgttaaactgacattctgtgggacacaatttctcaaagctaatcaaggttagtattaagcttactacagaagactttctttggaaacttcttacaaatacatattactgaacctggccgggcacggtggttcacacctgtaatttcaggactgtggaaggccaaggcaggaggataacttgaagccaggagtttgagaccagcctggtcaacatggcaaaatctcttctctactacaaatacaaaaattagccaggcatagtgatgcacgcctgtaatctcagctactcgggaactgcagcatgagaatcacttgaacccgggaggtggaggttgcagtaagctgagatcgtcccaccgcactccagcctgggtgacagagggagactctgtctcaaaaataacaacaacaacaacaacaacaacaaacacacattactgaacctaccaacacagattctgattcagaaagtctagagtgcgggtaaggtacctgtaattttatttttatttatgtatttgtttgcatgtttgttttagagacaggttctcgctatgttgcccaggcttgtcgcaaactcctgggctcaagcagtcttcccgcctttatctcctgatcggctgggactataggcacctgccaccactcctacccaggaacctgtatgtttaaaaagttcctcagtacgctcttgcctctggcaacctagaagaggaatttgaccctgcccacaatccctctttccctttccaaactgttctcagaaaagcagctctacaagaatgatagcaaatccaataatgtatctgggttgatttcccagaaattcatcaaaccagcacagcatggaagttacttatatacctattatactttcagaacccttcagacagtcaacatggatgaaggctaataatttgattaccataaaaatataactaggaaaaaatagttgtaggctttacatataaagaaatttgaactacagccccacagaattagtgacaatctgaatttccaacagaactttgaggcagagtcagattagaatattttttaaaacttgcttagaattaatatctaacaaaatgaggatagttgtgttctcggtattatctgtttaaaatttaatctaagaatagactctgagattttcttgaagagcagttagtgctgagcatatactgacctaagaacagatacacttctaaatctaatttaggagaatcattttggaaataagacaatttttttcttgtgaacattctatctaggaagaattcagcagaatgaatattcatcatttaacatatttctatttttatagtctgcttcaaaacttttatagtaaaaataagataaaagtatagaatcacttccagatttctctacacactcaagcaattattcattttatatgtctggcaggatgggtttgattgtggtcaccctctttgtctcttccattacccctggtactgagagggtgcaagtgaggataaattagccaagaggccacccacactgagctcttccagactgaaacaaacaaacaaacaaacaaaaacattagagtcagaaaaactaaatataacacatgttcctagattgcattctataaagaatattattgggataattaactaacttgaacagagtttgtgaatttaatgttagtgtcaatgacaatgtcctgattttgattcttgtgtattggttatctgaaaaatgcccttcttggaagagttacacattattcaacagtgatgcgctctctgttcacaatgtactctcaagtagctccagaaaaaaaatgttctttgtgctattcttgcagcttttaacatttgaagttattttaaaattaacattatctttagcattttaaaaagataaagttgattttatggcctgtgagtttatcattgattttctcagattctctgggtaaactatatcaactgtaaatagttttatttcttcttttccatttcctgtgaatcgatttttttcttttttaattgtgttggttataatctctaggaaaaaaatgttcaatagatggagagagagtaagcatccttacctttttgtaatctcagtggaaatacctctagtattttctgactaaacataacaccggctttaggaccgaggtatagaaaaatatgcattatcatttctcagccttatggctaagatcaagtgtagaaaatatgcctcaatttctattttcttgagtgtttttatcaggaataggaattgagttttgtttaaaagccccccacccccgcttttttttttttttttttttttttgcgccaagtgtggtggctcatgcctgtaatcccagcacttcgggaggctgaggcagcagaattgcttgagacaaggagtttaagaccaacctaggcaaaatagtgaggccccatttctaacaaatcaaaataaaaatattagccaggtagagtggtacatgcctgtagtcctacctgcttggaagactgaggcagaagaattgcttgagcccaggaggttgaggctgcaatgagctatgattgcaccactgcactccagcctgggtgacagtgagaccctgtctccaaaaaaaatttgtttaataaaataaaattaaaagaattttaaaaagccttttccccaactgaggataatatacaattaatcttcttatatctactaatatagtatttaaattaatagatttcctcatattgaatcatccttgcattccagaaataaatcctacctggtcatggtatattttcttaatgtggtgtttggattctgttttctaatatttactctagcatttttgcattgatattggataatggcttgtagtcttgtttacacattagagtcattttcctccataccacttttaggagaacagtttccatgaaagggagcttgatgataacagaaaagataaagagacaatctaacacagaaatagacctgtcttagggccacataaattaaggggaggttgctgactcctctcttactgactaggtgaccttagagaagttattcctcctcttctgccctcaattttcttgcctatcaattagacgaacctactcaaaagattgtgtgagaataaaatgacaagatgtctatacagacttcagtacaatgcctgacacaatgtaagctcacgtaaacactggtataccctattttattaaaaagaactacttttcttctactgcctctcacattataataatgcataaagacatatgtggacagatgtcatagtttcatcagcaggcagatagtccccaataccattttgtcatgattaccaggccacagaggagtttaggcagctaatctagggagctaggtttgtattttttctcttcttttatagttactccattccagactagaagtttgaatttataattttatttaattaattaattttgtgtatttatttttgagacggagtctcactctgtcgcccaggctggagtgcaatggcgtgatcttggctcactgcaacctctgcctcccaggttaaagcgattctcatccctcagcctcctgagtagctgggactacaggcacccgccatcacacccagctaatttttagctgtatttttagtagagaaggggtttgaatttaaacagtgagcttttcatggttattgagtaggagtaggaggaggggggaactgtaaaggaatgaaaaaggaagaggaaacttcttgaacccctcctacataccaggaactaatttaggtatatctgcagttattatgtgaggaaaggtggaaggttgcatcaagattgtagaactccagaaccaccttgacaggtgaatgagtatgggcattgtctctctatctaacagttgagatcaacttttgttcttttcttctcactcataacctcttcaaatagaataaagagatgcgttttctctgggttgggctctcagttactctggctgtaagtgctctgaacatcaggaaatcactctgtacagggtgtcagctgggcttctaagactcctgcgtgtggaggagttaaggagagtgaacatttatcaatacatttattccacaacatttttattatgaatgtgttgattctgcaactcttcattagactgtagaggtagaaatgctgtctaccactctaagactgatagacctagagcactgtaggaatgccctggaaaaagaaattggcctgaagatgttggcatttgtgcggaacctagaaagtcagagttagaaagcaaagcaaagcttgtgggagacagcacagtacatgtattaaggaacagactcacacagatctaggtctgcattttgtcttcctatctttcttactattgactttggacaagttctttatttttctcagctttaattgcatttctgtaaatttagggaaaagtaccttatagggttatagtgaagttataaaggagataatgtaggtaaaacacttagcacagtacctggcttataactgctcaaatataatggccattattattatctggtctttagcagtgttcacttcttgcctccatcaacaatcttttccttagactttaagcttctgcttttttttctttaaagactattttttggttcacagcaaaattgagatgaaggtacagagatttctcatatatccccatcctcacacaaacatggcctttccccttattaacatccccgccagggtggtatgtgtgttacaactggtgaactggtgaacctatatattgatgcattgccatcacacaaaatccatagtttacattagggttcactcttggtattgtacattctatgggtttagacaaatatataataacctgtatccactattacagtatcttacggagtattttcactgccctaaaaatcttctgtgaagcttctttttttaaaaaacagcttttattgagatataactcacagaccatataattcacctacttaaagtttacaattcaatggtttttaatatattcaaagagtcatccagaagctaactttagaatattttcctctcaaaagaaaatccacacccattagcagcactctctattcctctttcatctcttccctacatccacttccaggcaaccacaaatctattttctgtctctatagatttaactattctgaacagttcatataaatgtaatcatgtaatatgtgatcttttgtgactaccttctttcatttagcatgttttcaaagttcatccatgttgaagcattgtcagtactttattcctttgtattgctgaataatattccattgtatagataaatcacgctttatccattcaccttttgaaatacatctgagttgtttccattttttgctattacaaataacgacaccatgaacatttacatatgagtttttgtgagaacatatgttttcatttctttggggtatatacgtaggagtggaatttctggattttatggcagccctgttaacctttagagaaactggcagattgtgatccaaagaggcattttgtatttccacaaacaccctatgagtgctccaatttctccattctctccaatacttgttacaatctgtcttttttattatagccatcccagtgggtatgaaatggtatcatattgtggtattgatgtgcctttcccaaatggctaaagatgttcagtatatctccttcggagcaatgtctactcaaatcctttgagtattttgatttttttattagacagcgtcttgctctgttgcccaggctggagcacagtagcatgatcagagctcactgcagctcttaactccagggctcaagccatcctcctgcctcaacctccaagtagctgggaacacaggcacatggcagcatgcctggctaattttttaaaatctttggtacagacaggatctctctatgttgcctgggctggtcttgaaatcctgggctcaagtgatcctcctgcctcagcctcccaaagtgttgggattacagcagtgagccaccatgctttgccaagtattttgaattttaagagttttacaaatactctagctacaaatcccttatcagatatataatttacaaacattttctcctgctctgtgggctctcatttcacttttttgatggtattgcttatagcacaaaagtttttaaagcttcttttaagtataacttatggaagtttatatttcaacagttatctcctaaatagtacactttcaatggaagacttggccttgttcttcatagacaaaaacaatgtatgtaaactcagtacgtaaaaaactcagtaatgtaaaaatcctctaattgtaaccttcccatcacatagctgttgacctacattggcatctacccttacctgctttcactacccatgctcttgagataaaaagagcttattctagtcaagaccaacactccagctggattcttgacctcatcctctctctattctcccaggacattcctctgtcacttaatctctctgtttcctagatctttaacatctctctcagcctatgagacagtttgccttgctccctcccattttgaaaaaaaacaaaaacaaacttgtcttgatctgcatcctccaaatatacatctctaatcttgttctctaccctgcacttcacttggatgccctacagatatatttcaattcaacatgtccagaattaaattcccctcctcaccccacatctgttctactttcaatatttctgttcgtagataatggcaccatcatccgtcacttacccaaatcaaactctctctcccctgtacacaccttctagaatcaataaatcatgttggcttgatgcgttgtacctctcaggtatatcatacagtctgcatctcactattgtacacaaatgcctttagtttagtttcttagcatctctcccctgaattattgtatagacctctaacttatttttctacctccaattctgccaccattaaggttcattctccttaatataccaagagcaatataaacaaaacctggtatgttttagcatttgaataggagatggtgattgtccccttattaggtaatgtacatcactggttatgtgacttttgataactctctaattattcctcttcagtctctggctcctcatttgttaaagaaaaaaatgacagcacttagtcttagagacattgtgagaatcaagtgggacaatatttggcatactaggtgtacaacaaatgggaggccttacttacatgatagtgggaccaggttatctcctggggctcccctgtgtctacagagaatatcagatatgtcagctgcaggaatccggacttaaagtcaggaactctttgggaagctcttgagaacaaggacactggtttctttccctataatatagaatttgtgccgggagcagtggctcatgcctgtaatcccagcactttggaaggtcgaggtgggtggattacaaggtcaggagttcgagaccagcctggccaatatggtgaaaccccgtctctactaaaaatacaaaaaaattagccaggcctggtggcacatgcctgtaatcccacctactcaggaggctgacgcaggagaattgcttgaatccgggaggtggaggttgcagtgagccaagatcacgccactgcactccagcctgggtgacagagcaagactctgtctcaaaaaaaaaaaaaaaaaaaaaaaaaaaaaaactatgggatttgtaaaaagtagaagaaatagtaaagacaaagtacctaacagggtggctggtaaataaaaagcaggggatgaaaaatagaaaataagcagcaacatgcccaagaagaaataactatgctaagaaactggttcctcttttggtttaagcattgtccattacttgtttgccagatttgtctattctagataaaagtgtgcttttgttgtcagtggtgctggtggtggcgaagttctgttgttttacagggaagatagcagtggaataacagagtgatccaggacgtctgtttttcaacttcagcagtagttagtttccccggatgttaaacatctgagttcaacagatgaagttctgttgaccttgagttttcagaggtcaattcagctttccaatcatggtacctctcttttcttgctgtgtgcaggctggcactgatcccagtttatcctttgagattcagcagaagatcctgatggaggaggaggataccaagagagaggtgcccaaggaagatggagttggtgatgtgcaacatttcggtgagaactttattgtcagaggttttcagtacatatttacaagttcttactccatcatacatattgggaatgagctggcattttcaagcatatacccaggagtccagcaatcattggggaagagagcctgaggctggcaatccttgcccagaactttggtcacctgcttgttcacaggccaccatatcttacttcactgaagtcatatgctgaggttttatttagtccagatgctgaaggatgggaagacccaagcagctggtgtggaggtctttcccagtgactcatcagtcattcagaaatcaaagcctgcacaagaaagggtgggatgggatgtatagagaaagacaccaagcctttagactccagcagagtagctgatattgacatatctgaggagggaggaggctccaatacgactactcccaattcacagggtttgtggttctggatgaaatctttgcaaagggtttccctggcactcaaacagaataaataggcttataaagtgtatatattcctcattattttttattatgcctcagatgatcaagtaaccagaaggctgagggataagcttggttacctagtttcagccaatctcattagtatttccttctgaccagctgaccagctctgtactgcaaagtcttcttgtattaagggagggcaattccaaactagatttaatttttcatttactcattgtgctaagttctagacacaagaagttaaaatagaaaaacctgtgttagggctctccagagaaacagaaccaatagaacacacatacacacacacacagagaaggagagacaaagagagattttaagcaattgtcttactcagttgctctattgtgggggctggctgggaattctgcaatctgtagggagtgtttatctcgagcagacatggaaaataaaacagaaacattgcaatatgacgatgtgaaatactttgacatctaaccaaaaccagtcatggttttggactttctggagagggtgatttctgaagcaactattgctaggtgaattgtgattatgaggaaagagatacatgaatgtgactcatgtgaataactgcaggcagtttactgtgactggaatgctccctccttgcaggaagaggaggaaggaaatgacaagctattaggtgggaaaataacctggagaaaccaaatgacatttttttttgtttatttgttttcatgctaatctgaggattccagatttattttatcctaaaggctttgagaagttattgaagaattctaagcattggagtgatgagattagagtttcggtaaagaccaatttatgtaattattcaacaaatatttaatagtgtctgtcatgtatgaagttctgagagacgcactggagatatgacaatgaacaagatagaaagatcccggtcctcatacagcttagaattgtgtgcaggagattaggggaaaaaaagactaataaaagaacttaaaattttaagtactgttattgaggcttgatttaggagcctattacaattccaatatcctcccatcccatcacacctggccatcacatcctgccataagtggaagctttaagtactgaatattactcagcaactgccctataccccatcccctctcacggccaaatgcacagtcttggatttgatacttccagaccctctttccaaaatgtggatcttagctttttctttaggctctgcatcttccatttccttgggagagccttacttactgcacacccaatgtccctttagccctgggcctaatgaggttccatctccccttgacttattcctggctctctctaaaagtggggaaataccaggtagtaaatgaaggcaaggggatgaaaagtactattgacagatatttaagaggtaaaaattatatgatttggcaatgtattggtaataggggttgaggaggacttgagggactgaagaagtttcccagataagggagttggatgactggatctaagagggtgtcctttacttaattgtagactacaattaagaaggagggctgaggggtgcacgtgagggaaggtgataatgatgtaatgattaggacatgttacgtctgctgtgcccaaaggatacctctgtgtaggtaggcagtatgcgaccctcaccttcccccgtgtacattcctaaaccttccttctttcttgtactgaggattgtggaagttggaatgaaaaacaaaggactgatatttccagtaggatcaaagcattcaacaaagtaattgagaatctatcataaaatgctaatagcccatgagagataaaactttcctttgagaactaattaccagtgaattattcatcaagggtaaggttaccccccgccacctgccactagggatccttcaaaactgcctgtgtaaggagttttccacctggatagtcactttgataacttctgcaggacaaaactagcttttgcaacaggaaaacaataaaccacatcagagcttgtcttgattacattgctcatcaatgctcagcaggctagaggagtaaaaagcataagtgctttggtgctttgacccccccaaacagcactccaagtgttgagggatctcagaccttatctgggatttttgttgaagaaacagaggaagagccacagaaagctctgccaacagacttggggtgtggggagaaaaatactgcctttagacatatacagtcatgcactgcataatgtttcaatcaatgagggaccacatgtacaacagtggccctgcaagattataatggagtgggaaaatgtcttatcatctggtgacagtggtacagtagcacaacaccttaccttttctgtgttgagatgtttagatacacaaatatttaccattatattacagttgcctacagtattcagtacagtagcgtgctatataggcttgtagcctaggaataggctatgccattcttatggttatgccatatagactgggtgtgtaacagactatgccacctaggtttgtgtaagtggactctatgatgtttgcataatgacaaaattacctaacaatgcatttctcagaacatagccctagcctcaagcaatgcccgactgtatatgaaactttcctcttgtgaattgatgggttgccaagccttttataaagctaactttaatattaacattgaagatacagtgaatccatatacccatgttaaagttctggagtttgtttcttttttgtttgtttgtttttttgatatggtctcactctattgcctaggctggaatgcattgatggaatcatagctcactgcagccttgaattcttaggctcaagtgatcctcctgcctcagtctccagagtaggtaagactataggcccaagacaccatgcctggataattgaaaaaaattttttagagaaggggttttgctatgttgtctaggctggtctcaaactcctgggctcaaatgatccttccaccttggcctcccaaagcgctgggattccaggcatgagccactgtgccaggccaaagttctgaaaattcttatgtcagtcttgtaaatataatactaataccgtaggaatcaagctctggaaattaccattaagagaatgaccttttaaatagagcttcttttgttttccatttgaacagcacagcaagtgaattttgataatcttctttaggaatatttgtaactcagaaattcttagttcttgtcattatacaaaatagacacttgcacatatattttatagcagtgcagttcacaattgcaaagatgtggaaccaacctaagtgcctatcaactaatgagtgaataaagaaaatgtggtatagatacaccatggaatactattcagccattaaaaagcatgaaataatgtcttttccagcaacttatatggagctggaggccattattcttttttttttgggacggagtctcgctctgtcgcccaggctagagtgcagtggcgcgatctcggctcactgcaagctccgcctcccgggttcacgccattctcctgcctcagcctcccgagtagctgggactacaggcgcccaccaccacacccagctaattttttgtatttttagtagagacagggtttcaccatgttagccaggatggtctcgatctcctgaccttgtgatccacccacctcggcctccccaagtgctaggattacaggcataagccaccgcgcccagccgctggaggccattattctaagtgaaataacaggggtggaaaactgaaaaccgtatgttctcacttataagtgggagttaagctatgggtacacaaaggtatacagagtgacataatggactttagaaactcaaagggagaaggtgaggggggcagggctagggataaaaaactgcacattaggtaaatgtacactacttgcatgatgggtgcactaaaatatcaaaattcatcactatataattcattcgtgtaataaaaaatctacttgtacctaaaaagctgttgaaattttaaaaaatttaaaaagaaattcttggtttttgaggatagtcataaattcaaatgagactaaaataaccatactaagatgaagcaggaggatcacttgaccccaggagctcaagaccagcctgggcaatgtagcaagatcccatctctacaaaaaaattttaaaatctgggtgtggtggcatgcacttgtagtcctagttacttggaaggctgaggcacgaggatggcttgagtccaggtttcaagttacaatgatctatgattacaccactatactccagcctgggcaagagaacaagacattgtctttaaagtcaatacataaataaataaaagaactatactagtcataacatcactatctgtatctcagaaataaatgcttcaaacaaccatttagaatttattgagcactaacataaatctccagtcagagttgagtgctataaaataatgtttttggccaggcgtggtggctcacgcctgtaatcccagcactttgggaggccgagtcaggcagatcacgaggtcaggagatggagaccaacctggctaacacagtgaaaccccgtctctactaaaaatacaaaaaattagctgggtgtggtggtggtgacctgtagtcccagctactcgggaggctgaggcaggagaatggcatgaacccatgaggcagagcttgcagtgagccgagatcacgccactgcactccagcctgggtgacagagcgagattctgtcttaaaaaaaaaaaaaaaaaaaaaaggtttttactagtgttctttgcgattctcctgagagaagcaatgacattgcccccatcaagtggaaaattaaaaatggtctggcaagtagctctgagcccctgcagacacagccagttaattggaatgttgtcactgaatttctagtccatcagtgacccaacagccaaaatgggcctgctcatgtgtatttctgtgagcattttaggatctgtgactacagagtaatcataactctgaaaaaggaaaagggcagtcaggagtggatggagagatttaatatcttaattgtggccctaatgaatacgcagttctcagttgagcagcctcgacttgagactgacaccttgtttaatacaggaagtagagtgcggctttattaaagtctttaaatgttgtggctggagctcatatttctttttcaccctatgcctatataatcatgttgttccacttcctacatagccgctggctcttcctgttgtcccgcagcaagaagccagtgcaagtttagagtaaggaaatgacataattaaaatggtattcgatgcgaagcctaaaattcaaagccccatctttcccctttcctcaaatctggccccagcaccctagatcttatctcctactcctccctccccagctcaggcggctgtattactcactctttcccaaatctgccttggctttactgtcctcctacattgctcatggtctttcctctgcctagaaggcccctcaaccttttttttttcaatatgaaactcacatatgttgtcttccctgttggactcataggacacaaataccccttcacctgaactcttctgtatcattgttttttagtatatattacattatcatattacagttatatgctaggcagtataaaacagagtaggtgcttcgtaaatttgcctttaacattcctcatgttctgaatcctggcccctgctctcagttgtcagaattctcccgtgtgctgaagtctgtgtatatctgacacatcaatttggacatctatccaaattgggtagatgcccaaggtggcattctccctctctctctcgctctctctctctccatatatatgtaaaatatatattatatatacaattatgttatatgtaaagatcatatataatacacatatattatatatacataaattaatattatacataggattatatattataataatccttatgtataattatctttatacataatataattatctttatgtataacattaaggacaaattgaaatcaaggtatggtataactggagggatgatgaaagtcagatgaaaggaaaaacaaagaaaaccaacagagagaagagaagctgagttctcttcagtatcgaggaatactgctgttaaggtgttggtttcttttttccatgataagcagataagatacagagaaactccttgttttaagcccactacgcaggcaaagtagaccaattcagggtcctcaagtgataagaaaagtgagccagataacacagctgggataggttaatctaaaagacacacacacacacacacacacacacacatacacacacaccatccttttcctgcctgattacaatacagactcacagaaaagattgggggtagggcagaaggagaacgtttaatgcagaaattaatcagatgttccaaatagatttacatttttctcataattagagaacctaccttgtaattgtttaaagataaaccagcacatggggataatcattaaacttgaggagacaaaaattaggtgtttccctttttatgcccctaggaggttaaaaagttattttcactttagttttggttaacattctggtattaatttgattaatatgttatttatactttatctatttaaatatatattagagaatgtatagtaaaaaccaaatattcaataaggttattggaataaaaatacatcaacattttaaaaaggagaggaaagcaaagtctttattaccgttacacaaaaatttaatggtaagcttgactctgggcttcctggcaacaaggatacaaagagaaacagtgggttacatagtttcccttaacaacagttgcagatccaatgtgaaaatagatgaagatgacttttctaagaaatgaaagtacattcattttttagagagacaatttatctaagtactaaaaagagtgtgtaaattggaactgaacttatataggacagtcagtgtataactcaatggtcaacatcattatcaatagttccagaaaggcaaacgtggttggaaactactctgctgggtgttctttttgtgctgtctgtcctctgtgcaaggaatggtacctacattaacacactggctcataaaatgtgagttcagccaggtgcggtggctcacacctgtaatcccagcactttggaaggccgaggtgggtggatcaactgaggtcaagagttcaagaccagcctgaccaacatggtgaaatcccatctcttctaaaaatacaaaattagctaggcatggtggtgcatgcctgtaatcccagctactccagaggctgaagcaggagaatcgcttaaacccagtaggcagaggttgtgagccaagatcgtgccattgcactccagcctgagcaacaagagcaagactccatctccaaaaaaaaaaaaatagttcttacttttcagaatagaagtttgcttctcagtgaagataaataatgcactcaaattacttggctattgtattagtccgttctcacactcctataaagaaatacctgagactgggtaacttataaaggaaagaggtttaattgactcacagtttcacattgctggggaggcctcaggaagcttacaatcatggcaaaaggcaaaggagaagcagacactttcttcacagggcagcaggacagaatgaatgcaagaaggggaaatgccagacacttacaaaaccatcagatctcatgagaactcactatcatgagaacagcatgggggaaactgcccccaagatccaattacctccacctggtcccacccttgacacttggggattatgagaattacaattccaggtgagatttggtttgggacacagagccaaaccatattagctagcaaaggggctgaatcagggcttaaaacccagttctgccttacttcacagtcaatgatttttccactgcactttgcaagtagaaacttcttgattcattaaatcatcataatattaaagcgaacttcagcacaaacaattgttccatgagttaaactgcagtaagattgaaatgagttaatagctacaaagatttgttaggctatcattgcagagaaaggagcaaatatacagattcaggacataaaaagttaatcaaatccaaccgatcttttctaataaaagagaacaatagcaaaaataattacaaatggaataacataaataattcataatatcactgtatgtgtttcaaagtgagcaggtatgtacaaacctactcccaaagaccacagaagctgaaaagccaaagaaagaggctgacaagtccagtttctcagaaagaaacatttaatagagacttatgaacagaagccatgtccccagtggctgtgaaaaaagatggtgcatctccacgctgtcactcccagagtcaagacacataaactaaaggaaaagaatgtgtaggagaattgaagtcgaccccttggggagaggcaagaatgctctgtgaatctgcccatgggcaggatttatggtcaaggttgttttgacccaggggcaggatttaaggtatcagtagataaagtacaaatcttagagtaattcccagaactcgggttaatcagaagtcaacaggtaatcttccatggaattagggtaaaaagaaaaaaaaaagtcagcatggcagattagcatccaagatagagttgctttagcctcaacactgtgcaacactttaaggttccccacctgagagggtgaaggacacaggaaagtaagatcagggactgtaaccactacagatcctggagaggcaaacaagaaaggtctgctgtttagtttacaacacaatatctctagtgataaggaatggcagagcgcaggcaggactctggtctgtgattaaacagaaaactttattataaagaacccaggaaatagaaaaggtagaaagactctctctttcttccttccttccttcctttctttctttctctctctccccctcccgcgcttccctctttttccttccttccttcctcccttctttgcttccttccttcttttctttcctttctttcttctttctttccatcaccattactaaaagaaagtctggtaatataataataacaataacagttgcactttattgagtgctttctatagatgttgaggtctgcatttgtcttttttttttttttttttttttttggcgacaaggtctcactctgccacccaggctggagtgcaatggtgcgatcatggatcacccagcctcgaattctcaggtgattctcccacctcagcctcctgagtagctgggactacagatggtgcaccaccatgcccggctaatatttttgtatttttagtagagacgggttttgccatgttggccaggctgctctggaacttctaatctcaagcaatcctgctacctcggctcccaaggtgttgggattacaggcatgagccattgagcctggactgaatttatctaatttaagacttgcaccttcagggtggtctcgtctatcttcaggctgctatggccttatgaaagctattgaaaaccactctaactcatcaggaatgggaaactttgctgggtttagtcacttgaaaaagtcacattcaatgactactttttgagtcccttccatatataagtcttggagtatgattcatacaaatatgaataaaatgactccctttgccttctaggagcttggctatcctaagagatagagatgctagcagataaaacaaggcagtgaagggaggccagtgaggattactttttgtctagtaatttggaattattcattatacagaaatatcccctagtaacattcatacttagaaaagaggtagaaggtagcattaaagacaatgaactcaagaacaagtgctcaaattctgcctctaccaacttattacctgagtgacaactgacttctctgtgattccttttttacttataaaatgggagtagtaacaaacagtaactctcaccgcatcaactaatattgtcctatatttggaagaataccggatacgtatacaatagtaattattgctctcaataaatttagctatttttttcttagacataaatattggcaatctaattatggccattctaaatgtgctgtgttggtgcacattctccttagacctgaagggagaaaggttgtctctaagatgtctgtgtagtcaagtgtatttctggcattgctcgaggcaaggaaatgtttgcaacacagtgctttgggtcaaagccatcatttattcttgagcaccatttacatgtccggtatccttgtaggcacactagggatatagcactggagagaacaggcaaaactctctgcctgcctgccttacattctagtgaggagagacagacaataaacataatttaaaaagtacattttacaatatagtagaatgtggtgactttgtcaaaaagtaaatttaagtagtatggaaaacacattttaaacttttaagtagagtggtcagagcaggcctgagcaacacggtgacattgaacagggtcttgaaggaagtgagggagtgaaccatgcagatacttgggaggagggaattataggcagagagggcaattagaacaaaggccctgagatagaacggatttacctaggaatctagtctacgaggccactgtggcaggggctaagtgagtgataaaggggaagtaggaggctgggcacagtggctcacacctgtcatcccaacacttagggtggcggaggcagacagatcgcttgagcccaggagttcaagaacagtctgggcaatgtggtgaaaccccatctctgcaaaaaattcaatattagctgggcatggtggtctgcacctgtggtcccagctattcaggaggctgaagtgggaggatcacttgagcccaggaggttaaggctgcagtgagctatgactgtgccattgcactccaacctgggtgacaaagtgaggccctgtctcaaaaaaaaaaaaaagaaaagaaaagaaaaaaaaattccaaggtaatggaaataaaatgattgtatgtttatggggatgatccaaaaaagaggaggaaagagatgacgtgggtgagaaaagaacattgctggagcacttaactgtttaactgttggattgatcagtgtatgtatgcttctgcagggcaaaaactcaggacagggaaaagaattcctctaaaaaacccggcattcctaacaaacatatgaaaaaaagctcatcatcactagtcattacagaaatgcaaatcaaaaccacaacgagataccatctcacgccagttagaatggcaatcattaaaaagtcaggaaataacagacgctgcagagaatgtggagaaatgggaacgcttttacactgttggtgggagtataagttagttcaaccattgtggaagacagtgtggcgattcctcagggatctagaactagaaataccatttgacccagcaatcccattactgggtatatacccaaagaattataaatcattctactataaagacacatacaaacgtatgtttattgcagcactgttcacaataacaaagacttggaaccaacccaagtgcccatcaatgatagactggatgaagaaaatgtggcacatatacaccatggaataccatgcagccataaaaaagaatgaattcatgtcctttgcagggacgtggatgatgctggaaaccatcattctcagcaaactaacacaggaacagaaaaccaaacactgcatgttctcatcataagtgggagttgaacaatgagaacatatggacccagggaggggaacatcacaccctgaggcctgttggggggtgggggacaaggggagggagagcattaggacaaataactaatgcatgcggagcttaaaacctagatgaagggttgatgggtgctgcaaaccaccatggcacatgtatacctgtgtaacaaacctgcacgttctgcacatgtatcccagaacttaaagtataattaaaaaagaaatttaaaaaagacattccgtaggtgaggctctccctaaaagtcaaacttttacttgcacatatgaaaagtgtaatcattaaataagctatttcttcagtgacggtatactgagttctgctcatggtgccaagtactttgcatatattattcagaagcttattagctgccctgcagcaccagtatcatttattgctgcactccaggtgaagaaattgttgctgggagctacaacaacttgcccaaagccacaatgatcataagtagtttgcgcttcgttgtgctcttctttgctggtgtgagattctcgagggccaatgtccttcatctgcgtaactctagggactcgcccagaccttggaagaggttcacattcccgcgtgccgagattgattatgggccaccctcggtctcattcgttgacttccaataaagcattggctggtggacctctacatcagcattgttttcattggatatagcaactcagaaaaatattggggaaaatataaaaactttcaagagatatgattgcaagaaaatcagaatgagtttaaaaccctcctgaccccagtccttagctcaggccgttctccaaggattttgcaaacctgctttctgacgcagctggtaaacttgccccggggcgaactgtcggaaggaggtgcggtcacctggagtttcccaatagatacttcgctgtctggtgaggaaatcatcaccctaggacgtaaaccctcccgcccttctttcagctcttaaaaaaagcctgccacgaaagtccctactgcgttgctgcgaacgtagctttgagaagctggcgcccagtgatggggcaaacagccatgcccttccagcagccgtgaaagccccaacagcaaactgcctgggagcggggcaggtcaccaacttcgttgctcgaactccctgggtgcccgccgcggtggttacaaagggggtcaagagtgccggacccagccgcgcggagcccaccattgcggcccgagggggacccgacgggggcccgacggtgtggcgtggcgcaaggagcgcgcctgccttctctcgccgccgggaacgggctgcaccaatggccaggtgaggaggcggcggtggtcgcccgggaggagggggtggtgccgactccgtgtgccaggagtgcgtcccggggacgctgcctcccccgcggccgagttggttgccgccggttgcgctgcggagggttgggggcggagaggaggcagtggctgcccgggccgaggaggggcgcgctgactgctcaccgcgagtcaggaggggccggcgggctcacggagggagacagggtgggcgggggcaaaggctaggcgctagggcggcggcgccagcgtagagcggcggtttggaggaaagatgagacggtgagtgggctccggggacacagagtttctttgcttctttacaggctgtagggacaaaagcccgggctggggtcggcagtgcccaggctgcgcagctgggtgggtgggggtggcgaaccccgttgtgcatgactctcggggggctgggtagatctccggttgaggggatcccggggagggagtgtctggtagggaagatgcttccagagtgattgtagaaaacaggcagaatgtgggggaactgggggcaactttttccagcaactctggaatgcacatggagagagggatggggatccttgggatagctccctgagaaagagaaggtccgctgctggatggtgtagggcgcgggattcagagaagactccctccccgcaaatatttggctagctgcgcttctagttccactttctttcaagagtgaacctacgagctttaaccgccaaaagcggctgatttcgatttggcctttgaccccccactgaaagtttacagtgtggccgtctcggcacccctagagatagcagctggaaggcttggggagtattttaaccctctgtttctccagctccctgcgcggcggaggcgcagctgaatcgtttgctggttcgcttaataacttagccctagcagtcatcacttattaaagcgccgaggacctggctaactcccgccaccaccaggaaattaaaaggctgacaggctgtccctcccagggttggggtttcctgtttgaaagagcttgagaagtcaaactgcttcgcggttcctcacttacctttcttatgtaaaagagggagcgacgcccgcagctttttctctcggtaaactacccgtggctggaaatcctccgggcgcctggccctgccctcttccctagaaatctttatcctgcaactctgaagtagctctaaagagctctagaatgcacaactagtcatagccaggcacagctgggagtgtaactagacgaggcataaaaatgtggagtctttttagtgtaaatatttgtcagccacatttcccttcgtaatatgaacgtgtaagttacagatgtaggttttcaagtattggacgtgtaattttaagcttcctagtttggtttaatttgggcgttcgagatatgtctctgggattctaacgtttgaattcggctgggagagatctaaatgaggtccacagtttcagaaggttaaacttttgccctgtgaacacttgaattcttggttcctggtaggttagcaacagaactgtcggatttgggataaataaaccgttagagttgcccactattttaacagaatggctatatctctcttgccgttgccttcaattgtgtaaatatttgtttgaataaagagcgaaggttctttgaaaagtaacagttctgtctattcttggctcccctttcatatcctctgcttagttatttaaaaggattttctttgcctcttacatttaatggggaaatttaaacattacatgtacttaaattctgtaaagttaccaaaccatttataactggcaaattatttaatgacaaggaagagttgagtttgtcgtcttagttggctaatgtagccttcatctcttgagacccagaggtttgcagatctcagcctgtcagaagtggaaaaatgagatgtctggttaagagtagtcatcatttcagtcaatttgcaggcctcaatctgttttatgcagctggcagctgctgttcttttggtgttgagatcgtctgccacgagtgtcgcctggatccctgtttgaaaaggggaggaaaagatacttgggaaattggactgagagcttgcttactcctccgttcaataactgtgaccaagctgaaactcgttagcaacctttccagaaacgttttatttaccatgtgtgtttgttgtgtatgcaagagaggaaaaaataagccaaagtgattaaccaatctctggttttccctattttcttcaaagctccattttgagatctataagcaagggttgactctcgagttcattggagaagttacctcggctcactacaacttctgcctccttggttcaagccattttcctgcctcagcctcccgagtagctgggattacaggcgcctgccaccacacctggctaatttttctatttttagtagtgacaggattttgccatgttggtcaggctggtctcaaactcttaacctcaggtgatccacctgccttggcctcccaaagtactgggattacaggcatgagccaccacacccggtctccttttaaatatttttaaaggagtagttaacgttatggctttatatcctgattttcaacccttagcagggaggcagtgctatggtgctgtggatggcttagagtgacagtggctttgtacattttctaggtggagtacctgtgccttatgaatctatctgtaaagtcttggtgtaccaattgttgattgtgtaaatgtcactcttttgaaacaaaaacacctaagtgatgtgctttatcttaaagtcctgacatacattagagctgtggttttcactgggagaggggttttggcccccagaggatactggcaacgtatttttggttgtagcaactgacaggaggagagtgctactgccatatagtgggtagaggcctgggatgcggttaagcaccctgccatgcacgggacacaaaaacaattatgcagccccaaaccctgcactacagtattgcctgggggagtaggttaacaagattaggcatcttaatctgatttggatcctcaagaaacttgtttaactgtgttaaacaagagacccttatcatagaagccgttttgtatgcagcagattcttttgtccttgccatttagagtcttaatataccatagaggtcgaggaacttgtgttcattgacaactttgagatggattaaagtcatgggatttgggagcattagagcacaagggagcctcagagatcacttaatttctaccccttctttttatagatgtaaaaaactgagacactcagagctttaggactcataaggtctcaagcgagctaagggcgggcagacaaagttctaggtacaacccaggagttaaaaattttaaaatagagattcaggcaaatgggaacaaaaaacaaaacacactggacctgaccttgtgtaaaagtttcaaagcaccattccctgtgagaaaataaataaatgcttcgatgggggaggggtggcattagccatagagactgtggggcacgtgcctgggtgccccagtcccagaaaggggtaattccattatatgacctgtgacactccacttctgatgcctgtactgtcctttccatggcaaagtaggcaacagatggttccacagacatagcagatgttgcttttgaatccaggtacaaaacagaacatttgagattttctgttcctccctgccttatcggttaagagtagagtacatgaatggatagggctggcttggacagaagggagaattacagaggcctcctgagtatggaagaaaaaaagacacctggcatatatggaaatgagcaagtgttggggaaattgtgggagaaattcataagctgatgaggggatatctaatataaattcaattgcatagaactaggattaagaatcagaagacaattcaagcttagctattctttcagcatgtagaacaaaataactatgggggtaaaaggaaccttagaaatcctcttatctgaatcttttccctccaaccaactaactgggttagatagcggcagaatctgcaagcctcctgttctattgtactttctcctgcacccacagtctctaccattccatgtgtttacctaatgggaaagaaaatgatagtaaagaaagttattgttaattacttgggagagtttaaaaagcatggtatttgtgaatggctgtttatagaaaggagttaccttaatgagtttatgattatcagaaaagttgtacaccatagcctgattaattacaaacatgtatactctcctgtttacattgctatggttagccattaggctcatgattatagattctagttctgggtgccaagctgtcctcctgtggtagttattttatctaatactcaaatctgacaggttctggccatataggaaagtttttagtatgcctttggtgggagacataaaacctctgaaaagtgttaagatagtttcttatcattttgacaactagccaaagggtgcacctcaaagccaagtacatagtgatatatttagaaatgactcaagagtgatagcccttttaagggatctgcccccccgcaggtactatgcaaaaggggtgtagcagtcttttcattatcatctttcatctggccattcttgttactgtttttcagatgatgggagaggagacaggagtagtttttaaaaaaataactgttggctagaaatatttattgggatttgattaaagtaacttgtcttttaaaaataaatgaaaccaaaattgttagctcagattttcaaatcccttcaaagtaaacatttagcaaggcagaacttctctctatgttcatccaggaatttgaaccttctgggagttaatttgcttacagttgttttcatgacgcttaaggatgtttcttagacattgcagaaaaggagctttgtgctgtatctgctttaaaggcaagatagttgtctatagcagctagtggtcaataagagaaacccaagtgtaaaaatcattttactgttgtgtgggaaactagaggttgtaggtaattgctatacaaagaaacagattaataagatatagagtaacagggttagtcaaaaagtttttgagaggatttttacaggagatacttgtttagtgtgttaggttgattttattagatgaagtgcttttccttactttacaaagtaaaaggaaagaaaatattgtgtatgccactgtttatcgatggccttaagccaggtcagctttttctgagacttgctgctaattcagtgggaattggtgttgatcatcttagaatgttttgtttgcacattgcatgtgactgccctagatggcagtatgttcatggaactagcctatgaaatagcaaaaaagttaaagattacaagagttttccaagatttctttcttgaccaccctactgctaaaacaaggaaagataaaggcaaaagaaacccagctcctacattcttttgaccagtgcagacccagtgtgaatagtgccgcacagccaagagatattcagaggggattgagaagtgatgtctggctgcctcactgcttacgtcattgcagaagtagcttttcaaaaacagcttaagatttattaaggaaactgcaagccatgggaatgcagacaaaacctttcttatacatcatgctcaatcaaatacccatattatattacattaccataactctgaccaggcctttttcccactatgttatgctaaaacaatttaccatgcctttggaatgtcatgggcaacagtccggtgaaatcttttcccaattaggtagctgccaccttatcactaaaactatttctgttctgtggtcatttccatttcctgcattatgtaatgagcactcctgtgttatttaaccagtatctgtgggagtccagaaagttggagcagaaagaacatgtagttcactctcaccatgttgagtatggagaaactcctgttgaaacaaaatgaagacaggcgaattgacgtgctccagatcttagttctgttagcagaaccagaactaagatggatcttctgacttgcttccctggcagcctatccagtgttctttctactagattggccactgtaataaaaataacatcctaacgtaaccatttcctttattagatcttttggccagagttattaaaaaaaaagcattgattaaaattaaattaaacttagtcaattgtttatcttgacttgttcaagttatttcccttctttcaagcagtaagtggtcaaaaggtagatagcatggaagggaaaaattaagtgttttataatactcattctgcacaatcagctgctaagtaatgaagatatgatattatcataattattatttttactttacaatattttagaaacctaccccacccactcattttttttttttttttttttttttggagacagagttgctctgtcacccaggctggagtacagtggtgcgatccagctcactgcaacctcggcctcccaggttcaagtgattatcctgcctcagcctcccgagtagctgggattacaggcatgcaccaccacacccagctaatttctgtactttaatagtgatggggtttcgccatattggccagggtggtctcagactcctgacctttggtgatctgcccacctcagcatcacagagtgctggaattacaggcatgagccaccgagcccggcctcatgtactcaatttgtgatgtaaagcgaaatgcattacaaacatggaagatgtggttgacctgtgtttgttccacctcttgtgagcctgtttgtaccctgactattcccagttcataaatcttgggtta

SEQ ID NO: 5642 - DNA, 72713 bp, Homo sapiens
  DKFZp434C0328 gene - 115115995 - 115148707 of chr3; NCBI Entrez Gene ID: 54762; Build 35; sequence includes 20,000 bases upstream of initiation codon and 20,000 bases downstream of termination codon of the gene
tcatagaggcggggtttcaccatgttggccaggctggtctcgaacgcctgacctcaggtgatctgcctgccttggccccccaaagtgctgggattacagacgtgagccaccacgcccggcctgtactgtttttatcttagcaaggtaatagtggtctctcttgccagcacatgggggctatggggaagctagctctccttggaaatttaagagtatattctgaaagtgaatatttcaatccagggtctaatagagcagaaatctgtacttattttgaattttaaggcttaaagagacagaatgtcttttcatcttattcccaaatggcagaagaagatagcatatgttagattcaggggtaaagtaatgaggggagctttttaaatgtatacagatatacgctgtctaaattctgatacatgttactctagcttctattttgggaatcactaagtagaaggttgacagaagggtgtcctattcctcaggtgtgttggggaaaaagggtttaaaacagttgattgaaagtattagtgtataaaaagaaagaatatatcggtctgaagaggacttggtcagacgtaggccaagaacttaggacttaggacagaaaagtagagttgcagaggcagactttgatcaatagagaaccatatggagatgggacagagatgaatcatcatgccccaccaaggtcacagtaaattgtcccttaaagctgtctacttttgctctgattccatgcttgttgtgccactttctgattgctaatctgacttccaaggtattcaggtgttctgggcgatagaagaaaagatttctgatcaccagaaaggaatcttccccaccgtgcattagtgtatttccaactgagctagtatcagctcgtgagtgtggcttatataagttggcctccctgagccaactctaggatagtgacagctctgaggcttttctctaaatagtggtcagtttacaaagcctatgtcagccactgagaccttttggaggagtgtcatccagctttctcctttagcctgcgcaacattatcaaatccccttgttcttttattttggagttactggaattccaaaagttttccagtagtgctatcaatctaataaatgcaacattcagacctacctggaaaaaaaatgaatatgaaattggtaactatttgtcacgtttgctatgtaatagcatggcagtatagaagtgtttgtattatataattccctcttttttaccttcttgattgtcagaactcctctatctattttcccttggtcagtgagctacaccgccttctacccagtcacccaagccagaaacctagatgtatcctttttcttgcctctttgccagccagccgtgtctagttggtcaccaaggtcatcatcatttctagcttgaaccattaccaatgtcttcttatctctttttaacacctgatctgtctttgaggttgatgtcaaatagtagtgttttaaaatcatgtcttttaaaatcataattctgaacttgttacttttctatatgaaaccactgggtggcttttgatatttcgacaatgtaaagtccatattctttggcatggcatacaaggctcttcatgacctggctgcttcctccttccccactgtatctcctctccctgcctcactctcatgacacacacatgctcaagtgatggggaactggtttggcaagctgcatcattcctctggatgcttgcatttgacatacatgtgctcatcctgtgctcatcttacttgacctttcggcagcgttagataccactgtatactccctctattttgaaatactttcttcccttgcctttcatgacattctttctggaatcttctcttacctttctggtatttccctgaatctttttttgctggccactcctctattttctctttgtgtgttgggctttcttggggttcagttttaggttctgtttttccctctgaagcctactaaatttagctctgccctacatagcagtggtttggtataaggatttttatatttagcaaaaatgtgtataaatatcagttgtggtacagttaatgtatattttctcatagctatttgttcaccatcgtaaatatatttagttacaatttcagtcaatgagaactaccataatatgctaaaagcactgccttttagacagcggaagctgcccccacagtgggctttcttcatttgaatgagtagtattttcagcatcactctactctatctcattctgccattgtataaaatgatgagattttagcatccctcaaaaggttgatccgtggagttcatcaagtagcctttgatttgtttacacacatcactaaattaaatggaatgactaggtagaaattagggcaaattttgcttctttatttagaagaaaaattttcttctgagaaataaataggaattagtagatgaaactgtactgtctattatagtccagatcactgccagggaattattctaaatacaccaaagtcagaaatattttcaaagaaaagaattattgagtaatcaaaatgttgccttaaacctttcagtgatgagagatgtgccgggtgcttagtagaattattccacctgaacagctggctcttcctgctatttccttacgttacatttacagcactcagagatagaatctttggttgttgtaaaggattaatgcaagagtctgataggaatactacgtcagtactagagaagtagtatatgaagaggtaatcatgacattcccagaattgcatagaaattactagcatggagaagaaaaattaacctgtaatatagttaattttaaagatgagattaaaataatattgcagtagctgttttatatcaatttagcataagcaagatgtttttactttcattttgttttttctaatctgtgcgtagaacagagaaaattaggaactgtccctttaataaaacctgtttacctatcttcttcttgtaggagtggcttaggaacctgtagagtgaggtataacttccaattctgcattctgacctgcaaccttggaaagagtgctggtactacaaccaggaagtgacagataatgtgctttaaactacattagaaaagcttctcatagcaaaactgagagattgaagcagtgattatttttacatagttgtcattaaatatttggagctctgctgtgcatagagatggcaacatacttagaatacacagctttctgggccagaaattgatcttctgacttttgagccttatctgattactgcttggttcatctttattttgttaaactactctgtaggctgaaagggagagactctccttggtttgcaggtgggtggtcagcttgtgtttaaaatttaggttgttttgaagactactaaggtagattatttttgctgctgattattgaaagaattatgaatatcaggctgggcatatgtttgaatgtttgaatgttcaacatggctgtaaataaccacatttttatgaaaactggacaactttatagaaaacgtcatttttaacaaattggcaaatctacaagatggtgaattacatgagttatattttattttccattaacctgttatatatattaaattactagcttgaaaagtatattgtgattaccctgctattaacttcctgctagtatttaatacaatattcaaaacatttatgtagtcaaataaaattacatttttgttgttagtattttactaataagtttcatttcttttgctgttaggaagctgcctgagtattcatcattggtttatctttttgctttagtctgcctttgtaatcgtttgatatctattatttaagaaaagtttttataaaagattagtcttacacaagtatattgaaatattgcttgcttctcattataaagttaaccatcctagtaagacactaaaatatttcaaagataatttctttggaagaatgagttaattagtagtgtgagttattattgtgaaaaaaagttcacaacaaatgactcatttggagtggaagtcagaaaataaacgtgtatgttcctttaatatcaaggacagtggtttcttaattttctctaccactaatggtcctttttatgtttttttctatggacactgtgcttccaaagactttgtctaccaaataaggggtatacattaaataataaatattaaaacatcactacttgttagatatatattatttccagtgagaatttattagcctgtgttatccattgtaggttaatatagttcagctcgaaacagaggcttgccatttcacttaacttgaatagctttattttagataattggatatttttgactttttgaaatattatctgataatatctgatgataatatctgaattttcatcatctgctcttgtggaatcctggtaatctgggcacagtagattgggaactagtggtctaaagtgcagacattttgttcttaatatctttgaaggtccatgaaatgtaatgaaggtcatctagtataacataacaaacaaagatgccatagttactagacagagaagaaaaaaggaggaagaaaaaggaagtggtatttattgtagggaaccctggggaggaattcaaggcatctgtgttgtggccccatcaagtctatatttatctctactatttcgcaacttaaaatttttatttcagttaggctgatagactactgacttcaaaacaaatgttacttatgttcatgtatttattctgtatttttagttggtttccgtctcttcaacttttcccatttctccatttccccatattcttcctttatctcagctgaaaacacttctccaatgtgaagctttatctgatcacactaatccacagtcctatttccttcctttagactttcatatcatgttgactgtaccagtactttagtgcatgatcatattatatcttgtcatataacttaagaacatcccatgtctcttcaactatattaaaagttgtttgagggccaggagcttaacttctacattatgtttttatgtttattctccttagcatctagtgcagtaacgcacatttgttaggtactaaataaatatctgttgaatgaatgagagagattatcttactaacaattgcttcaagtgttatgctacttccttacaccttgcttaagcaggtaattaactatctgtaatgtttttagacatcagaccattggttatcataatattgttatttaattttatttttcaactggaggccattatcctaaatcataataatactgtttttgttttgctaggtaatgtgtgagtttgttgtatttgatgatttaaaaatttgttaatttctgcctacaaagaaagaacaagctggactttattaaagataaatcaaaggaaaaattctgaagtccagactcttgcattttatatattaggaaaatatagtttaaaatttattgatatataagatttttaaagtggttaaaatattcagatacattatggattaagaggacaggttctaagctgacagggctgaacggtgattcagtggtcatggtagactggttagattgcagaactaaactgaagatcagaggctaggcaccatgtctcacgcctataatatcagcattttgggaggctgaggagggtggatcacttgaggtcaggagttccagaccagcctggccaacatggtgaaaccccatctctactaaaaatacaaaaattagctgggtgtggtggtgcacacctgcaatcccagccactcgggaggctgaggtaggagaatcgcttgaacctgggaggtgaaggttgcagtgagctgagattgcaccactgcactccagcctgggtggcacagtgagactccatctcaaaaacaagcaaacaaactgcagatcagtaattaccagaaagtatgaacaaattattattattattattattattattttgagatggagtctcgctctgtcacccaggctggagtgcagtggcacaatcttggctcactgcaacctccgccccctgggttcaatcgattctcctgcctcagcctcctgaatagctgggactataggtgtgcgccaccatgcccagccaatttttgtattttttttttttagtggagaccaggtttcaccatgttggccaggatggtctcgatctcttgacctcgtgatctgcctgcctcagcctcccaaagtgctgggattacaggcgtgagtcactgtgcctggcctgaacaaattattttacagaaagaaaatttaaaacatttttaacctcccattttcagtagttattataatatgtactttaaaatcattttatctattccttttatgaactctgccagatagcttttattaactcatttttatagatatgcaaaatggaggtacagaaaggtcaaataactaccaaagccccatatctagtctttgcacaacaggtcatttttgacttcaaaactcatgttttgaatcactgtgatattatattttatattttccaatgctcagtgtaatttttctgtcactttagagcctgactagacaggaattctggcaactgctccagcagaactatggcactgagctaggtttaaatgctgaggagatggaaaacttgtcactgtcgattgaggatgtgcagccaaggtacagcaaaatgttttgaaatgtcaaaatttatcaattattaatcaaagcagaattattttacattcgactaattctgaatttctagtaatttatctttggctgccatttgcccctttgttctttgtggtggaatggggtgaaaggtggggacagagaatagtttgctaaataggtaagcacatatgagatatataaggaaatgttggctatgtcacttagggtagacttaaagtctggttttagtaagcctgtttattaaggatctggagaagtacctagtgaaatctctgagtttatagatgacagtaaagtaaattatatggtaggtgttttgaaggatacaataacatgatttttcctcaggaattccctaacatagtgcttagcatgtggttggcactccataaatattgaatacattaatggaaggagcatatagcctaccgtggaatgcaaataattgtaatacaaggtcgataatggtaagagtcataacagagtaacagataatgtgataaagaaattaagagtacagagagactatttttgactgatgaggattcatttagaagagtggacatttttattaacctctacaagtaaaagtgcattatgtccagtggaaattgaggctgttagcaataaaaacaattaaggagaatacattaaaattctatagcaaacattatgctgagtgaaaaaagccagtcacaaaaggccatatattgtatgattccatgtatgtgaaatggagtctagaactggtaagtttatagagacagaaagtaaatggtagttgccaggagctgataggaagggagaatggggagtgactgcaagtgactgcaaagcatttctttgttggggtgatgacaatgttctacaattagttagtggtgatggttgcccaactctgtaacccactaaattgtacactttacatgaagtgaattttgtggtgtgtggattatatcttaaaagctgttatttagaaattctatagcaaatcttaaaatggaaatattttgaaagtctcaaagtatgtgcagaaattttactcatctaggtaatctacttatgctgatccaatttatatcttttcagcttagcatcagtattttataggcttttttacatggttgcacatgtatattttattagctttctgtaaagttaaaaatttccattgtattgttctccttgagaagtttagtagcctcttgccggctctggatttggatagaaaagcagttactctaatgcaaagagccttggattatggtaaacaggatctggatcttagttagggtcaccaaacagccgagcaacctcaggcaaatcttttcatttttttgattctcagttttctcgtctatgaaatgaggcagctgaactagattatctttaaggtccttgccaacttgaaaagtttctagtctttgaggaaagaaagaatatttttgactagctgctgttttcttctggcgattgaatgctttcttttttttcttttttgagactgagtctcactctgtcacccaggctggagcacagtggtgcgatcttggctcactgcaacctccgcctcctgggttcaagcgattctcctgcctcagcctcccaagtagctgggattgcggtgcccaccaccacgcctggctactttttgtattttcagtagagattttgccatgttgatgaggctggtcttgaactcctgaccttaagtgatccaccctgcctcggcctcccaaagtgctgggattacaggtgtcagccactgcacctggcctgaatgctttctttttttcttttctttctttcttttttttttggagatggagtctcactctgtcaccaggctggagtgcagtggcgtgatcttggctcactgcaacctctgcctccgggttcaagcgagtcttctgcctcagcctcccaagtagctgagacttcaggtgcgtgccaccacgcccagctaatttttgcatttttttttttttttagtagagacggcatttcaccatgttggccaggatggtctcgatctcttgacctcatgatcagctcacctcagcctcccaaagtgttgggattacaggcatgagccatcatgcccggtcggcctgaatgctttctaagaaagtgtgtggcaggatcctcattctctcttctacttcttttcctgttcttcagtctctgaaagaagcatatctgtttcaaacctttatttcctcggttcttccatcttcttcctctttatttgcaatctctccttccttcttcctcctcctttcctctctgtttttccacatctcacctccatcctgttgagcattggaaattagatcagttgtgctcccattgtatttaataggttttcctttctttttgctccttgagaaagggaaagcagatcccaggacatttattatagtcttggccatatgatcatttgacagctgtttcttaaaccttgttcttagggctgggaagagtgaggaggcaggagtggccaatgggcttaggctcagacatcttgagcgtccacttctgggagggcttcgccatttcagctgagactgagtcagaaggaaggagatataaaactgccttcttgtgcgatctagtatctaactcaaacatctactctgtacctgtccaagctttgtggttgtacacaaatgaaatttaaaggagcaattttcatttgattagttactgttacggccatttgtactttgttaattttttaatgtttttgagatttatagaatcccatgtgagtgtatcttgttttcagaaatgatatcaacttgcatgtaatttaagaagatagccttgttataagtaaacatttatttgctatattacagtagtccatttattatcaaactgttttatcataggaaatgacctcagtgaggagaccaaatcatttatttgtgtggaggtgaccttatatttctataatgatgtgtttcttacagaagtccaggaagaagcagcttggatgactctggggagagagatgaaaaattatccaagtcaatcagttttaccagtgaatcaattagtcgggtttcagaaacagagtcattcgatggaaattcatcaaaaggagttagtatatgatatcccttttaaaatatatctggtactgtcatgtcctaatcagaatacaagataaataaggatacagtatacaaaatgttaaaaataagatatcagactcctaccttattttaggaaaaaagtttaaagtctgttagtagcagagattatgtgggaaaatatgtggttttgttcagagctatataaaaagcagagctaccgagcagttttacctgggcatcagtctgtagggggataaatatcattaaaagaataataagatggagaaatttgtaagtagcagaattttccccagggtaagtactgtgtgtgctggaaagaatctgtttttttttttttctttctttctttcacagaagggaacagcatggagaaagaatctgttttgaagggagagatgagcccctgagcagcatgcttgagtaacaatagctgctttttaagctttttaagcaggcaggtccagttaactactaggcattatactcaattacttagtttcttcctttattttctcaagtatcattgtaagcacatcagttttttgtttttagttttttgggttttttgagatgagtctcgccctgttgcccaggctggagtgcaatggcatgatctcggctcactgcaacctccaccccctgggttcaaacaattctccggcctcagcctcccaagtagctcaggttacaggcacgtgccaccacgcctgggtaattttttgtatctttaatagagatggggtttcatcatgttggctaggctggtcttgaacccctgacctcatgatccacccgccttggcctctcaaagtgctgggatcacaggcatgagccagcatgcccggccaacacttcagttttttattccagtgtgcttcaatcacttgcagtcattatttgattctcagtttgctccctctgccaatgggagccccttcaagttggttcctttggccttttgaaatgaccagtatctttaatgatgtcttttctttctggcacaacaatatcttctaagcacattttgtatgttttctgctccagaccgttttcttaatgaaccatagattttcttagtgaagaatggtatttagagaccatattctgagtactaggagtgctcctactgcagagcctttgttctgctgattgggatgcaagtttgggggcagagctgaattcctttatttagagcagggctttggcttcaaatcttacatctgccacttgctaactgtataagttaattacttaaccttttcttttcttttctcaactgtaaagtgaggattatactttataaggtcttttttaataagagttaaatgaattagtatatatgaaaatgcagtcatgctctgtataatgttttggtcagtgatggactgcatatgtggtggtggtctcataacttttttttttttttgatacagagttttgctcttgttgcccaggctggagtgcagtggtgtgatctcagctcactgcagcctccgcctcctgggttcaagcaattcttctggctcagcctcctgagtagctgggactacaggcatccgccactatgcctggctactttttaatatttttagtagagatggggtttccccatgttggccaggctggtctcgaacacctaacctcaggtgatccacctgcctgaggctcccaaagtgctgggattacaagtgtcagccactgcaaccagccagtcccataacattttaagggagctgaaaaattcctttgcctagtgaggtaccatcataacatggtaatgcaatacgttgctcacatgtttgtggtgatgctggtgtaaacaaatctgtgctgccaggcctataaaggtatagcacaaacaattatagaagtacataatacttgataataaaataataaatcattattttagagtacactctttctacttctatatacaaaaaaagttaactttgaaacagcctcagccaggtccttcaggcggaattccagaagaaaatattgttatcataggagatgacagctccatgcatgttattctccctgacgaccttctagtcgtacaaaatgtgaaggtggaagcagtgatattcatgatcctgatcctgtgtaggcctaggctaacgtgtgtgtttgtgtcttaatttttaacaaaaaggtttaaaaataacaaaataagaaaaaattaaaaatagaaaaaagcttttagaataagtatataaagaaagaaaatatttttgtacagctgtccagtgtgtttgtggtctaacctaagtatttttacaagagtcaaaaagttttaaaaaaaagttcataaaataaaaatgttacagtaagctaagcttaatttattattgaaaaaacaatttttttttggtaaatctattgtagcctaagtgtacgatgtttataaagtctgcagtagtgttcagtaatgtcccaggccttcacattcactcactactcactcactgactcacccagaacaacagaactcagtcctgtaagctccattcatggtataaacaggtgtaccattttctaaatcttttgtaccgtgtttttactgtacttttgctatgtttacatacgtttagatacacaagtacttcccactgtgttatactgcctacagtattcagtagagtaacatgctgtccaggtttatagaccaggagcaataagctataccatatagcctgggtgtgtagtaagctataccatctaaatttgttaagtacactctatgacgttggcacaacaataaaatcacctaatgatacatttctcataatgtatccctgtcatcaaagcaatgtatgactgtacttagaatagttcctagcacacattaaatatccaataaccataagctgttataattgaaggtgaatctgcctgtgatcagtaatgatccttttccaccctcccccaagaacttccagtatctcctctgagtaaatgttgggaaaacattgaatgaaaatatatttatgtggaaggccagcatgttatcaacttgtttttaccagtcatgcatctaccttagcctggttttgtgttttgtgtttcttgcaaaacttattcatctagagacccttagtgacttactactggtgcaagggaagtgaataacttaatgctttaagatcgatcatacattcattggtgttcagtatagatgttttcaggttatagaatacaagcagtatagaagtttagccctttttttttctgtttgcattcaagagccatatgatgagattctcagatatctacaagcatcgtatgtcacttgctttgcctcattttcacttctaacaaagttggaaataacaaaaagtcaaaaataacttttttccaagaaaatatgttttttaagctatagaattaatactctttgtaaaacttcatgaaatacagtagagtatacaaagaaataaaagccatccagataccaaccactgaaagatagtgactcttacttttcctataaatatctatctgtattctttatagtaggaaatagaacttaatttgcaacaagaggagacgtgtaagtgtggagctgtagagaaatgtactctacttagcatctgttaaggggcccctggtttagctaaataggcacgttgctttatagtgtggaactcccaaataaatcaagttttgattttagcaataatctctgcatgaagaatcaatcttctgaccagggcaatataatcctttaataaattgtgtcctcggtcccagttgttattctgctatctgggtggccagtggaaacctgtatcctccctggagctgattctgctacttagtgcttctcaaggatctcatgggacaggaagtaaagtgctctcttccatctgtgtacatacagaaaatgcaagaaaatattctgctgtatagtttatatagactttttgtactattccactaagtctgattataatacagtactattttacttgaatactaacatagcaatagcatcatactttaatgcctaacattaaatttattatagagatgacatcatctttattaaaccatctcagaaagtatagatagcatcatatattaaatacattttaatgcctaatctcttagtccctttgcagcaaagccaattgtgtttttatgagtttgctatgaagttaatttgttttaatcttctctctcccactgtactcatatgtgacttttatctctccattttctttccatttccctgttaggtcttgagagatgggtgagttttcttccttgagatgatggggcaggcactggctggggaagctaactgggtttggttcttctcccttgtctaccccaaagaatggattgttctattatttttgtcctttgtcccctttcccttctccataagtgatttacatgatctgtgaagctcttttatatggtgtttttcataaacttgtttattattgtgtaggatgactttagaatggtatatattatttattcatattttacggaccgacatttaatagcatgggaaatgtgatgcaagtataacaaacaaaatgctgtaaatattcttcaaagctcaatatttcaaagtatctttaatattaaagttctcactgcaaaatctaagctaaacctgtgttttattttgaaactggattgtttaccttttagggattaggcaaagaggagtcccaaaatgagaaacagaccaaaaagagtctcttaccaactttggaaaagaagttaactagagtgccatcaaagtcactggacttgaataaaaatgaatatctttctctggacaaaagcagcacttcagattctgttgatgaaggtaaataatttcttataaattttattaaatttcagttatgtctttttatgtttatctttgtaataggggtgtgcagattgagaatttagttttattagacacagtctcaccctataaagaaacaaaaaaagaatgggagcttatagaaaataggagaaagaggctgttaaatctaacgtatcccactgtcttcagaagcctggaatctgaaaagcttctttgcatttagcttctaaatgtggtgttaataaaaacatatatgcccattctatataccaggcagtgtgatatgctcacacgtcataggtagagtgacatattatttcatttaggctatccctcattttcctggtagggaaaataagacctacaggagctaaatctaaagtcacacagctagttaactatgcagaacttgagttaatgaccaggtgtctctgtccagttttctttttactttacttcaatactgcccaagttattttctcttttcctccttttaaaaaaagacagcttagcaaggtttttctaaacttgttttgtatataattatgaaagcaagtagttatggcagggatgcattctcacatgaatattaatttaaattattgggtagcctccaaaaggaaataaagaagattctcaaaaattctggaaaggaaatctttctctctgtaaatgattttttaaaaagtgtactcatcaatgttactcagaacaatactcaaatttctttgtgtgaagatgcaagcttttgactgtggttatattttagcataatgggatgagttttttgaaagcaagagcatggaaagttcatcataattgctcctgactttgatttgtttttactgtagtcaatttccatttaattttaaaaatttccatttaattcactttcagaggaacattctatatttgaaatttattacaaagataaatgataataatattccatatggcattaaaaaaaacttatttggctgggcacagtggctcacgcctgtaatcccagcactttggaaggccgaggcgggtggatcacacggtcaggagttcaagaccagtctggtcaacgtagtgaaaccctgtctctactaaaaatacaaaaaattagccgggtgtggcggtgtgtgcctgtaatcccagctactcgggaggctgaggcaggagaatctcatgaacccaggaggcggaggttgcagtgagcctagatcacgccactgcactccagcctgggtgacagtgtgagactccgtctcaaaaaacaaaacaaaacagaaaacttacttggttttagagggccagcagagattaagcttaatcctaatatgatgataaagagaatcatgacccaaaggccttctgaatttcaagagtattatattctagatgtttttcacattttgtattgtaatccattttgttttgtattgtaatccatgtgtacatgaggtctagagtgggctcaacaaatagcagtccttcttgaccaccctggtggtaacaaaattgggaaagaaaatgaagagcaagtcagatagaggccaaaatatcaccttttatactaatagtaacaaagtcaacggatgtgggtatgtgtgaaagataagtgggctgctgatggagctgaagaatgaggtggacttacctatcaatcacaggcaatgttcaatctcctccccaactggagggacgatcccccctggaggagaaccagcttctgtgggcacctagatccagagagaaggacagaggtgtgccaagcctacccaacatactccttccacatttactaactgtattagtagctcaggctgccataacaaaatactacagattgggtagcttaagcaacagaaatttatttcatataattctggaggatagaaaccccagatcaaggtttggcagagttggtttctggtgagggctctcttcctggcttgccactttctcactgtgtctgctcatagcctttccttagcacatgctcatggttagaggagcaaagtgtgagggaggagcagagcagggaacaacagagagagagacacacacacacacacgcacacgagagagagagagagcatacatgagcaaactctctggtatttttttttttttctttttgagacagagtctggctctgtcgcccaggatggagtgcagtggtgtgatcttggctcactgcaatctctgcctcccgagttcaagcgattcttgtgcctcaccctctggaacacctggagtagctgggattacaaacatgcaccaccacgcccagctaattttttgtaattttagtaaacaaggggtttcctcatgttggccagggtggtcttgaactcctggcttcaactgatcctttagcctcggccttccagagtgtctggtgtctattcttataaggacactaattctaccagatctgggacccaccttatttaacttaattatttctttccttccttccttccttctccctccctccttcccttcccttcttcctttctttccttctttctttttctttctttcttttcctttctctctctctttctctctctgtttctttccttccttccttccttccttccttccttccttttctttctttctttcctgacagagtcttgctctgtcccctgagctagagtgcagtagcacgatctcggctcactgcaacctctgcctcccgggttcacaccattctcctgcctcagccttccaagtagctgggactacaggtgcccaccaccatgcccagctaattttttgtatttttggtagagatggggtttcaccatgttagccaggatggtcttgatctcctgacctcgtgatcagcccgcctcggcctcccaaaatgctgggactacaggcatgagccaccgcacctggccaattaacttaattactttctttagaggccccatctccaagtacagccacaccaggagttagggctttaacagaataatttgcggctacacaaacattcagtccataccaataatctacttcctatggttagagtgagttaaaggggtagagagaggctgggaattaccctaattgggcacctttaactcggaagggttgaagaagagacatctccactgcattatatataatacccagcacacaataatattgtgttagtcaatgtaagcccatttcccaaccattttatgtagatgtaagtttactatgttaatgtgttttccttaatataaaatttaattttttaaaacatattttaaaaacttccaaaatatagattgtgtgtgttatactgcttttaggtttgagaaagataaaagattttggtttttcttggttgagcacggtggctcatgcccgtaatcccagtacttggagaggccaaggtgggaggattgcttgggccaggagtttgagaccagtctgggcaagacttgtctctacaaaaaatagaaaattagctggacatggtggtgcatgcctatagtcctagctacgcaggaggctgaagcaggagcatcacttgagccccaggagatcaaggctgcagtgagctatgatcacaccattgcactctagcctgggcgacaaaagagccagatccagtctcttcaaaaaaaaaaaagatttaatactttttatgtttcagttttgaggatagatgttatagacactatgattgtgttactttcttgtaaccaccaataggagagagaaagggaaagagaaagagaaagcaaaaaatataataaaagtagttgtttaaaggaaaatttagtacaaattacttgaggcttgttgtacttattaagtaggcattttaaggactctttttcttaaaattgtaagatccttgccattgaagtcaatgtagtgggagacatttggaaagatgaagggtaacatagagactgctttattagtgtccttaccattcttgctttagtatgcagctgggcatggattagtcatacgctgtttacctgaatttaggactttaggaagatctactctggcccccagtggccaaataggtaagtagcaccaaaaccaggatttttgttttctctttctcacctgcttcttttataagaatggtccttccaaagtagtttcagctggatgtggtggcgcgcgcttgtaatcccagcactttggaaggctgagccaggtgggtcaactgaggtcaggagttcgagaccagtctggccaatgtgaggaaagcccatctctactaaaaatacaaaaattagctgggtgtggtggcacacgcttttaatctcaagagtgagactctgtctccaaaaaaaaaaaaaaaaaaaaaagaatcctataaaagaaacattataagttgcataaaggataacaataaaactgataaaaattgtacatatctagaaataaagaataatagtgtatagattcattattgcacaggagctctgatcacactttgctccttgcaaaggctgtttggctttatagcagtaagaaggtatatgtaacattcagacctctgtttggggagttttatttaaagtgtatggcgatttttttcttattagattatcattagatagcaaatcaagcgctcctactggtttccctaagcacgttccaaaatcttggacttgtcatatgtattaaatgggtaaaataatgaatctgtgtttttacttttttaaagttgtgaagttatgaagacggttgaagtcaatgaactgaagtgacatttgaaaaggtcacaaaaagtaaaccatcccaggagactggggatgtgtgtgtgggtttagagggagtgagggagattgcagatcactttaaaccaaacatcattttatttagtgatagtatattgatctactatagtaagcaggagaaagataacaagtcaataaatcaataaaaatataactacaagtcaggataggttctgtgaaggaaatgaacaagatcaacagaatcacctttagttgttttcttcctttgtgaatatttgaattatttttacagtgaacatataatacttctgtgtcagaaaaagctgtttcccaggcctaattggaaagttacctcacaaagcttagcaaaattgcctagttttgtgattcatttctacgctgaaggagccattatttgaaactgcagtaaagagtttttgcctacgtagagtattgttgaagggagaagcaaatcaatatctatctgatatccataagtcctttatgcctctagcaaaatagggagacacaaatcatccaatgagggataaacagcagtagttggggatgaagccagagctagcagagtttttctgatccatagactattgccctttgatttaacctgactaatattgacagatgctttacccagatcattcttagagcttgatttctgaaacatggggagcttttgcagcaatttttattctgtatcgatggggcatcatccttgagataatagtaagtaatcttggtcctgaaatcattacaatttcatattgaattgctttatgttacttcctctattatgccaggcttctgttccttggttttttttttttcttttctgtttggttcttctaagttaaattccttctggcggtataaaatagatgttaagtttatgtgctctggagctggagtgggttcaaattccaggtcagtcactcactagccatggagcctcggcaattatttctgtgattctgtttccccatctggaaataatgatgataataccacttatctcatagcattgcagtgagaataagatgagtcaatacttgtaaggtatgtagcacaatgtctaacatatagtaagcactatgtaagtatgggctattttatataatatttccagggcatatgagaataggtgagcaagatattgcttcttcatttgtcactagtagttttcaacatcactatgattatcaaattcccagaaaaaatgtaataattcattgggcatttgttagctttgatgaatacttttcagaaggatttcttagttcttttaatgtgtgatgttgaaaataggttgtgattacagtcattcttgtctttgggtagtgaacattaagtcaagttgaaacattattcaggctgataagctaagtgcagcagatattatagccattgataaattaatatttactgagtgagcattcagaggtagaagttgctaatttctatgttagatactatcttatgtgtctatattgtccttgtcccttttgaaatattcttttgagtgacatattatggccatttgataccattcaagtgaaatatttctgtatcttttgggttttgacagttgaaatattgattatatgtagtttagttaactatatattgttatgcatagttataggtcatacatatgtatatatttaattcctatttggagttttaatagtgtcctagaatgttctcctcattgtaatcatatttaaaaaccattttatgcccaaaataaaaaaagaaaaccccacgaaaccccctaaagccttaaaataaactttctttgatttcttctcttttggtttgtgtttctgtttttccagaaaatgttcctgagaaagatcttcatggaagactttttatcaaccgtatttttcatatcagtgctgacagaatgtttgaattgctctttaccagttcacgctttatgcagaaatttgccagttctagaaatataataggttagtccttgtgttcttacctaatgataaatttgggagaatgctattattcttagaatattgagcatatataaactgatttatgttgtgaggaggaagaattagacatgctttgcttttatgttgacagtatataaactggtattcaaatgtttggttaaattcacatgtgaacagtataattatttaattaggcacatgcttccaacaattaagttcagacttttgaaaactaaaagtatatttattcattaaggtaccaattcgattaggttgaactcaattcaaaatggtttcatgtgaaacaactgaattttggtggagtgtaaattggaacaaccactttgccaaaaggcttggcagtaactactaaaggtatgaattctctgtgactcagcagttccactcctaggtatacattcatcagaaatgggtacatttgtactctgaatgacgtactacagtgttcatagcaacattatttatgatggtcccaaactcaaaacagttcaagtgtccatcagtaatagaatgggtgaatagattgtgtatattcccacaaaagaatcctatataacaatgaaaaaaatacaaagtactgatacttgtaacaatatgagtagaactcacagatacaatgttgagcaaaagaatccagatacaaaagagtacatgctatataatttctttatataaagataaaaaccaggccaaacaaatttatggacataaagtcagcatagcggttactgttgtggagagtcaggtaggtgaagactgggagggagcttttgggatgctggtttaagttctatatcctgatcagagtggtggtacatgtatgtattccctttgtgaaaatcatggagctgtacacttgagattgcagtatctatggactacttcaaagaaaatatatttttaaaagttccatttaagaaattggttaaatttcttaattggaaattaatggttaaatcctcataagaagaatttcattgattatgtgttaaaaagttttattttggggctgggtatggtggctcatgcctgtaatcccagcactttgggaggttgaggtgggtgaattgctcgagcccaggagtttgagaccagcctggacccatctctaccaaaaaatacaaaaattagctgggcatggtggtgcacccctgtagtctcagctacttgggaggctgaggtgggaggatctcttgagcctgggagttggaggttgcagtgagctgagattgtgccactgcactccagtgccactctatccagtgatagattgagactctgtctcaaaataaataaataaataaagtttgaaactgaatttatcctaaatgtttttgatattttattaactttgggagcacatgatttagcttgctacataaaattagaatgcagcagcagcagagattcatataaagtgagtcatttgacatagtcaaagagaaagttattctatagtcaattttatttatttatttatttgagacagagttgtgcactgtcacccaggctggagtgaagaggtgcgatctcggctcactgcaacatctgcctcccaggttcaagcgattcttgtgcctcagcctcctgagtagctgggattacaggcatgcgccaccacgcctggataatttttgtatttttttagtagaggggtttgccgtgttggccatgctggtctcaaactcctgggctcaagcaatctaaccccctcagcctcccaaagtactaggattacaagaatgagccactgcacccagccgcaatttagtttataatctaagtattttattaaccattagatattattcctttatttgaaacttttatgtaaacataatttttttttttgagacagggtctcgctctgtcacccaggctggagtgctatggtgcaatctcggctcactgcaacctccgcctcctgggctcaagcgattcttgcacctcagcctcccgagtagctgggattacaggcgtgcaccaccatgcttggctttttttttttttttttttttttttggtagagacagggtcttgctatgttgctccaggccagtctcaaactcctgagctcaggtgatccacctgccttggcctcccaaagagctgggattataggcgtgagccactgtgcctggcctagacataattatatattcatagatgatatcattgttatgaatactaggaaccaaaatcaattttgttcttattattgatgatagagtagcaaagagattgcagtcagtagctattctcctgtgattatattatgagttttgtaatttaaaaaaattatcttttctgttcttccagttttgaaaatgtgggatgcctgagatataaatcttcctctttactcagtagctaatatttaacttattatattttttcggaatctattttgtatttacttgttagtcatttctacttagagaacttgatatttcagaagaactggatacattatttccctgaattttttgagaggatacctgttaatgttacactgccatttttatggctgaaaagacccaggaggaattaggacgttgttgtatgctggtgataaatgaagtttgctttttgaaacacaactgcatttgttttctgatatatctggcttcaatatcaatgattatatcaactgtctgatgttataaatggctttgcaaagcaaaggcttccagctacttctaaacctaaacagttatgagtatgttgctggctagacctagaattagtcagaagctttactacaaaagagaatctgatcatgactgcaaagcatactgctatcttctgacttgttacctggtaatcaaagttgtatttctttctttctttttttgagacaaggtcttgctctgttgcccagtctggagtgcagtggtgcaatcacacttcactgtagcctcgacctcctgggctcaagtgatcctcctacctcagcctcagttgctgggaccacaggtgtgcaccacaatgcccggccaattttaaaacattttttatagagacaagtgtctccctatgttgcccaggctggtcttacactcctggcctcaaatgatcctcccacgtcagcctcccaaagtgctgggcaagtgtgagctaccacacctgggctggtatttcttgagatcgagtttcaaaggctcctttttaaaaatattaagaatttaatgatttttttaaataatcaattatttgtggattaaatctaattccagcactcaaatgactaccactggatctaaattttccaaattaggggtgctgagcagaaggagctggggctgacagttctcctgagtgaaaaggagtaaagtagcggggatgtggtggccgtgctgacaatgagttttcttgaaggcttttttggtccagtttgtgagattgatatgtctttaatgatggagaagccaggaaaatgacagaaatgaaaactgaagatggcaaagtagaaaaacaccatctctttataatggagaatctgtttcagggaaggtaaatgtagcctttaagcaacctggatagaggctagagcaccaaggaattagaattgaatttataggtcaaatggaactttacaatgacaagagtaatgctcatgaatttataaacctaatgaaagaactagccttacctggagaactgactcagagaagaagttatgattttgagtttatgcaagttaaaaagccatatgcatctgacatcggtgccagtgttcacttgaggtattttcttaaagtgacaatagtgagaagactgacagatttagtaaaagaatgtgatcttattgttcaccagcttgccacctgtcctgatgttaacaactgtattaagatagaagtgggcattgaagattgtctacatatataatttgaatatagtaagtcaaagtatcatttaaagcatgtaattgttggaaaaatttacttcttagtagtaagaataaaaatacaacatatggagttacaactgatcaaaaaagagatcacaggaattggacccagtaccacagcagaaacagaaacatcaccaaatatgaaataatggatggtgcaccagtaaaaggtgaatcaattccaatgagactgtttttagtgggatatgaccctactccaacaatcagatgtgaaccaaaaagtttcagtaaggtactttttgaatttagtgtttgttgatgaggaagactgaaggtacttcaaacagcaggagatcattttatgaagaaaagctcctgaaaaactgaggaaacagagaaaaaactttcaccagtgatttgaatctccagaatcacaggcatctgctcaacagcctgaaatgtgaactgaataggagaccaaaaaaaaaaagcaacaaattcctgtaaccattgagttaagttcagcaggttgaagatggttgcagctgtagaggggagaaagagcaaaactccatatatattagtcttcctttatcttacagtgctgcatttattttacggtataatgaaatgttctccatgtatatacattttaaaaaatgctctctttgaaacactggaactttcttaaactgccttttttgtttttacttcacactttgatgataagcactcagatgtgcatcagcataaacattaaaaattttcgggtgagaaaaataaataaaattagggggtctttattttttattttttatttttgagaggtagtcacactctggttgcccaggctggagtgcaatggtgcgatctcggctcactgcaacctccgcctcctgggttcaagtgattctcctgcttattctcctgagtagctaggattacaggtgcccgccaccatacccagctaatttttttgtatttttagtagagatgggctttcaccatgttggccaggctggtcttgaacacctgacctcaggtgatccacctgcctcggcctcccaaggtgctgggattacagcatgagccaccacacctggccaaaattcgggggtcttttaaatctatattcttttaaatcattgtttacagttatatgacactactttttaaatgtttctgatcttttagtttcaagggtacatgtgcagatttgttatacaggtaaattgtgtgtcatgggagtttggtgtacagattagttcgtgacccaggtaataagcatggtacccaataggtagttttcagtctttaccctccttccaccctccaccctcaagtaggctccagtgtctactgttcccttctttgcggccatgtgtactcaatgtttatctcccacttgtaagtgaaaacgtggtatttagttttctgttcctgcagtagttcgctcaggataatggcctccagctccatacatgttgctacaaagggcatgaccttgttattttttatgactgcatactatcccatggtgtatatgtaccatattttctttatccagtctaccattgatgggcatctaggttgattgcatgtctttactatcgtgaatagtgctgtgatgaacattcttatgcattgcatgtctttactattgtgaatagtgctgcgatgaatatacttgtgcatgtgtctttatggtagaacaatttatattcctgtgagtagatacccagtaatgggattcccaggtcaaatggtagtctgttttaagttctttgagaaattgccaaattgctttccacaatggctgaactaatttacactcccagaagcagtgtacaagcattcctttttctctgcaacctcactagcatctgttattttttgactttttaataatagccattctgtctggtgtgagatagtatctcactgtggtttgatttgcatttctctagtgattagggatgttgaacattttttcatatgcttgctggctagatatatgtcttcttttgaaaagtgtctgtttatatcccttgcccacttttttattgggttgtttggttttttgcttattaatttctttaagttccttatagattctggatgttagagcattttcagacacatagtttgtaaatattttctcccattctgtaggttgtctgtttactctgttgatagtttcttttgctgtgcagatactctttagtttaattatgtcccatttgtcaattttattgttattgcagttgcttttggtgtcttcatcatgaaatctttgctagggcctgtgtccagaatggtattttctaaattttctttcttttttttttctttttcgagatagggtctcactgtgtcacccaggctggagtacagtggcgcaaacagcttactgcagcctcaacctcctggactcaaacaattctcctgcctcagccccccaagtagctgggactacaggtgcacactactacacctggctaatttttatatttttttgtagagatgaggtttcaccatcttgcccaagctgctcttgaactcctgagctcaagcaatctgcctgcctcagcctcctagagtgctgagattacaggcgtgaaccaccacgcccagtcattcctaaattttcttcaagggttttatagttttaagttttacatttaagtctttaatccatcttgagctgatttttatatatggtgtaaggaagggggctagtttcaatcttctgcatatggctagccagttatcccagcaccatttattgaatagggagtctttttcccattgcttgtttttgtcaactttgtcgaagaccagatggttgtaggtgtgtggctttatttctgggctctctattctgttccattggtctatgtgtctgttttcataccagtaccatgctgttttggttacggttgtcttatagtatagcttgaaattgggtattgtgatgcctccagctttgttctttttgcttaggatcactttggctattgggctcttttttggttctgtatgaattttagaatagttttttcctaattctgtgaagaatgttattggtagtttgagaggaatagcattgaatctataaattgctttggcattatgaacattttaacaatattgattcttcctatcacgagcatggaatgtttttccatttgtgtcatctctgatttatttgagcaatattttataattcttgttgtagagatctttcaccttcctggttaactgtatttctgggtattttacttttttttttcttttgctataacgaatgggattgtgatctcgacttggcactcagcttgggtgttgttgggtatagaaatgctattgatttttgtacattgatttttgtatcctgaaattttgctgaagttgcttatcagatctaggagcttttgggcacactatggggttttctaggtataaaaacaatatcttctgcaaatagatatagtttgatttcctgtttggatgccttttatttctttcccttgcctgattgttctggttaggacttccagtactatgttgaatagaagtggtgagagcgggcatccttgttttgttccagttctcaaggggaattgttccagcttttgcccattcagtatgatgttggctgtgcggtttgtcataggtgactcttattattttgaggtatgttccttcagtgcctggtttgttgagggtttttaacatgaacagatgttgaattgtattgaaagcctttcctgcatctattgagatgatcatgtggtttttgtttttagttctgtttatgtgatgaatcacacttatggatttgcatatgttgaaccaaccttgcattccagggataaagcctactttattgtggtgaattagctttttgatgtgctgctggattcagtttgctagtattttgttgaggatttttgcatcaatactcatcaaacatattggcctaaggtttcctttttttgttgtttctctgccaggttttggtatcagaatgatgctgaatgatgctggcctcatagaatgagttagggagaagttcttcctcctcaatttttttgaatagtttcagtaggagtggtaccaactcttctttacatgtctggtagaatttggctgtgaatccatcgggtcctgggctttttttgattgataggtttttaattactggttcaattttggaactcattctttgtctgtgcggggttttaatttcttcctggctcaatcttgggaggttttatatttccagaaatttatccatttcttctaggttttctagtttttgtgcatagaggtgttcataatagtctctggggtttttttttttttttctgtggggtcggtggtaatgttccttttgtcatttctgattgtgtttatttggatcttctcttttaaattagtctagctagtggtctattaatcttatttattcttcaaagagccaacttatgatttcattgatcttttgtatggtttttcacatatcaatttcattctgtttagctctaattttggttatttcttgtcttctgctagctttggggttgatttgctcttgtttttctagttcctctaggtgtgatgttagattgttatttctagatctttctaactgtttcatgtgggtgtttagcactataaacttgtaacactgctttagctgtgtcccagagattctggtattttctgtctttgttctcattagtttcaaaggatttcttgagttctgccttaatttcattgtttactcagaagtcatcaggagcaggttgtttaatttccatgtaattgtatgatttttagtgatcttcttagtattgattgctattgttattgcactgtggtccgagagtgtggttaatataattttgggtgttttgcatttgcttagaattgtttaatggctgattgtgtggtcgatttttagagtatgtgccaggtgcaaatgagaagaacgtatattctgctgttttggggtggagagctctgtagatgtctgttaggtccatttggttaaatgtcaagttcaggtcacaactatctttgttagttttttgactcagtgatctgtctaatactgttaatggggtgttgaagtctcccactgttattgtgtggttatctgagtctctttgtaggtctctaagaacttgtttcatgagcctggatgctcctgtgttgattgcatatatacttgggataggtaagtcttcatgttgaattgaaccctttacctttatgtaatgcccttatttgtctttttaaatcattgttggtttaaggtctgttttggttttgtctgaaattagaatagcaatctctgctttttttgtttttcatttgcttgccagatttttctccacccctttacattgagcctatggatgccattgcatgtgagatgggtctcctaaagacagcatacagttgtctgggcacgggggctcacgcctgtaatcccagcactttgggaggccaaggcaggcagatcacaaggtcaggagatcgagaccatcctggctaacatggtgaaaacgcatctctactaagaatacaaaaaattagccgggcatggtggcacttgcctgtagtctcagctactcgggaggctgagacagcagaattgcttgaacccaggagctgagatcatgccactgcactccagcctgggtgacagagcaagactgtgtctcaaaaaacaaacaaacaaacaaacaaacaaacaaaacccagcatacagttgggtcttatttatccaactttccactgccttttaattggggcattaagcccgtttacattcaaggttaatattgatatatgtggattttatcttgtcattgtgttgttagctggttattttgcagacttgattgtgtagttgctttatagtgtcaatggtctatgtacttaagtgtgtttttgtggtggctgctaacagtctttcatttccatgtttagcaccaccttgaagacctcttggaaggcaggtaacgaattcccttagcatttgcttgtctgaaaatgatctcatttctccttcacttatgaaacttagtttggctggatatgaaattcttggtcttagtttctttaagaatgttgaatataggccctcaagccctcaaatatagagtttctgctgttagcctgataggattccctttgtaggtggcctgccccttccctctagctacctttaatattttttgtttcacgttgaccttggagaatctgatgactaagtgtcttggggatggttgtcttgtatgtatctcataggggttctctgcatttcctgcatttgaatgttggcctctctagtgaggttggggaagtttttgtggatgatattttcgaatatgttgtccaagttgcttgttttctatccctgtctttcagggatgccagtgaggcatagatttgatctatttacataatcccatgtttctcagaggttttgttcttttttattcttttttctttatttttgtctcagttaatttggagaaccagccctgtgagattcttttctcagcttggtctattctgctgttaatacttgcaatttgtattatgaaatttcagatcagtatgattctttcttaaaatggccattttgtctttcagctcttgtgtcatttttttgtattccttagatttcttggattgggttttgagtttctcctgaatttcaatgattttcattcctatctatattctgaattctatgtctgtaatttcagcctggttaagaaccattgctggggaactagtataattgtttggaggtaggaagacactccaactttttgagttgctagagttcttgcactggttctttctcatctgtatggactgatgttccttttatctctgaagttgctgtcttttggatggggtttttttgctttgatgcctgtgggggtttgattgtggaataaggtgggttcagttgaccatcttcacttctggaagatttcagggggcccaggctcagctcagaactcctggactgtgtgctctaactgtggggggctagagttagaacacatagttttgtgtgtccccagctttgttctctggcccttcgaggttagaaatatgttgcactggaggggtggaggtgttcctggtccactggccacaatactccaatggggttgctggccaaagcaattcactggggtggtggcagtaggatctgtgctgctcatgaatgccagcagccaggatggcatggtggggtgcttgtgcactggctggggcaggggcgctggtgggaaccctttgttttcacaggtgtcacctttgttttcacaggtgttgtatactggcagaatattttggtgttatgttttgggctgtgatctagtaggtagtgtttaagagtattagctggcagataggctcttaacgctgcagcacaactcatttgtgttttggcatggtttgtagtagtgttctggggtgaaaagggaaagtgatgaccccctaccctggttggctcttgggccttggaggagccccctttgactggctctgtgcccatgtttcttttgttgggtgttttggaccacggggctcttttaagcaggtgccatggttggcagacaggccatatgcttgccaggtcaaccctgcagcaagaattacactctgcccctccactggcttgcaaacctgggcatctcactctctcagtgatcttagagggagggcttctccctccttgggcatcactcaggcctgcacatcctgctcagctaggagctgtgggactggatgtggtcacctattctgctgtctgggtacttcctaggggaacacggggttgtgcctgcccacatagttgaggcagaagtgagaccactgggctggacactctagcaggcatggcctgtctggctaccagcagcagggatgggtgggagtcacctaccctgctgtcaaggtgtttcctggggcaacaggaagctgtggctgccagctgagttcaggcagaagtgggactgttgggctgaaggctagcaccaagtcttgtctggcaaggtggagtgaagcaatcttactgctcccaggcaggaccgtgaccgctattggggatatggtactggtgtcattccgttccagggtccaaggcttatagaggtccccatggacttgagagttgtcgccgcagaaactctgggtgtctctctgcctcagtttagaagtgtgggggtagggccaggggaaccagggaattctcccattactagtcttacacaggtgcctgtgtacaatcctccagggagctctcactcactcatcctttcccatattgaggagcttttcctggctctgtgctgatcccagaggggccgctgcccagctttgctcctctctgccctctgtgtccccttgctgcctggatggattctgacatggtttcttagatgatcagctagtagggtcagtgttcatcaaccctgttgtttcctgtttgtgagagcggcacacacgagcagcttctaattcaccatcttgacccacccaacccccgacactacctttaattaaagctcagttttaagtctttttacccaactcttacatttaaaaatatgtaaagcttcagaaaaattgcatgaatagtatgataacatccatatgccacttgcctagattcatcaatttttaaattatggcaaaatgtacataagataaaatttaccatttaaccatttttaagtggacagttcagtggcattaagtacattcacgttattgtacaaccactgccaccatccatcttcagaactttttaatctttccaaactgaaatgctatacctgttgaatggtaacgctccatttcttccattgttgatgatcaccattctattttctgtctatgtgaatttgactactcaaggtgccttgcataagtggaataatacaatgtttgtccttctgtgacagatttaatacacttagcataatgccttccaggttcatcctcgttggggcatgtatcagaatgtattccttttttaaagctgaataatattccattgcatgtatataccacattttgtttatccgttcatccattaatgacatctgggttgtttacacatgttagctactgtaaataatgccaccacgaacattgacatacaactgtctgttcaggtccctgcttccagttcttttgggtatatgcctaggaatggaattgctgcatcatatagtaattcaatctttacttttttgaagagtggctactattttccatactggctgtatcattttacatttccacaagcaatgtacaaagtttccaatttatccacatccttgccaacactgattattatttataatagctatcctaatgggcacgaacgttcaccaattttaaaactttattacatcaaaggatttttaaaattctgcagttcctgccttttatatatcaaaatggttcatatgtccttttgcgtactagccatttttcctacaattcattccaggttttttttacattatgataagctttacttaggtattggaggattgactgtttcaagatgatgttaattaggtgatgctctggtaagcaatactcagtagaccttattggtaacattgctgaaactacaagggtaacattcatgggaagacaaatagttttcatttatccttgttgatagttgcttcattgagtagtgtgcagttttaagagcagaattaaattacatctttaaattttgtttctgattaacaacagactggttgtatcattttcctgaaacaggctgacatatgaccaaagtaatcttctgaaaagtaatttagaattagttgtatatcttcttttatatatacctaaataaatcattttacagaaaatcctggatgatagactctatgatttgtgattttgcctttttaatttagttataagactttgccagatactcagaaggcaatttcaggatccctcattaaatcctcagatctagcaatataaaagaagttgagtaaaattggctgtattctaaagcctcacttccttcctttgatgatgagtataatggggttagataaaggctcctatgctttaggatattggtgaatagcagtcaaacatactagtacttgcctaagtcgatttgtgctggggcattaggtgatacaatcatgtctttgaatagagtttttaatgcttttatttatactttttaagtttttggcttcatgaaatgaccttcactgtgttctagaactatatttctgttcaagtgggtatttaatcactatattgtccctaagcaaataaaagagaatttttaccaggatcttgctataaacatagagatatgatcttatagtcttcttaagacagattatataatcatttatgttccattgccttactgtgactaaagattttagcagacaagccactgacattacatgatttctcataacattgacataatttctatgtaagttgatatcaaggtcatatggtttcttaatgacaaaaatattttaaagttttgtcctcagtgatgggaatgttaaagtgttgttccgtctctgataaacctggcatcattacttctcttcataggtactgaggactttaaaaggaagcttacagatgaaacaacttttaattttatcttctaataaaaggaaaaaggatattaataaacaatttagaaataaatggatcagagatggggaatatgccacatttaaggagagtgcttaacatttaatctctcttttctttaatgttaaacttataatacccagttataaggaagttagcactagtcaaaaatagaaattttaataattcagaagctcctttgatttcatttaatgtcatactgtttaagtttctagaactaactcattttgtgtttgttgttgttagatgtagtatctaccccttggactgcagaacttggaggtgatcagctgagaacgatgacctacactatagtccttaatagtccacttactggaaaatgcactgctgccactgaaaagcaggtacgtctgctttgtcagtgtccagaagagtcatgtgtgggggaagagagaagatgcctattatagttcaccaatttacaagacagtttcaataaacaagtggcaagaaaaaagggaggagaaactgttacaggttaaaagagacttaaaaggcatatgaatcgtatcaacccactcctaattcaaacaaaccacttgttaaaaggtatttatgagatttcaggaattgtttattttttatgtatagtaatggtattacagctgtgtattaaagaaaataatatttattttaaaagagatatatggaagaatctataaagagatatagtgaagtattatggatgacattatattgatgtctaggatttcctttagaagtcatctagctgggcagaggatggtgatagaggcaggtaatatgggacagaggacaaaggaagcaagactggggaggagttagtgttgctgaagctagttgatgagctcctgagggtcattatacttcatttcttctctttcatatattcaaattttttttttttttttgagacggagtctcactgttgcccaggctggagtgcagtggcataaccttggctcactgcaagctctgcctcccaggttcaagcgattctcctgtctcagcctcctgagtaggtgggattacaggcgcacgccaccatgcctggctaatttttgtatttttagtagagacggggtttcagcatgttggttgggctggtctcgaactcctgaactcatgatccgcctgcctcaacctcccaaagaaaatatttttttaaaaagaataccaggccagttatggtggctcatccctggaatattagcactttgagaggcccaggtgggaggatcacttgagaccacgagtttgagatcagactgcgcaacacagtgacactttgtctttaccaaaaataaaattaaccaggcatgatggtgtgtgcctgtggtctcacctactcaggaggctgaggcaggaggatcgcttgagcccaggagtttgagattacagcgagctatgatctagccactgcactctagcctgggcaacagagctagactctgtctcaaaaataaaaaataaaaacaaaagaagacataaaaaggaacactactcaaatctggtttacagaattgtttcaagagttaggggccaaataactagatggctgctttgacacatgggaagagaatgagtttttgaaattaaatactgtatgagctatttaatgctctttatctgtgaccagagtggcagtgtcttacagtggaatgtgtgtttagccaatttgtgctgagtatctgatttgcaaatagtctgaaaacatctcttaacatctgaactagttgtgcttataagagcaaacaaatggacaaaacaatagttttgttcattatcattaaaaagaacgtatttccatacctttaaacaattcttaaaagattatcaaacgtaagaaaagtctggtattttggtattggagggtctttgaaaactttggaagcccccccaacccccttacaggataggtagaaaaggtatggttaaaatgagaaaggtttggccaatgaccatttaaaatcctgtttaggaaaagcagtgttttgtttggttactacccttcttgacttttttggtgaagggtggtttcgttgaactttgattaattttgaggtgggatccttacttcattcaattgatttttgaattgttcacctaacaggaacacttaaaactctataaacttataatacacataagagattatgtggtttgtcctcatgcctaaaggaaaaaataatttgccagtgaaataaatgacacaggggcagcaaatgtaatttctgtaagtccctttctctctttaagagacagtttcagtctgtcactcaggctggagtgtagtggtgcagtcatagttcactgcaacctcaaactcctgggctcaaatgatcttcccacctcattctcccaagtagctgggactacaggcgtgtgccaccaaccccaactaatattttcttctttcttttttttttttttgagacagagtcttgctgtgtctcccaggctggagcgcagtgaggcgatcttgctcactgcaacctctgcctcctgggttcaagtgattctcctgcctcagcctcccaccgagtagctgggattacaggcatgtgccgccactcctggctaatttttgtatttttaagagagacgaagttttgccatgttggccaggctggtcttgaactcctggccacaaatgatccacccacatcagcttcccaaagtgttaggattacaggcgtgagccactgcgtctggcctaattttttattaaaaaaaattttttttgtagaggctgggtgtttttatattggccaggctggtcccgaattcctgaccttaagcaattctcccaccttggccaccctaagcgctgggattacaggcataagccgccatacccggccctctttttctcaatttatggacaacagagtcagcatgtaggctcttttagctttgtatataggtttctcatgttttttgtaatttttgagaaggaatactaatatacatgttctaaattggcaagaagattcatatattaagcatatacatacaaacattttttatcttactttggcagacactgtataaagaaagtcgggaagcacgattttatttggtagattcagaagtactgacacatgatgtcccctaccatgattacttctataccgtgaacagatactgtatcatccgatcttcaaaacagaaatgcaggctaaggtgagctgctgtacatgaatgtgttaggataggctagattatgtcctggtaatttattcatcctgaattcttagtagtagctttacacaacagttttatttcttgcttaaattacatttccaacaggggtgagcagaggagtggggcttctcacctaaggcccccgcttgatgaaggctttgacacccggagctacgtgatccagaatatgtgttgtttcagttgccacaggaagagaaagctgtagaattgtgttcacaatccattgaccagaaccagtcatgtgaccttgtttaatggcaaaggggctgggagttttgggggagtgctcagtgagcggtaattggctctgctgcagtgggaaatgagaaatgttggtgcattacagagagagatgggccatcatgtacttggcctactctggttaatgtagttactttcacctagtgtatgaccactagagattttttatacaaggaatttagaaaatttagtatttattttgagccttcattgctatttagataaataaaatttagggctagagaaaggaaataagtaaaatggcaagtacttagaaggaaaatttgatgaaattattagcagcacacattaattttttaaataaaagttatcaatgaacacattttcttttatgatattaatgactttgaatctttttgactttccactgaatacaatcttacatttaactgtaacatgaatataactaaagtctgctctttaaataaatattctttccttcttattctactagagtttccacagatttgaaatacagaaaacagccatggggccttgtcaaatctttaattgaaaagaattcctggagttctttggaggactatttcaaacagcttggtttgtaaatttttttatttatctatttttgtaaagatgggatttattaacaaaatggattgattcttcatttagatttgtaacagaaaactggtcaatgatgttggaaagactcccatgaaagtggttcccactgtcccactttttctgccacttagggaatttcaaaacttttaattttcattggtcaaacaaacacttattttttttattttttattttttttgagatggagtcttgctttgttgcctaggctggagtgcagtggtgcgatcttggctcactgcaacctccgcctcgtgagttcaagcaattttcctgcctcagcttcccgagtagctgggactacaggcgtgtgccaccacacccggctaatttttgtattattagtagagacgaggtttcaccatcttggtcaggctggtctcgaactcctgagctcatgatccacccgcccagcctcccaaaatgctgggattacaggtgtgaggcaccaccgtgcctggccgaacaaacacttacataatgcttattatatcccagacatacataataaagttctatgtgctttacagatattaactcatttcatactcagaacaagttaaaattattatttttcattttattaaaagagaaaattgaaacacagagaggttaagtgacttttatcaagatcacacagttaagagctctcatacccctttgcctctgtaaggagccaaggagactgcataaactgatcatagatatacacctgtgctgtctaagctctggggagtcctcggggctaccttccttgtcagatgcagctttcctgggcttatgcagcccacttggcaatggtagtatgtacatgtatggatttggttggaggtgggtactagagactgactggggaaaacgatacggtggttctctttggatatttcttaacatatacatgcgagaaatatatatatatatacacacacacacacacatatatgcatgtatatatacgtgtgtgtatatatatatacacatatatatacacaagcataatttaagtttagttgaagaaaagctggtggtcagtcaactcaaggtaatttaaggcttatcatctagtttgctgataatttttcttgcctttcttccttgtctatttcattattgaattcttcatcaggagcagagaaaaatgaaactcaaaaaaaattagtttggccactgaataagtttctaataaaaattctggcagaggaaaagtttgaaacaaatgacaaaaatgaggtttataggttgtttacagattttctttgtgagtgcttcctttcttgtaaacctttgttgaaaattagaactagtatatgctactccttcctgtaaggttgagaagtaccataatctgtctttgaaatctttctaatgatccaatgtaagtgggtagcctgttgtttccataactgaaattattacattaatatgtattaataacatagcacatggcaaatttgctctgatgagcccatcatttattaatacacattcttcctggaataatgaaacctcattatggggtcactgtactctctaaagcttttcattaagtgtaaaatttgaatctaggtcataagaacctaaggaatttgttaaagaaaattatcaaaaataaccaccaaaacccattgtatcttatagttgaggagctttcctcactatataaagattgtttttttttttcttagaatcagatttgttaattgaagaatctgtattaaatcaggccattgaagaccctggaaaacttactggcctacgaaggagaaggcgaaccttcaaccgaacagcagaaacagttcctaaactttcctctcagcattcctctggagatgtgggcttaggtgccaaaggggatattacaggtagttgtcacctggtaaacagagatgaaagatttttactttagttatatgaagcagaatgtgcctcttgtttgtaagaatatgtcaggaggtctccttttcttccctcctttttggataatgtttatcaaactctgatttcctttaagataactaatatataagtataaaggagcagttgcaaaatggcaagcatataaccaatatattttatttggcccatgtgtcattttaagaattggacattaaactttttttaaaattttatttattttttctagatagggtctcgttctgttgcccatgctgtaagtggcacaatcatggctcagtgtaacctcgggctcctgggctcaagtgagcctcctgcctcagcctcctgagtagctgagattacaggtgtgcaccaccacacctggctaaaattggacctttttatataaaaactcagatctgacagtccagcactgaaatcccttcatggcagcagtttgttggagcatagtagtagctgccctgttagactgagtgcgccccagcttgccacagcccccatcacaatcaccaccctgccaacttctgaaccactttgcttatttatttgctgcctagcatttatagaaattcaatttctacgtttgagtgtactgctctcttaatccttatatactgtcagggccagcccagcaaaattgcaaagataacatttgacttttattatcttcattctcaattttgaacacatcttacttttaataactgttattcccttcctctcagaggtataaaactgtcataacttctcatcctcttacattatcagatcttcctttgaggcttgtagcttagtgttgactatgtttatccactatttaagattaatggttctttaattttggaatttaaaagtttgggtaacaatgaataggtgataatgttttgttttgttttgttttttaactagggaagcattttatgtaagcccagttcaaatattatttggagagatatttgcttattgattattagctacttagctatcaagcatgttgtattgaattgcttgtttaattttagagtaaagtaatttgcaatataggccaaattttaaggagtgctgaaagttttctctttgtagatttgtttcatattactcaggatgtcagaaataaaaaaaggggtgcagggaatttaccctaaatcactttgtctttacaaataatttttaaaagttctttttcagttcttttcaaatgagtattaaatttctgtcagttgagggctgggtgcggtggctcacgcctgtaatcccagcactttgaaaggccaaggcgggtggatcacctgaggtcaggagttcgagaccagcctgaccaacatggagaaatcccatctctactaaaaatacaaaaattagctgggcatggtggcgcatgcctgtaatcccagcttctcaggaggctgaggcaggaaaattgcttgaacctgggaggcagaggttgcggtgagctgagatcgtgccattgcactccagcctgggcaacaagagcgaaactccttctcaaaaaaaaaaaaaaaaaaaatttggatcagttgtaatcacaattctcattctaatgcagcctttttcttgtgatctacaggaaagaaaaaggaaatggaaaactataacgtcactcttattgtggtaatgagtattttgtaagtatttgttgtgaatgcttattttgcttgtttcagcatttatctttaactagtttccaaaagaatttgaatgtatttgtatattattgtgtagaaattgccactatttgactattgccggcctacaaaaatagcaattttataggtttcagatttttagctttatatatgattttcagaagaattgttaaatttgaggaaatacaaagtactcattcaacagatgtttttattttttagctaatctgattaatttctatcatcataggtttttatgggaagttccataaatttaaagggaatatttatatatacatgctggggaagtgccaataatactattttactctatttgattggacaaatggttcttacgtaactctgctgtgcctaagaatcacttggggtgcttgctaaaatgcagatttcttgacccctgtctcagagattgattcagtaattcttgagtaggcatcaggaatcagtatttttaaacatacaccccaggttattctgatgcaagtgatatgagcattacatggtgaaaaatactgggacaatgtctgaatcccagggtattctataggaatccactcagccagtcatatttagaacactaatatctatatgcctctatatgaatcttgaggcactatgttagatttaattgaattggttctgacttagtgatatattgaaggtgataatttttggattggagcttcaatattagcttttttttgtctaattatagatttcagaacatagaagatgtttgttgttcctttgggctttatggaagatttttatgttctgcttaaatcagttttctacgacagttctgaatagcaaatattatcagtgttcttttgcattactttacagaaaatgtttactcaaaagttggaatattaatctgtataccatttcaatgccataataacttcaaagattggattttcttgctactatcttaagtttttaaaaataaatcttcttgatgggtaaaagtgaataagggcaagttaatattttaatagaaaaagtagacagatatgatgccacctgtatatttgcatatatatatatatggtatgtaaccattcacttgaaaggctgctgtgaaaaccaatacattaagttcatttagcatgtaacattttatatatgacaccattaatgtatatttgggacttgatacttcctttgtgcaagatgaactagaataatttttgctgaatggtaatttttttttttttctgacttccactgggagtaagaggtacatcatgctctacctgagatcagctacatattgatcttcatttccttttctgaaaggcagcattatgagcgtataattgcctaagccaaaggcacccaaaaatagatcctaaaagcttatctggtagatttcaaagctggtggtctcacatcaacactgactagtattcctagcagaggggagagatgtcacagataccccaaacctgtgagttcggattattcaaggacttgtattgtcactctaattaccttccatcttttcctcaacctccacttaatacttacaagtaattatttcatataataaaatagggataattgatttaaataataacaacaatgaaaaacagtgtagacaatacacatttttgaagcttttgcatgtatattctgcattagcaatgctttaggtctggaaaagtgtggattaacatataatttgctctgcctagtgtgttgttattagttttgttgaatgtgacactgtttctgaagctgtcaaagatagaacatgctgctcagtccttttaccgtctccgcctccaagaagagaaatctttaaagtaagtctttttccccctgacctgtattcaccatattatttcagtaattcttcagttgcagaaaacttaatttcagtttcagagactgtggtctgctaactatcctgtagccataaacagcctgtttttgtttgtttaattttgtgttttgtttgcaaatttatggggctctgatgatttctggaaatgaaaaaaagatcagaagctattctccagattttgaagatggcatttttctttcagtttagcctctgatatggtgtcaagagcagaaactattcagaagaataaagatcaggcccatcgtttaaagggagtgctccgagactccatagtgatgcttgaacaggtaggcaactcgatacatcacagtacttagtatctttgtcccagtatgaattagttgctcttctgtgtatgagagaatatttaccctactatcgtttgaaaaaatccccctgctagagccaactacccctgccagtctctagtatgcaagggtattacatttattatgtagtcacttttgtttatttatttatttacaaaatgggagtatacaatatacactgttgtatatcttttttcaattagtaatatattctgaagatgtttccatatcagtgtgtatacatctacttcatttttattgatctttctaaataaaattcgatgcataatattaagctctttttacaggaatggtagctattacatacactgtccattattttacttttatctattaaccatatatcttggagatacttccatctcagtatataaagcaaacccccttaacagctgcataagattcaactgtataaatgtaccataattatcttactagtatttttaccactattgccaattatctttacagacatttaatatttgcagacatttaatcccctaattttctgtttataaatctctcagaatctttattcacgtaggtactccattgatgaggtcttctgatggctccagtcaggtccagtggccctctatgccgggtgcacagctatcattctggggttcctattgtctgtgtgtgtcttctgtttcctatatcctgtgttttcctttcttagtttacttcctccttttaatggagcacatccaacagtagcttcctgagaagagaatttggaggtaaatattttaagagttcacctaactgaaaatttttcattctactttttctcttgcttataaatggtttgatgagaactttgaaggcattgctccattatcttttggttccagtattgctattgagaattctgaggctattatcactcttgattctttaatctggaaactcatgcctataattctggaatttttcttgagtcatatagttgattatttccttccctcattttctctctcctgaccttctacaactcctgttattcagatgtcagccttctgttggatgggttatgtaatattcttaccttttctttccatctcttagtctttttggtctgtttctgggatattttatcaattttatcttcaaattcttccattgagtttttcagttttcgctaacaaattttcagtttcaaagagctatcatttttctgaatgatttcttttctttgtggtgttgcaattttttttttttttttgagatggaatctcactctgtcacccagtctggagtgcagtggcacaatctcagctcaccacaacctctgcctcccaggttcaagtgattctcctgcctcagcctcctgagtagctgggattacaggcgcgtgccaccatgcctggttaatttttgtatttttagtagagacagggtttcgccatgttggccaggctggtcttgagctctcgacctcaggtgatcctctcacctcggcctcccaaagtgttgggattaaaggcatgagccaccgtgcccggccatcttttttttttttgagacaagagtcttactctgtcacccaactggagtgcagtggcatgaacacggctcactgcagccttgacctcctgggctcaagcaaacctcccacctcaccctcccgtagctggaacttcaggtgtgagccaccatgcccagctaatttttgcagtttttgtagagacaaggttttgccatgttgcccaggctggtctcaaactcctgggctcagcagatctacctgccttggcctcccaaagtgttgggattgcaggcatgagccactgctcccagctgcaattttttttttttttttaatggctaccatatctttatctctctgaagatattactgatagttaacattttttaaatcttcttctggcatactcattttgcatcaagatcttcaccctcgttttaatttctatctttaaggttagagaatttctttagtgtttggtagcccttgcttatcttcttgtgtggatctgaagctctttacatatggattgggctggtgtaccccaaacttctctgtagatctggctgggctcttggctgagaaatcctggttatcagcacctttgggtcagtgtccacagagaagactcctccagtctccaacctggtggatttagggctggctgcagcgttttaggagctgagcggaagagggataggggaaggaaaggcagaaaggatggtcccaggattcagtacatacattttcctgtattacccttgtttctggtatgtactgctatccttaacaatgccttggtgtccctcaagccaggcagccagagaccctctgttttatcctgcacggaaaataaaattccagacttctgcctaggtagtaggaaaggtcagatgccgaaagtttcatgcaatccttcctttggctcttcctctttattctcacttccagagcttcctggtcattaacacctgagccttttgaggattctttagggttaattttgttggttctcagcattacttttactttagaattcagcttttccaggcctgctgagtcatccatctgctttccagtttccaaagttgcattactgttgtctccttttccattttccttgcccttatagctttatgccttctaaaaaatctctttattagtagagtttgagggagcaaagttggatgtgtgtatttattccactcattcactcttcagctcactcctgcctgatgttcttcccgcatggtttccccaactaatattgcttgagccaaggtccccagtgacatctggcttgtaaaaagaatgtaccttttttcagtcttcatcctacagtgtcagcatttgacagagctaaacacttctttcttgaaatgtatctaatgtatctaatcttgctttctttaaaaccataaaaaaatctttttgtgatgtaatttacatacaataaaagtttttattcacaaggttgtgcaaccatcatcactatctaattccagagcattttcataaccccacaagaaaatctgtacacattagtagttaattcccatccctcactccccctgacccctggcacccactaatctaatttccattactatgggtgtgcctattctggacatgttatatacatggaataatacaatacgtggtcttttgagattggcttctttcacttagaaaaatgtaaaactaatttttgctagttaaaaacatctccttggctgggcacagtggctcacacctgtaatcctagcactttgggaggccaaggcaggcagattgcctgagctcagaagtttgagaccagcctgggcaacttggcgaaaccccgtctctactaaaatacaaaaaattagccaggggtggtagcaggcgcctgtagtcccagctactcgggaggctgaggcaggagaattgtttgaacccaggaggcggaggttgcagtgagctgagatcatgctactgcactccagcctgggtgaaagagcgagactccgtctccaaaaaataaaaataaataaaaaataaaaatatctcctctgcctgacttcctcctggcccaaatgctccagggctctgtgttagattctctttccttctctattactctccctttaggtgatcttattcacacccctaactttaaataaccacacgttccaatgactcctgtcttagtccatttgtgctactataacaaaatcctggagactgggtaatttataaagaacagaaatttattgctcacagttctgaggctgaggagtccaagattaaggttctggcatgtttggtgtccacctggcagaagggactgaaggacaaaaaaggggactatttagttccctgaagctcttttataagagcactaatccattcataggagccgtcatgacctaatcacctcccagaggccacgtctcttcatgctgttgcattggggattcagtttgaacgtgaattttgaaggggacacaaatgttcagatagcagcaactcccaagtccgtatctctcacctcgacctgagctctagactcatacagtcacttgcctacttggcatcttcacctggatgactaacaggattcccaaactgattatgtccaaaacagaagtcaattttcctctaatccaaaacctaattctctagtgggtctcatttcagaaaatgatgctaccatccaccagctgctcaagtcaaaaacttaataaaatatctaagtatatatttatgtatgtgattatttgttttattaatagttctggatccctgactagtctgtaagctccatgaaggacaggacagtgcctatttggttctccattgtatatccagtgcttagaacactgcccaacatgtgataggcaagcaacaaatatttgttgaatgaatacaaaaaaagagtaagacataattcctgctcttgagttgcacacaattttcttagagaaatgagatgtccaggtgtattgttaatgacaaagattacaaaattcagtgtcaaagtgttaagtagtaaggataatgctttgggagtttataggcagaatgactggggaaaactacatgaagagtgtgaatatgagtaagttttaggtgaagaacatgaggatgagagcatgcaaaggcactgaagcaaacttgagttgtttaggggatagtgaggagaccactgcaacttcagaaatcttttaggaaaacgagtctgtcactacgcttaatttgattaatggacctattgggaggtagactatgtagcagtaggaagaagtacaatactccagcaaatgggaagaactctgtagcaatcatactgatagataccccaaagaatcaggtattttgtatttaacgttttatttgggcatcagtataaacaaaactatattaagtgtcactgtaaattttgggcataaaaaacagaaattttcaaatctgattagaaaaattaatctgattttgaaaattaactttgtttacagctgaagagctcactcattatgcttcagaaaacgtttgatctactaaataagaataagactggcatggctgttgaaagctagtgatctgaaggactaaaaccgcagagatacttggaacttaaagaaaatacctggaagaaaaccagacgaatgaaggattttggcatagaacatttctatgttttttcattattgagatttctaatatgaacatttctttcagtaacatttatttgataattagtttctgctggccttaataatccatcctttcacttcttatagatatttttaagctgtgaatttcttcagtgaaccatgaaatatattatagaactgaatttctctgatacaaaaagaaaatgacacaccctgaattgagtggtatggtctcatttctacagtgaagtctgatgctttgttagcacagaatccgtacatgtccaataggtcgcttttgtaactgagataagaccaagaggataaacaggacaatataagaagaaacctctatgtcattactgattttaaaggttctgttttcaggcatataacatttccaggtttgtgtactgtaaagattataatgtcttcatttatttagcatgcaaatttaatagtcaaactttttgaatctgcatgttgatgatgattatcagaaagggtcttctgccatgctgtatctttatgaaagaaatagttgttttttcttaaggtaactatcagaggtgggattatcttgcctcctcacttagaataccaacagtcaaaaggaagaaccatcctctgagttttaaaaaccagaaggttatgttaaaatctgggcatttagtgacagatcaaatgcatacttgaactaagattggcttcagcttagcagtctttcatggtggaagtgacacatctggttgaaaataatttgtgtattttcagtaaccatgtatggcttccttctttatgtatgtgtgtgacttgttttgattggtaagttataagccagacatagattttagctctttaataaaaacttcaggggcacgtatgtcccagtacaagtgtactgactatcaagttttaactcagatgcaagctttggctctttcataaaaagtttttatgcatatgtgtctccatacaagtggctcattaaaataagaactttgtaaactgacttaaaatcagatattttttcaagagttagggaaagttgaagtgttttactgttttgtctcttgagccctttctctggggaaaaaatacatatccatctatctatctatatataaactgtgtatacattcttactgtttgaacaactattgcctttaattaaatgtttcatttttctccagagtccccaaagccacatggcattattatagtcatttttgagatgcctgtagagaatgaaagtattgactccgttagagggaaaatgggtttctctgggtgaattccaacgaagcatacctaggggtaacagtgaacctacctgggtttgttttgttttggtaaggatttatgtagtgtctggctgtaagcaagaatgagtggattataaacttgaagatttctctgttaaagtcacaaaaatgatcgacaaacaatatttttgtgatgtttatttaaacgttgtattttataacatacttcaaggaagagtatcgaagtaagttgctttataaattaagactaaattcgtatggatgcagaattcaattaataaaatttgagcctgttacgtaaattgaatattaataaaattgaaaatttctgagttgtagtttttcttctttttctacttaaaaacaaaactagaaagcctgcggtagtgaaacgtgtacatgggcccacactctttaaagaaattttgtgcaataataaaacccaaaaaggactctcatctcagggcagtttcatctcaaatacacagacgactggaacaaaagtactagcgaggcctgctggtccaatgtaaaggctgctagccagaaatcatgaaacgaacaggttgctaaatgaacagatccggcagcagtgatgggcctttaagagaaggtcagcgaaactgggggaggtacttggataacattttgcggtggaaagctccctcaccgcctgttgccggagtctgaatgaaggctggcggctccacggtctcacgtagttcggaaatcctccgggttcccgggtttcccgtatttccgtctccgcacctcgtccgcaccccggggctccggaggctgtcccaccggcgcgccgcccgcaggcaccggcggcgcccggctgccgcctctggggcggggcggggcgtggcgtggcggggcaggccggaggtgcgggacccacctcctgcccctgcctcctggacgcgctctcgggagccgattttccccttcccggcgccagggccgcgggccaggaggaggagcctcgcccgcgggcaccgcggggaggcgggcggcgcacgtgcggacaggcggggaaccccggcgccgggggcggggcacccggaagcgcgcgtggacctggcgcaccgagccgggcgggcggaggggcggttgggacggcgcggggaggcgggcgcgccgcccgggccgcggcgggctgtggtcacaggtgggcggctgcggcgagggagcggccgagcggagcccgggtcccggagactcctgccgtcacgcccggggctccgcgtagcagagatcgggagacgcgtctgtgcctccggggaagccgacccatctcccctccgcctctttggctgcagttgcacctccggccagagggcaggtaacttcccttccaaggtcattctcctggcggggtggtgcgcgaggcccgcccacgtcctccggattggcgggggcgggagaggcgcaccctgcaaggggcccgaccagttgggctggaccgcgacccctgagcactgccagggagcctggtgtgtcagccgctgctagcgggcatatgcttcgcctttccctatagccccgaggctgagttcccaccagcgcccaggcttggagcggagaccgctcggccctcccagcctgcacccgcaggtgagcgcaaccgcccgcgccccggctgtcccggacgcgtggtcggctgtcgccataggaacggctggtgcccagacggcgcctgcccaggctgggaaggggcggtgaaggcagctcagacctccaagaaccctggagccccctgtgtggccaggcggagccacagaagcctgatgaaaacgggaccccctccccctctctcttctcatttttgattgctcaggcgttggaggttaagcagagagagagaggcgtggacctatttacgagatgtaagttgtgttctttccacctttaccttctgagggcttcttacgcctcatggtgacaggtgcaaatcatgacacagaagggcagtatgaagcctgtgaagaaaaagaaaaccgaagaacctgaattggagcccctgtgctgctgcgagtacatagatcggaatggggaaaagaaccacgtggctacttgtttgtgtgattgtcaagatctggatgaagggtgtgatcggtaagaacagagcatttcttgacgctggccccatcacccttctgagaactgccatgtgtactttcaacctagccacccagaatgctagaatttgctcttgattctatttccaagcatctaaaatgagagttggcttctgtgtcaagtgtgaggattttagaaagatggattacgcagtagtgcacagctgtctgtctgctctgttttataggatattatttttcgtttaaagagagatgagggagagaacaggcagtttaaagggatagtaggcaagttagtataaaataaaatgcaagccagcagaatctgtaagtttaaaatgaacacaatagttccagaaagttcctgccttctcagaggtctcagcatttagagactgactacttgggactgggtggcacctgaccacagagggccttgtgggttgaaatttcattttcctgctgttagtactggtcttgccccttgtttctggggaggaactccagccagaaggcatgtatctcccctggattcacagttttcagtgcgaccagcaacactcttgattgatcatactgtatttggcttttattttccaagtgatggaaattactatccaaaaagagaatttttaacatcactgaaaaaatttggtgtcggacagtgaataatctggttttaatccattttctgagtaattatatatttaaaaatcactgtcaatggaagtcataatgtgggaaggatagggatgttggaaacttgcttttcccattaataattatttctggttaaaaaagtcattgcaactgccaatttgttgacttagaacttgatacattaatacagccatgaaaagcattccctggggtctgcagtctagtaccagccttgactattaaaaacccagtgaaccctttgtcgttcttacttgacagtgtactgtgtagtcttttttatggatgtctttgaatataggttctttagatttagtctgaaatctatactgagaaaatagagcactttgcactaatgaatggagaaatgatgctgtttccataaccaccatcactcaagaccgcagctcttccattaaccttgctaactcttcctccctcctagccctggagaccttggctgtcccctgaggcatctcctctgctctctctgtacccctctcctctgtgtttccaccgtgcctgctgctctgtatgattcccaattagttatctctaagttctagtcttacctttaaaaattgtctaaaatcaaagttacctttccttaaactctaccttttcttactagcctgtcttaatttgttcaggctgctatgataaaataaatacctgagactgggtaatttgtaaacaatatacatctattgctcacagttctagaggctcagaaatccaagatcaaggcactggcagattcagtgtctggtgagggcccttttcctcatagatgacaccttcttggtgtgtcatgacatggcagaaggggtgaataagctcatagggctctattataagggcacaagtctcattcatgagggctgtgccttcatgacctaatcacctccttaaggtctcacctctgaatactattgcattgggaatgaggtttcaacataatgaactttggagggacacagatacttcctggctccctaaaatttatgtccttctcacatgcaaaatacactgatttcatcctaatagccccaaaagtcttagctcatcccagtgtcaattcagaagtctaagtccagagtctggtctgaatatcatcatccaaatcagatatggatgagtttcaagatacgattcatcctgagacaagttctcctccacatgtgagcctgtgaaatcaaacaagttaggtgcttccacaatacgatggtaggacatgcatagaatagacattcccattccaaaagggaacaacaggaagaaaggagtgttactgacaggtcctaacccagtggggcaaacaatgttaagccttaataaggcttgagaataatcttggacttgatgtcctgccttctggacacactgggttggcggttgggcccccaaggctctgggtgtccccgccaccacagctttgttgcgcacagcccacactgcagctctcatgggttggagttcctacaggtgcctccagctctcccaggctggagttgtatgcttgtggctctacggggctcttgggggtgaccctgtccccacagctccaagcaggcattgcctcagtggggtctctctgtagtggccccaccacaatgacagctccactgggcagtgccctagtgggggctctctgtggtggccccacccctgtggcagtcctctgcctcggtcccgaggctctccagggcatcctttgaagtctaggtggaggcagccaggcctctacagctcctacactctggatgcctgcagcattggcaccctgtggatgccaccaagatttaccacctatgcccttcagaggggtggcctctatggcatacctaggcccagtggagccacacctggagctgccatggagggtgcaccagaatgtagggagcagagacttcagatggcactcagcagtacaccctgaagccccatgggtgccctgggccctcttatgaaactgtctgccctcaaagccctggcacttcaggtttgtggtgggagcagcagccccaaggatctccgaatgccttcagggtccttccattgtcttgatgactggcacggggctaatccatactgatctcatctacatccttgctgttctctcccaaacatgctttctcatttgttacaatatagacaggctgagaattttccaaatctttgttttactccccttttgattatgagttttgtctttaaattatttctctttggctgggcgcggtgactcacacctgtaatcccagcactttgggaagcccaggtgggcagatcacctgaggtcaggagttcaagaccagcctgaacgacatggagaaaccccgtctctactaaaaatacaaaattagccaggcgtggtggcgcatgcctgtaatcccagctactcaggaggctgaagtaggagaatcgcttgaactcaggaggtggaggttgcggtgagctgagatcgcgccattgcactccagcctgggcaacaagagcaaaactctgtctcaaaaaaaaaaaaatttctctcctgcattttaccctaagcatttatgagaagccatgcagcaccctgaacactttgcttagagatttctactgccaaatattcagtttaatcactcttgagttctactttctaccaaacagtaggacacaaacacaattccactgagttctttttataagtgtccaggatcacctttcttctaatttccaataacatgtttgtcacttccatctgagatcttatgagaatggcttttactgtccatatttctgcgagccttctgttcattacctcttagggattctcgaagattgaggctttctctgcagctctcctcttctgccagaatcacccttgacagtttgttcagatagtctaggatttttcccagcatgcacttccacactcttctaacctctacccgttacccggttccacagctgcatccacatttttagatatctgttgtagcaacatcctacttcttagtaccaatttctgtcctagtctgttcaggctgctgtaacaaaataacttaggctgggtaatttataaacaacagatatttattgctcacagttctggaggctgtgaagtccaagatcaaggcagcagcagattcagtgtctggtgaggtctcctcagcttcatagacagcaccttcttgctgtgtcctcacatggtggaaggagcaaacaggctcccttggatctcttttttagaggcattaattccactcatcagggctctgctctcatgacctaataccctcctagaggccccgtctcttaatactcttgcattggggattgggtttcagcatatgaattttgggggcataaacatttagaacatagcatagcctaagtgtgcaaaacagtcaaccaatatcattccattcaccaagttcagtgatttgactcatactagtttgatctccattcttctctatgtagccctgtccctgtgggactagtctactccctgggctcatgccaggtatgtgctgcacacatttctttccactggaaggccttccttactccctctctattcatacacatgctagctggacatcaaggttgagcacagatcccaccttttccacaaagacccctctgaagactccacccagaagtattgatgctagtctgagcactccttataatgtttgatcacaagagtttattgattattgctgctttgtcacttacctaatagttcttaaattcccatgttgtcctcataactagattgtgatttgttttgagattcttatgaccgtacaggtcataagatgtaaacattacttgcagcatgtgtctgtacctatgtatttgtttaggggagaaataatcttgactttaagtttttaaacatcttgttcctattttaaaaaatgacatgtgaatctgaaaagcttaatttagtagtaaggaagtaaaatgcttggtctttggtagcttttatcgtttatcccactgtttggcattcagtgttctgtagcttttaattcaacaaacccacatgaagtccctcctctttgtgctttttctgaatagatggattacatgtaaatctttacagccagagacttgtgaaagaatcatggatacaatttctgatcgcctccgaattccttggcttaggggagccaaaaaagtgaacatcagcatcatccctccgcttgtcctgctgcctgtcttccttcatgtggcttcctggcatttcctcctgggggtggtggttttgacctcccttcctgtgctggcactgtggtactactacctcactcacagaaggaaagaacagaccctgtttttcctgagccttggactgttctctctgggctacatgtactatgtgttcctgcaggaagtggtccccaaagggcgtgtgggtcccgttcagctggcggttcttacctgcgggttatttctgatactcttagccttgcacagagccaagaagaatccaggctacctcagcaatccagcaagcggtgacagatctctaagcagcagccagctggagtgcctgagcagaaaagggcaggagaagaccaaagggttccctggggcagacatgtcgggcagtctcaacaatcgcacaacaaaggatgaccccaagggctcttccaagatgccagctggaagccccaccaaagcgaaggaggactggtgtgccaagtgccagctggtgcgaccagcccgggcatggcactgccggatatgtggcatctgtgtgaggagaatggatcatcattgtgtctggtatgttggaaacatttggagacttggaaagtgtaaattcatgtaaaactctagttacattttatcttcccttgtgctatcccaaaatttctctccttcccagctttacaccttgtagatatttgtgggttgttgtgatgttcccacttagtcatcagtttttcgagtttcacaaatttagttccttcagtcatttcctgaaggagaataacagaaaacttgtggggttttttttttctcaattttcttttgaatgactcctcatttatcttttcctttctaatagagaaatatctacagttgaatgattttttaaaaaaagaattgatcagaaacagtataagcatatttccctgtgctattcctttttaaacataaagctcaagaaagtgtacccctatttttaggtgactcttttgtccccttgccatacatacttaatcgtttttgatgctaccgatgatttccacttaacattattgaatcgaggtcccaccagataaactctctatttgattatttgcagagaaatgggcttttgtacctgccagttggccagtaacaaacgaaggtacataaggctccgtaaaatatgaagtgcaatgtttaaagataatgttgcagcttcactaaatacatctaaactaaagggactataattaattcagatatgaatgctgtaagtagcatgtttgcagtttattgctcttcaggcagtcgtgatcaatgaattaatgcttttcgtgtctaggattctggtcctgtagcgtacctcctcctcagaaggggatgcaggagagggtgagggtgcagaaaaggctgagaggcattggcgtgggcctcaagtgcatggctcaagtgcagggcagctcttttctgggtccttgtctttagaagtaaacaggtgttttcatttttagatgttctacttctgtgtcttcacttattcgtgtgtgtgtgtgtgtgtgtgtgtgtgtgtgtgcgtgtgtgttccatttacaaatgctggtttgcagaaggctcacctaacagcagatatgtgcccactggagcatcctggcatgcagtgggtagaaggcactccctctacattctgccccacaaatggccatgacacagaactgtttttacctgccaaagagcctgcatgttatcaagttgttcttccccctacgctatgtttctaacctctttggatctttatattactcttcatatatttaacatgaattttcccatactatgtaatacttctgatttagcatttttaagttttcataattctatttatctccctttccttaacatggtgaggacaatgttagatctccatagctgggtaatattgatatttaggaagatttgttagccaggttctgctttttatacttagtcttgtccttaaactgacgatatgattccactttgcgaagagtagagaatataagactgcattcctcagggtgcaagtttttaattccctaaaattgaaaaataagagaacttcttaataactggaatttacattttccctatttaaaaccttgtcttggctgggcgcagtggctcatgcctgtaatcccaacactttgggaggctgaggtgggtggatcatgaggtcaggagttcaagaccagcctggccaacatggtgaaaccccatctctactcaaaatacacaaattagctgggcatggtggcatgtgcctgtaatcccagctacttgagaggctgaggcaggagaattgcttaaccgggacccgggaggcagaggttgcagtgagccaagatcgcgccattgcactttagcctgaactacagagcaagactccgtctcaaaaaaaataaagctttcatgtttattatgtaagttatatcaagaactcttaaaaatgtgtttgcttttttatttctctatgctgttttgaggataaatagctgcgttggagaatcaaatcatcaagcatttatacttgcccttttgatcttcttgctcacctcggtgtatgggatcacactgaccttggacaccatttgtagagacagaagtgtcttcacagctcttttctattgtcctggagtttatgcaaattacaggtgagcagtgggtaccacagtatggaggccccctgggaagtaatgggtgttgccattgacagggactattactacttggttaggagttctcaatcaaaacataggccaggctatggaaatgctgggtatccctggaattgccagcaaaattgtgcattggtgatgtgtgtttttcaagggtgctgttaaaaggattgttgacctttaaaaagtgaagaactagttctctacaaacaggaccaggcctaatcagggacttccagagtcaaatgaccactcataggctcaaaagtcgcaacagtgaaacagaaacaataaacaaaaactagcagccccagggcacatatgtgcctattttgtcataacgatcagaaaccttctcactttactgctgctttctgatgttttttagtccaatcttaatttactgcttccgacccttttgagatgtgctcgacatctctataaccttgcttttctttctaacctctcttggtttttcctgttctactttctttctttttttaatcaccactgatgattactgtgatatgtaggtcaaaatttccttaggcccctttatagattgtgaagatttccaggccatggcaaaatttgggattcttccgcttcggcctcagcgccccctccctgaatgctggggcccccctctgcccatgctctttattcccttcccttcatcatcctctctgacataagtgctctggggtatctgtggtttggcccttttctttattctcactcttcattttcagaacaatccttgctttctttacaaagtatccctttgtggcatttgtttttattagcctgtggacagatctccccattgtcatcctagaaccagacacctgtgggcattattagaatagattggtcttcctcagattaagtttccttcctcactgtgtggagagtatctccagcatgtgaatgaaattctctgctaacgctgcaggtgaggcccgtcctgaagcacagcatgtctgtgcactctcggtgcggaggcgagggaaccgaggaatacagtcctgccattgcttctcaccctgctctgtgcaggcgattcacagcacctcatctttttggttaggtccttggatttaatagtctttgaggtcccttcagcttttacaaatgaagattctgaatgaacttatttctaactaactcttaatttgcgaatgttggaaaatcatcaaatggcagaggctaactggcagcctgtctcattagtgagcctgagaggagcttccctaccttgtgtgattgtgttgggctttaggagggtgaatttggaatgtctcggtgttcctacatccaggtaagcacagggctgctggggttgggagtcgtccatcgtcttttcattcctcagcattggactggaaagaatggagattagtaactttagcactgttcctcggcatccacctgcagcttcctagaagacatttatagcagtcccttggtgcctttgttttctcatgagttagatgtaatttacgaattacttgtttatttaacaaacaggtgttgaacgctgttatgtcaggcagcgtgctgggtgtgtggagggtacaaaatgcaaaaaacagtccctgctattctagtgtaatatactagaaaataggcaccagtaattatagaataaacacacacattctcctacttaagcaggttattggcattctgagtatcttccagttcggagggttggggaagatgccaaagtctttagtaataagtaaaaaaatgtgtaaaacgtgagaatgatgacagttttctgaatttgacaaaaacggcagccctgacagcctttttccctctcctagctcggctctgtccttcacctgcgtgtggtactctgtgatcatcacagcaggcatggcctacatcttcctgatccagctgatcaacatcagctacaatgtgactgagcgggaagtccagcaggccctccgacagaagactgggcgccggctcctctgcgggctcatcgtggacacaggccagtacaataggggcttcctgcggaactggcaccagttctccaccctgggcacacgtgcattccaccaccctgccgaggacattgtctgaagtgccttctatgtggctctctgagggatgatggctcctccttccgtctcccttccattttacacttcagtgtccatttctatccccagtttcttaaaggcattatagggccatgctcaggtttagagactggagtgggaagaagttaatttttctgacgccacaacttaagagacttttatactgaggcagtaaaagtagagccattcctttccagtcacctttttaattgactcagttgcctgaacttgagaaggatgtggattgctaatgcacaaattgatagaagcaattcccatccattagtatggaggaaagagtgttggattaggatagtttctagtccctctttcgattcttaatagccatgtgacccctagctgagtcactttcccaagtctcagggtcatctgcaaagtggggtactgatgcctgccctggctacctcacagagccgtcatgagggtcacgtgagggaagatggatgtggaaagcactaaaaaacaactcaagagccatggaaatacaaagtattaggaaaatattatgatggaagaaaaacgtttatagtctagaatattgaagccaatattattagggtaatcagttttcagcatataccttgttgtacagttatgagaatttctccttcttattagacatgaactactcaaacagagaagatgaccagatggattgatgctaagttgtctcatcttgaaaagacagttgacaacagttataaagataattattgctagtgtaatgtagtgtggccatgagtttaggtgatgagttcttctatttatattttataaattctgcttgggtttcttataaataactccaacaggcattcatgtgtttttcctcttcccatgtttcaccaggtaaggtgctagcacacttgtgactgtggctggaagaggagaacagacactcctgtggggatgctttactctcttttctggtaggaaggctgagtaacatcacgggctcgattattttcttcatgtatttcaaatgctgtcagttatagcactaaattgtgaaaatcagccttctggcattcacattattctggtatgaactttgaggagttgagtgacatcttcccacttaacttgcacattaattctcaattacccctccctaaataacagtatctcactaagagagaagaaacagggtatatgtggtttccactattaatggattactgttcttccctggctcttccgacaataacaagttgtttctttaatcatatcttaaaaccgaaaatgtataaaagattaaatatttatgtacaatgggttgttctactatagaattaagatgagggaatttcagatgaggaaaatacccttttgaaatgttagttttgaacatgtactgttgtgcaatcccaaagataattcatgactccttaaatttgccttggcttatagcttaatatagggaaaatattgccagcgttttcagtcattctgtgcatgctgctttaagcaagagatttatatttgttgagaggaaatattgctacttcctgcacttccaccctctgcagccagcaccgtccctactgttgccattaattggagctgtccttaagatggtcaccatattcttattcaggctgttgtcattttccccagagatggtttgtttaacgaatgataggctctgtgcctggggatgttagcagactctggggtttgtacagtgatgccttctccctggcccagagctgaatattcatctagaattaaagttggatttgatataacaaatttctttctatacaggttttacataagagagacagtaataatgtcaaggatagcctgtgtgggcagaaattggtagtcgtgcttttgaatgtcagctgtagagccaactctgattatctagccattgatcatacaaattgatagaaacattagtcagtaattttagcttcttgccaaattgttcacaacatctaaatgtaatgtgatgtgatgaagataagtagtacaaagagaccaaaataatttgggagaattaggaatgatgacaattttttttaacaacttacctctaatagggttacttggatgagccaactccgcttccttcccatggataggaagggactctgtgtattattcaggtttattggcacgaagatacttgttttaagttccttgagaacccatgatggacagttgacagaatgcttaaacctgtcaaaagatgagtgatcttgtgtgggaaaagccttcccaggcgtctgtaccgaaaggagcagcaaacaaggggctaatccatgagcagtgttctgtaggctctgtgacatctttggtttataggattttggagccttttatgatctggaactatttgaggggtttcattataggccttggttctctccaggggccagatgagtttattgtggaatctttgaaaggacaaggcctctgtgaatgaatcagtcccagggaagcatttggtggtggcggcagtggaggattgcccggtgaacctataaatcagcagtctcttgggcagaggagcaagcccctcgaacatgatttcaaacaagcaggtcctcttctctcatctcacgtccttagtctctgttaatgaacatactggatgtggagtttaataaattacctactatcatctggccacttagattattatcacaccactgtggactgttcctggggggagaagaacagaccgatttgaaagattcaagggagaaagattaaggatcaggattgcatgaaagaagaaaatccttcaatatttaaaatgtttcttacaatacccacggagcacttttatggttccagccgagcgttcctgaaatgaactgaccattaacagcgcctctttgataggttaccctgatgctgctaaagtaaagccttaagtgtgtttttgggacaacgtgctgcttattccacctcagccacatatgtgtttgtgtttaggatattgtaaatctttgctaagtagtgttttccttggtgaatgaagtcattgttgtcttcaagtgtaccatctgcctagcaaaaaattgctacaaactttctcttatgcaatagtccttggtacttctaatatttttagcaagagacaattttctgtactagaatcttccactgccagaaaacacagtgccagtaaggttctacataccactgaccatctgcttaatagacatgtatttcctttgagtaggacattagcttttgattataaagctcaactagtataagcaaaaatataacatctagaagcacagttttagccaggatgtttaaaaattacagttttgtgagacttaagggtctttttaacctaggtaagtttatatgacctaacttaattgtagccatattctggtaccttccattttgaaaagtagaggttgcttaagcaagcaatggataataagagacttttcctgaggcacctgtttggaatctggttttctcagcggcagcttgacatgtgcacccttttgtattaaacactgcaagggtgatgcaggggagcaggaaagccatcctaaactcactactgagtacgattcagtatgttcctgtggatgtctgctgtgactaatataaatttcttgcagaatcagctacacttaattatgttgctgatagacaagcatccacgcttcagctggcactaagtgttttcattgtaggatcagcagcaggttaaagactgaacggttagtgaagacaaatgtcttaagaggctgcgatgtctaggttgggcttgtgacttcttagtggcctagccttcttgatggcaccttgaaagtgaacttctagaaatctacatttaaaaggcaaagctttaaaagcagagctagtctattctagttactgatgcaactaaaattctgtatttcttaagatggagccactgacgagatgtcacagtatagagcctgcagtctcaactcattgtgatcctaatggtctgggtgattggatggtttgagttgttagggattttgagtttttcattttattgcatatctgggttggatgttagactaaaggaaacccaggaatatttacctggtgttacatttaatatttaatgtaactggtctagcaacattaagggggatttctgaagccaactccggaggctgtgggctgcacattttgcactgtttttatatacttgtattcatatcctcttatcacctcagactcagacacaaggccttttacatggaaattttacaaattacttccatttatgtaaaataacgtcctgtgaccaagttgtttaaatggaaaataaagtgctttctttaaggaaaatagctggtgtttcttggagtgtctcctgaagtcttctgatttctgaaaaccctgcattatacctgtgctgcctctgtggctccctcaatgtctctatcctgtggccctgtccctagccctaaactgttatgttcccggtggcaatttctccagttttgtgggtcagggatactgcttgttggggcattatgttaacagtaacattttgaaacatactttcatgatagtccagcaaaaaacagcatcaaaactatttccattgtatctctttagaaggctctgtattcggtaaaaagtctagctggcgccattggaatatgggctgctaaagactcaatttctagttgatgtttgaggtgaggcaaaaataaagctaaggtagaaaacttaagctttgtgggatttatttatgcgcctggcatgttgacttaaggaactcaaccttatgtacaggcttggcatttaaagaaaactggtggctgggtgtggtggctcactcctgtaatctcagcactttgggaggctgagaggatcacttgagcccaggagttcaagactagcctgggcaacatggtgaaactccatctctaccaaaaaaaaaaaaaaaaaaaaaaaaagttagctgggcatgtaatcccagctatctgagaggctgaggtgggaggatcacctgagtctgagaggtccaggattcagtgagccatagtcaggccactctacctccagcctgaagtacagtgacagagtgagaccctgtctcaaaacaaaaaaaacacagaacaaacaaaataataaaattggtatttcatttccgggtgctaatatcagccagtattttgtaaatgtactgtagttaggtttaaactgttagtgattttgatggaaagtgatgtattatgaattacttttagttacattttctttagtggccattcatcttgaaaaacacaggttttttttttttttaaatgacaactgtataatcctattaaaggaaaagctgtgtgggaacagccatgtcgtagaagaaataaagttcaattcaaggtgtttggtcatatcacacatcctccgtgataaaagtatcttaagtcgtgtagcaggtggtacagctagatatcctttctaggaagtatgagacagtaacaagaacattcacttaaaaaaccacagaattttattttgtcaactcaaattttcagcacaccaaataagagtaatcatctcaggactgcacaggactttctcattttaccatatgcatttatggactacttgaatttgttatataataaatgtgtattttataatgaaaaattatttttctagcaggtaattctctaacacaattcatagaagagagcattttatcagtctttatagcatcttaaagatgaaaacattctttgaattcaagataggtatctcaatatctagatcaaactgagctgagtactagaagacaaactgagtgtattattcagcagttgcaggtgggagcatgaacagataatttaatgaattgctggactgtcatgatagagctattaccttttggaatgtccttcatgcttatcaaggtgcacggaagagaagcatctctggtgcctcagtttctctgaaatcaggataagctgctgtcctctgcagcagctgtgtagagaaccttttcatacatggtctgccttcaggggtggtgaaagtggacgaggtctggtggggtgcgtgtcactgatgctactgcactagaaggctgagtgccttggcccgcccttcctttccgagcactcacccctgtttatttctgtttcattaaggtcacatcagcaactcctgtcgtgctatacggacacattttcttcacaggctcagtcaggcaaacacttgtcctttttaaagtttactatgctaaaaatatataggatatatttgaacagacgatctctagaatgttcctttggatgatcccactgtgataaatgctatagtgaatgactagcaatccaggaaaagtcaaagaagggaataaaaattctcaaaataattcctttgatctaagaagtagctcgtagagaataaaccaggtgtatgtatgtatgtgtgtgggtgggtggagataacacacatacagactagtcgagcttcctgtcctaaatattacactaatctggctcattcgttcaccagacttgtcttactcaaggaccaagtatctgattgctgatatagctcgtggtaccttccaggtacctggaagtctggaagaatttcaactaccttcctacgaagttgctgtcgcctttcttcttttactctttcctctttcataaattttacaaacttcttccatgtccgaagggtgatccagaggatcctcctttaagaataaagaaggaaaaaagtgaaatgttgagaaaaagttggctttccatctatagcacattaagaactttataaaaataattcttatgttaataaaatgctgtataaaaggtgtggaaatcacaatcgggattatgacagtgtgaaatgctgtgaaaaaaataaggcaacaaaagggaatgagagtgactgattgattgataggttatttttatttttattttattttatttattttctttgaggcaagagtcttgctctgtcgcccaggctagagtgcagtggtgcaatctcggctcactgcaacctctgcctcctgggttcaaatgattcttgtgcctcagcctcccaagcagctgggattacaggtgcctgccaccatgcctggctaattttttttttgtatttttattggagacggggtttcaccatgttggccaggctggtcttgaactcctggcctcaagtgatctgcctgccttggcctcccaaagtgctgggattacaggtgtgggccactgtgcctggccagttatttttatttttgattgagtggtgaaggaaactgaggaggtgacatttgagcagagcaccaaatggcttccagtaacccaagctacgaggcacactcctgagttgatctgattatagcatacatattgtacccatgccaggaccagtgatgctggcaagggatccagaaaccacaaccctcaacgcaaaaatgatggaaaattgcgtgcagaatgtgccaaagttacaggcattgaggcctcagtgcgtagacatattttaaaagcctgctggtaacctgacctccaacagcagcaataacaacaaagaaccagtcttgaatatcagttgagaaaaaataccctaacatcaggttctggaaacatggtatggaagactgtttaagtgagtgtctgtgctgtcacagggaagcatgcaatggccttttaggatttattagtgtccaccacagctgaacactaggggcatcaaggtaagccaggtaccgtctgccccgggagaggctgaaacaggtgaccagagtttccatacagtgggaaggtacagcagtggagagcagcacagaggactacccagtctggtggtgaggagcagacctttttgaagatgatgtctgaactgaatttttgtcaggcaaagaaaaggctttcctagaggagagcacatcttgagtaaaggcaacgaagcgagaatagcatgccgtggtgtgtgtgtggagttacagtgttgaaacgaagtgcagagtagttaagcttatattttcacaactataggcagagatgggatttgttctggcctcttgaccatctgagggagtcccagaatgcacatcagtcctcattaattttatggctgttggttaatatttttgataatgctgatttttgttggtggaggtactgctttaaaaaaaggcatggctgggtgcggtgggtcacacctgtaatcccagcactttgggaggttgaggcgggtgactcatttgaggtcaggagttcaagactagcctggccaacatggtgaaaccccatctctactaaaaatacaaaaattagcccggcatggtggcaggcacctgtaatcccagctacttgggaggctgaggcacgagaatcacttgaacctgggaggtggaggttgcagtgagccgagatcaagccatggcattccagcctgggtaacagagtgagactcttgtctcaaaaaaagaaaaaaagaaaaaaagaaaaaggctccaaggaatggatttacttcattgcttgcttttatcca

SEQ ID NO: 5643 - DNA, 58452 bp, Homo sapiens
  LOC344657 gene - 171019812 - 171038263 of chr3; NCBI Entrez Gene ID: 344657; Build 35; sequence includes 20,000 bases upstream of initiation codon and 20,000 bases downstream of termination codon of the gene
taattttaaattatctaaagtgctttaatcatttaaaaagttcagagtttggctgggcatggtagctgatgcctgtcatcccagcactttgggaggccaaggcaggcagatagcttgagctcaggagttcaagaccagcctgggcaacatgacaaaaccctgtctttaccaaaaatacaaaaaaatttaggtgggcatggtggtgcatacctgtggtcccagccactcaggaagctgaggtgggaggatcacttgaggccaggaggtggaggctgccgtgagccgatatcatgccaccgcactccagcctgggtgacagagtgagacctcatctcaaaaaagaaaaataaagttgagaattcaaacactgacattgattgattgattgattgattgattgattgagatgaagatgaagtctcgctctgtcgcccacgctggagtgcagtggtgcaatctcggctcactgcaacctctgcttcctgggttcaagcgattctcctgcctcagcctcccaagtagctgggattacaggcacctgccaccatgcctggctaatttttgtacttttagtagagactggattttgccatgttggccaggctggtctcaaactcctgacctcaggtgatctgcctgcctcagcctcccaaagtgctgggattacagacgtgagccaccgtgcccggccaaacattaaattttaaacattgaactttataaagtgctttgaccatttacttttcctaatagttagatatatgtttttgtttataccaataataacatgagttcttattctctagctgtttacaagtgataggagaagaaagccacccagaaggagaaagaagtcatgaaagtaggaaccacatttttactcatctttctgtctccagcaagcagcttactgcttttcatacacattttgcttttattactcatgatttcaaaggtgtaatggttcagccacatcaatgtaacaaacagttcacactgggctcttatagtctggcctttaaaaccttcactatttatgctttcatcttaactactttgaccctcacaggtttactcactaagaacttgagtttcaagagaaaagatgacatgtttgctgcttaaacaagcaatatctaaaagcatatttagttataaacgtcttaccaagaattgatataattttcatttaaacatttttataaatagtagtttacaagatatagtaagtacatctctaaaaatacagtgtattcatgtaccttgacataaacttgtagtagtaccttagttttattcatgttgttatattaactaccatcactttgaatacatacctgttcactgtacagtataggtcggtttaggtttattgccttaattgcttggttttgagttagtactgtagcaaatgctatcacactttgcattccctaaaaacaggtaaattcattaaggaaacagacaaagtatataataatctcgctacataaatatttcaagatcagctatctgcattctgataaaattgtttttaaaatttaagcattccttggactttgaattgtaagttgatcaaattcaaaaatgaattgttactgtattcttctctcctggccctaaaatctatctaaaacatggcatggggagtttcttaatgtttcagtgtccatttcctgggtgtttccctctaggttttttttcctcacccctcaagcttctatgtggatcccagctagagctcatactacttatccaacacacatcattgtgcaagcactcttttatattcatactagtacttttaagtgtgtgtgcggtgggaaaaggttaccaatcacatttttcacagatcccataggcctctcttgctctatctgactggaagggcctagtctccccatatccgtgatggacaccaccatgtacacccagctggtatgccggaaaccatgggcttcctctcactctgccattcctcttaccttcccatccagttgatcactaagacttacagattctgctgcctccaaaagatgtctcaaattagtctgttcctgtccatctctgtggccaccaccccagcccaagtcctcctcacctctcacctggactactaagtggtcagatggcttcttcttgccaccctttacttctgcacagagaaaccagtgatctaaaaccaccaatcagatcattacccctcagagcttttccagatttccatgatttgctttttccatgattttcatttataatacaacccccacttcttccccttacctgtgacccacaacccacacaactttgccatatctggcctccataagcttctctacttttacttcaaggcactcttaactttgtctgctcagccattctgacttctcagttcttaaaacctgtgacacttgctattttattattcatgtacctccctcgtgatttttgccatatctcagtatgcaaaatatttaacactatttttgtttttatttatttattttttgagatagggtctcactctgtcgcccaggctggagtgcagtggcacactcggctcactgcagccttgacctgctgggttcaagcaatcctcccacctcagcctccctagtagctggcatgcaacaccatgcgtggctaaattttgtattttttgtagagacggtattttcccatgttgctgaggctggtctcaaactcctgggctcaggcaatctgcctgccttggcctcccaaagtactgggattacaggcgtgagccaccacgcccaaacttactttacaccatttacttaatactttcccattaaatcaactcactttttcaattatatttattttaaaataaaactttgtatcactgctgtaaatggaaaaccataatcccttgaaacaaacagaaagcatctgtaaaaataaatatatgagtatgaaaattacctcactctgcaccaagaatgctacccatgccacacttagggaagcactatcttaatgtctgtgcatgctggtgctctgcctggaaggttctgacatggacactctccatgagttttttctcatccttcataactcgtaaatattaccttagtaatataagtcttaggcaaccctcctgtagcagaattacttctccccattatcagagtactcagtcatttttgtagcactttcctctacttcttcattggtgtttccccaactaaaatataagtttcataagggcagaggcagaggccatgtgattcactgttgtatcattagtgtccagcacaatgactggtatgtggagatgataagtaccgaattaatgttttcccagaaccacactggctgcatctaccaccttaaaaagttaatcttggccaggcgctgtggctcactcctgtaatcccagcactttgggaggccgaggcaggtggatcacctgaggtcgggagtttgagaccagcctagccaacatcatgaaaccccgtctctactaaaaatacaaaaaaaaattagctgggcgtggtggcaggcacctgtaatcccagctactcaggaggctgaggcaggagaattgtttgaacccgggaggtggaggttgcagtgagccgagatcacgccattgcactccagcctgggtgacaagagtgagactctgtctccaaaaaaaaaaaaagttaatccttcagaatctattataccagagagccccctggcccatcttattttcatgtcacattgattaacctgaggctatacaacaggttcccaagagtaggcctaaagatttgaaagcatgtcagagaaagtgaagcctggaatttgaagacatgcaaaaaaacacatttttcattatcaggccaggtgaaggttcaaagcgacttttatcttttttaataatttttagagacagggtcttaccatgttgcccatgctggagtacagtggatgttcacaggcacggttgtagtgaactgtaacctcaaactcctgggctcaagagattctcccacctcagcctcctgaatagctgggactacaggtgcatgtcatgtcgcccagcttcagagcagcttttagcatcatcattttaagtttttgtgctacaatataagtaactactaaaaagtattttatttttgttttgagtcagagtctcactctgtcgcccaggggctggagtgcaactcactgcagcctccacctcctggttcaagcaattctcctgcctcagcctcctgagtaactgggattacaggcttccgccaccaggccccgactaatttttgtatttttagtagagacggggtttcaccatgttggccaggctggtcttggactcctcacctcgggtgatccacctgcctcagcctcccaaagtgctgggattataggcgtgagccactgcagcctaaaatgtattttcaaaagtaaaaaattatatgaataaagtaatatttgtttaattaaagtgaacatgatctttttctaaaaattccatacagtttaagatgagttatatagatggaagtttaggaatatttttattaagtatttttctatgttatttactatagtctgattttattaataatctgcactattatgtctaggggaaaaacaccttttctctgatattagacataagaggcaaaattaatcattcataagactctgatttagctgttctctaatgacccactatctggatgattttctcataaccagtttactcaccagatcacagtcacccagatctaatttctctaatgatgaattaatttgcagcattgcagcaaaaaacattccacctttattttcaattttgtttccagtcattcttaggtatttcagagtccgattcttctgaaaaggaaaaaaaacttatttaataattgttaatccacagaattctatatattacatgaattaggagactgtattactatttgcagactccaattttcatggagctagaacacgatatatattttttttgagacagagtctcgctctgtcgcccaggctggagtgcagtggtgtgatctcgactcaatgcaaactccacctcctgggttcacagcattctcctgcctcagcctcccaagtagctgggactataggcacccaccaccacgcctggctaatttttttctgtatttttggtagacatggggtttcaccatgttagccaggatggtctcgatctgacctcgtgatctgcccagctcggcctcccaaagtgctgggattacaggcatgagccaccgcgcccagccagaagaggatatataccttaaaggtaacattcaatctaccataatagataaaaatctagtttaacagttgagtagaaagaatgcccaagaaacagatgcccaagcaataaccagtaaataaaacatatattaataaactttcactggaaaaatctgtaaatttatcttaagaaaattatagcacttcacttttttaaattgaggtgaaattcacataacataaaactgaccattttaaagtatacaattcagtagcatttagtacattcacaatattgcacagtcatcacctgtagctagttccaaaacattttcatcatccccgaagccggtcctataccattaaccagtcactccccattcctcctatatcacttttaaagtaatataatttgataaatatttcacaaaatcacagacatttcatcattctaatgagtaactattaggacatataatagtgtaaataattatcacgattcaaacccctctgagatcaggaagaagaaaaggatgtcctctcaccacttctatttaacattgtactggaggttctagccagagaaattagccaagaaaaacaaaaagaaaaaccatacaaattggaaatgaagtgaaactctgtatgtgacaccatcttgcatagggaaaatcctaaggattccaccaaaaaaacctgttagaactaacacaagagttcagcaacatagcaggacacaagatcaatatacaaaaacagctgtatttccatatgctaacaatgaacaacctaaaaatgaaattaagaacaacagttccacttacaatagcataaaaaaaagttaggaataaatttaacaaaagaaatgtaagatttgcacattgaaaactacagagcattgctgaaagaaatgaaaggccttaaataaatgaaacatcttatgttcgaggtttggaagacttaagatggcaatactccccaaggtgatctacagatttactgtaattcctattaaaatcccagctgctggccgggtgaagtggctcatgcctgtaatcccagcactttgggaggccgaggtgggcagataatctgaggtcgggagtttgagactagcctgaccagcgtggagaaaccctgtctctactaaaagtacaaaattagccaggcatggtggtgcatgcctataatcccagctacttgggaggctgaggcaggagaattgcttgaacctaggaggtggaggttgtggtgagccaaaatcgcgccattgcactccagcctgggcaacaagagcaaaactccatctcaaaaaaaaaaaaaaaaaaaactcccagctgcttttcttgcagaaattgattaactgacctaaaattcatatggaaatgcaagggacacagaagagccaacacaatcctgaaaaaagaacaaggacacatttcttgattttaaaacctactacaaagctatagtaatcaagatagtgtggtactggcataaggatagacatacagattaaaagaatagaattgagagtacagaaataaactcctgtaatgatggttagctgatttttggacaaaactgtcaagacagttcaatgggagaaagaatagtcttttaacaaatggtgttaggacacgtggatatacacatgcaaaagaataaagttggattcctacctcataccatattcaaaaattaaaatggatcaaagaaagagctaaaactgtaaaactcttaaaaaaacataaatctttgtgactgggttttcaagatgaaccttgaaaacattaagccagtcccaaaaggccacatattgtatgattctgtttatatgaaatgtccacaataggcaaatacatagagagacgaagtaggttagtgactgccaggggctggagagcagggggtagaaaagatggagagggattgctaatgagtttagggcttttctttttggggtgataagaatgtttttaaaatagtgatagtagtgatacttgcacagccctgtgaatatattaatacttaaaaaaccactgaagactttcaaagggtatattttatgtatgtgagttaaatcttagtaaaactatgacttcaaaagtgttcatgcaatgtctacacttgaataaattaaagtataataaaaatatacattcctacaatattaaaataagttcacttcaacattggacactgttggttccaagctatcagaagttagaatttccaaatacaatgttagtttgaaatacataaatgcttacatgtagcactttagcaatcaattctccaccttcgggcccaatatcattaaacatgaggtttaagtaaatgagattaagttgtttctataagagaaaagaagctattacacattattattattggaaattggtcagttttacatacatgtatatacatatacacatacagtatatactttatttgaataagtgttttcctccaaagaaaatctttataaccaagaaaaactgtatcctagcaaaaacaactacattaaggaaaaaaatcattctcatgtaatcaaaatataattacaatataaatgaaagaaaaaactatatttacctttgatcaatctgaaagatgtgtggtgtatatatttaatcatggtgtacaagtttgcaaaagataacttaggagctctagctactggctccattgagaccaaatccacaatgggtttccagtatatttcgagtgttctagcacagagtcaggacccttgacatcaggtaaaactagtgttttatgtgtgtgtcattagactaattggtttcattgtaaatggaactaaggacattttgtagtaaaataatacctgaagcagtttcgcagcatagtatgcaccaacatcacatagaaggttatatccaacatccaaacctgaagcacagatgaatagaagtggatattcattataaagaatacttaaaatcagatcaatgaaaagcaggaggtattgattcttatggaaacataccattaatatacagacaattctttaaaattttggaaagaatccaaaaatcttcacctgtaactctttctactggcactaagcgattgttaccagcaatgtttaatgtgattcctgctgctagcctgttaaaatacaaaaaaaaaaaaaaaaaaaaaagattttgaaatagaaacccagtaaagaagtaaaagtatgtttccttcatgtataaatagtcatatcacagatatcatttactggaagcaagcatataataagtagacttatacagtatatttataccaggtaacttaaaactactgaacattctgcagactgcaaagtgctttaaaagattccatatatttagctctctcacacacactcacactcacacaaacagtatccccactttatagataacactgaaaacttcagtgatttgcttagactcacccagctcaggttaggcgtggtggttcacgcctgtaatcccagcactttgggaggccaaggcgggctgatcacctgaggtcagaagttcgagaccagcctggccaacatggtgaaaccctgtctctactaaaaaatacaaaaattagccgggcatggtggcgagcacctgtaatcccagctgctcgggaggccaaggcaggagaattgcttgaacccaggaggctgagtttgcagtgagccgagatcacgccactgcactctagcctgggcgacagagggaggcaccatctcagaaaaaaaaaaaaaaaaaaaagattcaccctgcccacaaacaaaaaaaaaagattcaccccacccacagaagttaaagatcactctggagcccaagcttgggtactcctggtctagtgctctttcctgaatactataccacctctaagacctactaacagtgttgctcgtgtacttacttacctgaatcaaatggtatgttcattttaccaagcattttcaaatggctataaaatcactcaatatgttaggattttcacacacatgaatataagcaaacactattaatgtaatcaagtatttgtctttcttacccctttttaatttcttcatccacttcttggagtatatgcaatataaaaggattaattttctgggatttttccatacacagattagaataatgtttctggagaccagattctggagattctgaaaaatatatgcatcctctatcacatataaattattctagaagctttaaaaaaaaccataaaaactacctctttcaaatatatgagttgtatgtgtgtatagtgggggtagggaagaaaaggaaacagaattaaggttagaaaaagagaagagaaataaaaataatgaatgggagagataattaaaatgctgtttggagaactagggccattgaagcacccattgaggcttggcagacactggctcaagtgagcaccctacgttggaagtgacataaagggagaactaagctccattatgtgccaggcctggtagctgaggaaaatgacttccaaagaaattgtatattttgtccaaaaccatgcagctaataaaggcagagtgcagaatcaaactgattccaaaacctctttccactgtgccctaatgggttacagggactcaaggtttcttttttttttttttttttttcaactcagtatctcagcatccacgagaggaaaaggtttcttaaaatagcttcacataaaaacaattttatctaataacctaactcaaaagggatctgataaagcacctactcccacaagcttcttggataccctctacaccatcccaagtttgaatgtaactgtcatttcttcataccaaatcgaggcctggctcacagaagctcttctcctacccagccttccatttcctctttctaaaggtgacttttccctaagttcttaagaagacagacacaaagcaggagttgagatctcctttctgttatacatgcagatttccttaatgaccttgctgttctcagtaatacctcaaaagcatcttctgcaaggcctacatcttctggggtggaagttatgctgttacttttcttagaagtacaggccactgtctttgttttctatacatctaccttttgtggatgtcttttaaaaatttgtgcacagagatctcattgctcaaccagcctagctttttaggagctggcttctcttctaagtctctacatctcagaaatgttgtttactgagtgtcctttgcactctgaagaataatgagtttgctaaacggatctgcagaacgagatttaacatgaggaacattacatttcagatgaaagcaaacaaaattttcttatagtttttaataacctttttaaaaataaatttaatatacttattccagacaatttggaaatttcttttttttttttttttgagataggttcttgatctgccacccaagctggagagcaggagcgcaatctcggctcactgcaacctctgcctcccgggttcaagcgattctcctgcctcagcctcccgagtagctgggactacaggcacacaccaccacacccagctataaagacggggtttcaccatgttggccaggctggtctcaaactcctgacctcaagtgatcagcctgcctcagcctcccaaagtgctgggattacaggtgagccactgagcccgaccggaaatttctaacattaaaaaaaaatacatgttaatctgcaatcccactgccaaagaacaaccacaattgaggtctaggcatacatacttcctatagtttttcttttatatgcatattaagtattttttaaacaaaattggaatctttggatataactttatatgctgttttttaaattaacattatattgtaagcagttttcccatgtcactagatattctctgaaaaatttaaatagcataatttctgtcatgtggatagatgtacgtattaaaaaaagcttcacctattttagaaaattttcatgtatttaaatgatattgtagcacaatatttcccaaactgtattttgtggaatatgcatgttctacaggatgatcaaaggtgttccaaatagaataggtcttattatcaagtaagtctgagaagtactaaaataaacaaaactatacacagacacaacacttctcagggcatttaaaacgtgcacactctgcaaactgttaagcttgagaatagggaggataagaatgctgcatttccggccgggtgcggtggcttacgcctgtaatcccagcactttgggaggccgaggcgagcggatcacttgaggccaggagttcgagaccagcctggccaatatggtgaaaccctatctctaccaaaaatacaaaaattagctggtgtggtggcgcatgcctgtagtcccagctacttcggaggctgaggcgacagaatcgcttgaatgcgggaggtggaggttacaaggttgcagtgggcagagatcgcgccactgcactccagcctgggcgacagaggagactccatctcaaaaacaaaacaaaacaaaaacctcacttggaatgcaatctagaaaatgctgctttagcgtcctccccaggaaacaaagcaagtagatcccaaatagaagttggagctgggctcccactgggcttctttcttccctactgtcttccttggtattaagagaaaaattgccctgagaatctccgagggcacagaaatgtgtcagactacaattcattttcgcgaaggcatgaaggaatcttagactacgagctaaatacagctaaacaaagttatggaaatattcttatttaacaagctagccagagatttacagtatttaaaagtttctgctacccttcctttgatttaaaattcacctacgtattttgtatgccaggattttgtggcaccaatgaatttatttcctatattgtattcatattagaaggaaaatagccttcaaattgtaaagcaaaaactaggaaataacccagctacgcaggaaaatgtcaagaacctaacccaaatttcattttttcatccacgcctctggcagccacgttttaacaatttccagagagaggacttacttaggaggtagatccctccaaaacatgcttttctatacttagccaagcactgggaaatctaagcgataagcatgagtcagaacgtgggtgccctatccagaatccgcagtgtgtacatttgaacaagttgttatgccagcttaaatttcctctcatgctaaaggcagagcctaacactgcccatctcctggatgcagtattattaagccagcctccgaacacagttccgtatccacaaacagactttaaaaccagcatataaaacggaaatggcgggtagggggtggccgttcagggtaggtgcttaacttgctaatcatgggcgcagaaatatttaaaacggagatagtacagaggtgcaaagtcagaaacagtatcaagaccctcatgcccccctgtgacctgctctctgggactttcacaaaaagggggctgagaagagcccccccgccaccccctcccggagaccctgagagcacggcgacagacaccatctgcacaacctatcgcgcaaagggcggacccacgggaactcctctccgtggactcctctcctgcccccggtcgcaaagggcgaccggggactcttctcctgccctcgtttctgggcgccccaaacctctggccacagctggggttcccaggggcccccctcccgcctcgacgccttgggctggcgggctgctgggaggactcctgccgtgcgaccccggcgcccctcgcgcgttttgtctgggccaggccgcgcagacgtgctccctacttcttaccgcgctggaccgccagggccgcgcccggagtactggcctgagtggaggcccaagccggggacctggccggcgcacgggcggcctcccgggagctccccatgctcctctcacccactggccgcggcggctgcgctgccatggcgaccgcgcgcgcacttacagtccgcctgcagctgtgaggcggctacacgagcctcggcgccagcctgcttcgagtcccgctggctgtgcctgcccgggccctgaggcctcactgctaaggcagtgaccgcctactctgtggaggtcctttgtcaccctgccctggttaaaggcagcctgagggagggcgtcctggctcctttgcagggaggagttcccgaggtttgaggggctccgctgctgagctagggctggggctacaaagaagattatgacaaagcccgctcctacaaagtgtgcaccggcctgccgggccagcgaagaagcagagtagcatcagcacatgataaaggcgttgggctttgggagcataaagggttttgtgctcccaaagggcggggccaccagggagggcttcctgaaggaggtgacatctggatggtccgaaggaggctgccagaggacagaatgcttggtgcgttctgggcatgcgcaggtacttgaatgtactcagatcagtacagacagcggggaggcgggcagggccagatccacatgtgttactaaaaggccaggggttccgtctagatccagctgctcctggcacagaatgccaatcactgaaacaatgagaattgccagggaggaaggctttaatctggtgctgcagccgaggagatcagtctcaaatctgtctccccaaccaactagaatcaagggtttacatagcaagaaagaaatgtgactacttgcaggaaatcaggaattagggaggggtaaggaagaggagttggtcaacaggaatcaggtggtcgtttagggaatcatggtgggtgagggatctggtgtctcattgtccagatgtgacgatctggtaagtttcatttccttgatactgaaatggtaatagtttccttatcccccttgcagggcatgcgatggtgaggcaggaaaatagggtctggaggtagggaacataaggccgattcgcacttcggctataacaggaaatatcctctccatagggtgtacaccataaacgactttgtaaccttacttcatcctcttcatttacacagggcgtactctaagtaaccaatggaatcctctaagggatatttaaactcccaaaaaatttgtaacggggtctttgagcccctgtgctcggcccactcccacactgtggagtatactttcattttcagtaaatcccttcattccttccttgctttgtgcgttttgtccaattctttgttcaagacgccaagaacctggacaccttctaccggtaacaatgggggtgtggcttgcttctttggtgctccgctgctcaaacctctagggggagcatgcagacgggcaggttgtggggcacgtgggctccgaactcaccgcagcgtctaggggtgaatgcttacagctgctgaagcaaagccccagtaggcgtgtgttacagggtgctctttcagttttgctgtgtataggcggcttgcgtcaatcagctcagttagaccctctgtcttaccgcaaggacagagggctttctgtttcctggggttctggccttggtgtaccggaaaaatcggatcacacagtgggcttggagaatgagtgcaaggttttattgattggtggaagtggctctcaacagatggatggggagccagaaagggaatggagtggaaaggtggttttcccctggagtccggccgctcagcagccagactctccactgactgccctggccaaattcccctcggtctacacatcgtgctgcttgtcggtgacctggcagcgtccgctggtgcctgtcggtgtgctcttctgctcctctgttcctctcaatgtccagccacctgtgtgctcctccgccggtgtgttcctctcaacatccagccgcttgtgtctgtgcctactagggtcttggggtgtttgtttgtttgtttgttttttgagacagagtctcgctctgtggtccaggctgaagtgcagtggcctgatcttggctcactgcaacctctgcctccgagcttcaagcaattctcccacctcagcctccagaatagccgggattacaggcgccccccactacgcccagctaattttgtatttttagtagagacagggtttcaccatgttggccaggctggtctcaaactcctgacctcaagtgatctacctgcctctgccgcccaaagtgctgggattacaggcgtgaggcactatgcctggccctttaatccattttgatttgatttttgtatgtggcaagagataggggtgtagtttcattcttctgcatatggatatccagttttcccagaaccgttattgaagaaactatcttttccccaatatatgttactgatacctttgtcaaaaacgagttcactgtagatgatggatttatatctgggttctctattctgttccattggtctatgtatctatttttatgccagtaccatgctagtttggctactttagctctgcaatataattttaatttaggtaatgtgattcctccagttttgttctttttgctcaggttagctttggctatgctggatcttttgtggtttcatacaaattttaggattattttttctatttctgtgaagaaggtctttggtattttgataggaattgtatataatctgtaaattgctttggataaaatggacattttaacaataattattattctaatccaagaacataaaatatctttcctttttttgtgtgtgtgtcctctttaatttcttacttcaatgttttatagttttcattgtagagatcttttacttctttggttgagtttgttcttaggtattttattttatttgtagctactgtaaatgggattattttcttactttttctgattgtttgctgttggtatataaaaatgctactgagttttatatgttgattttgtatcctacaactttattgaatttgtttatccattctaataattttttttggtggagtcttaaggattttccaaatataagattatatcatctgcaaacaaggataatttgggttcttcttttccagtttggatgctctttatatctttctcttctctaattgctctagctaagacttccagtgctacactgaataatagtggttaaagtgggcatccttatattgttccagatcttagagaaaaggttttcagtatttcctattcagtatgatactacctacgggcctgtcaaatatggtttttatcgtgttgaggtatcttccatctactcccagtttattgagggcttttatcatgaagtgatgttgaattttatcacatgctttttcagcatcaattaaaatgatcatatggtttttgtccttcattctgttgataggttgtatcacattgattgatttgtgtatgttgagccatccttgcattcctaagatgaatgccacttggtcatgatgaatgatttttttaatgtgttgttgaattcagtttgctagcattttcgttgaggatcttcgctgagaagatccatcagggacattgccctacagttttctgttttttggtttgcttgtttgtttgttttggtgtgtctttggttttggtgtcagggtaatactggcctcatagaacgaatttggaagtagtttttcctcctctatttttcagaacagcttgagtaggattggtattagttcttctttaaatgtttgataaaaatcagcattgaagccattgggtcccaggtttttctttgctaggagactttttattatgactttgatctttttacttgctattggtctattgaggtttcagatttcttcatggttcaatcttggtaaatggtatatatctaggaatttatccatttcttctaggtttcccaatgtattaacatatagttgatccttggaatttctactgtatcagttgtaatatctcctttttcatctctgattttatttattggatcttctctctttttctcttaatctggctaaaagtttattgattttattcatcttttcaaaaaacccaacttttcattttattaatttttttgcattgttctttattttaatttcatttatttctgctctgatttttgtgatttcttttcttctacttttttttttttttttgacagagttttgctctgttgcccaggatggagtacagtggcatgatctcagctcactgcaacctctgcctcctgggttcaagtgattcttttgcctcagcctcctgagtagctgggattacaggcacacaccacaatgcttggctaatttttatatttttagtagagacagggtttcaccatgttggccaagctggtcttgaactcccaacctcaggtgatccacttgcctcagcctcccaaagtgctgggattacaggcgtgagctatcactcccagccttctactaactttgagtttggttttttacttttctagttctttaagatgcatcattacattgtttatttgaagttttctgcttttttgatgtaggcacttattgctataaacatgcctgttagtactgctttcactgtatcccataggttttgttatgttgtgtttccattttaatttgtttcaataaattttttaattttcttaattttttcattgacccactggtcattcaggagcatgttgtttaatttccacgtgtttgtacaattcccaaatttcctcttgttattgctttctagttttattccattgtgctcagagaagatacttaatatgattttgatatttttgaaaatttttaagacttgttttgtgacctaaaatatgtctatccttgagaagatccatgtgctgaggaaaagaatgtgtattctgcagctgttggatgaaatgttctgtaaatatctaggtacatttggtctatagtgcagattaagtccaatgctgctttgttggttttctgtcttgatctctccaatgctgaaagtatccaatgctgaaatcaacagccattattgtactggagtctatttctttctttatctctagtaatatttgctttacataactaggtgatccagtgttgggtgcatgtatatttatgatcgttatatcctcttgctgaatgaacccctttatcattatataatgaccttttttgtctttttttatagcttttgtctcgaaatctattttgtctgatatatgtatagctactcctgctcttttttgttttccatttgcatagaatatcttttcccattcctttattttcagcttatgtgtgtctttataggtgaaatgtatttcttgtgggccacagatcgatcattgggtcttgttttttaaaatccatttagcacctcaagagcaattcctcagagcccagcacagcatcaagatttgcccaggaattgcagtccttgtgacctagactgcctttcaagtttatttagaacccccagagcactttatcccacagtggtggggctagccagaactcacgttccacccactggcatggacaattcccctctggctagggctggtctaaatgctccctccatgagcaccacctgaattctacccgatgttgctttccactgtgacaggcagcactgaagtccattccaaagccccacagtcactttcctctccctccccgaagcacacttattctctctctgtgccacatggctgctctgggggttggaggagggatggttctgactatccaggactgtctttcctaccttcttcagtgcctctttctttgctatgatgttaaaaccagggactgtgattgcaaacctgatctttcgttcttatgaagatgatttcttgtgtgaatagttgttcaatttggtgttcctgttggaggggatgattgctagagggttctattcagccatcttgctctgcctccaggaattttttttttaacaagatgtatttgtacagaattctctcagctatgactccctgttgaagaattttctttctggtatagggaaggcatgtttcacatggaaggttttatttcctgttttcaaggcgagaaagggaagattagaatacacttattgcatctgctatttttcaagtgtctttagcttaaagtaatcctcataccaaagtggcatattttggagtggcatattctgccactctttattaccattacatgaatatccagtctgaagtcaattaaggttacttttagtttgtttgtgattcaccagtttttagaaggagaagttctgctgagtgaagttttaagcaaaatcttgaaattcttttaactagaaatgggtttttatgctaacagagagagtcacacaccatattaacctcaggaacctagtcttacctatctagtttgtgcatagacagacttggaaacaaaagcatcaacactcactgtaaatttgagagggctgattagtttcttaaatgattttctcaggggttagagttacacaaagaaagctaattgttaaactatccaaatcttggctccttcaaatgaagatgtaacaattatttaatttaaaaatcacccgaccataatattggattgtaataataagtaaatttgatcacatttgtgtagcaatccctagagaaaaaatggccaataaagaccaaatcttcccctttctcaattactgtggcagaattactggcaaagctattgcaaatctgggttttacaatctccttttattaaatccacaaatgaacgtgaaatatgggtgtatatatatagctttcagagggccgtcaaattgatggggtatatgattaaggtgagataacatacacacacaatcagatattctaagcaggtcttattatggagaaagatgaatgctaagagaaataagttatttcatgtgtctggaagcccagacaccctcatattaattctaatccacataaatttctcccagttgactttgttgtaatgctgcacaataaaatcaagtctaaaatttcacacccgagaagaatgattttaataagtgccaggtttcctgtaaacgagtgatgttaaaaatctaggtgaggttgtgtccagttctctgctcttactcccacttcctaccatgttctgagaagagcccttttagttatataatttctttatctgggaaacagggcaaataatgatgcctcctgcataggattattgtgaagattaattaggttactttaagtaaagcctggagtacataatcagtgttcttggtgttccctatttttatttgtattatcacctcagtctacatactgtggagaattttcagaaatttgcaagtaggaaactggagattttatcttacaggactgaacagtattagataaatttaatctgcctgatgactaagtgacaaaaatgctggagacagctagttttaaacaaaatcagtgttaaatctttccttttctttaaataacattgtctcagagctggttttgagtccaggcataaagcaacaagcacctgaagcacatagtgttgtgttttgaggaatagcagtattatgtatggggctagaaatgtatccccttcatctaggcactgggcctctgtgatggatgagaggcccagatactccagcaggactgccttcattctaaaaagaagttcaaagacgctaccgccaaccttgccactatcatgtcatgttgttctctgcctttccccatagactctgtgtgtgtgtgtgtgtgtgtgtgtgtgtgtgtgtgtgtgtgtactaaagacttactcttctgaaatacaatattcacatcttgcattttataagatttataagcctagtagtgtaagtctgctgattttgttttcactaaagattatctttagctcctttgcattttcatataaattttagaatcagcttgtcaacttctaccaaaaaagaaaaaaaaaagtttgctaaaattttgactaacattgcataaaaactatagatccaattaggggaatattgacatctttttttttttttttttttgagacggagtctcgctctgtcgcccaggctggagtgcagtggcgcgatctcggcttactgcaagctccgccccccgggttcacgacatcttagcattactgagaattctaatccatggacatgatttgtccctccatttatcagagactttaatttgtttctgggttgggctttagttcattcaattaaccgcagttccaaatgtctcacttagacagagttaagctccttccagccaggcttcggtacttaagaccatgaaacttcaggacctgtctctgttctttagtccagcctgcaattttccctgtggccgtttaaccagccaaagactaatgggaaaaactagttagtggggagaactgactttgcatttggggctactccagattctaatccactatgccagcccacacatgactgttaaaagtttggcaggtttattcttctcccagaagttcctttgcctgtgcctattaaagggttgtttctctgcctgacagtcctcaaacttgcaaatgccatcaggcatgagagggtctactcacgggtctctagttatttagaaaaggttggtgcatctctagaatatagtgtttttgttgttgtttttgtttttgttttagctttctttgtatcttcgactctctggtggttttaaggaaaaatactgtattttaaaagatgaggtttttccctagtgttttctcagtgttatggtaagagcaaggatcttttgcaaccttctacatcctactggaaacattcagaataggcatttttttttaactgaaattaggctgggcacggcggctcatgcctgtaattccagcattttgggaggccaaggcgggtggacctgaggtcgggagtttgagaccagcctggccaacatggtgaaaccccgtctctactaaaattacaaaaaaatttagctgggcatggtggtgggtgcctgtaatcccagctactcgggaggctgaagcaggagaatcgaatcacttgagcccaggaggcggaggttgtagtaagccgagatcacaccattgcactccagcctgggcaacaaaagcgaaactccgtctcaaaaataaataaataaataaataaaactgaagttaatctctttttttttttcatgtgagtctacgtgttaggggaaggagtctacactttaattcttctaacatgaaatgcaaaaacctaaattttatgttctgtcataatttcaagcactaagtttaatcaactaggttttaattttatttttcttaaggatagcaagtctggtggcaggtaaattctattttttttcatccttttcacaatatttcagattttgaatatttgagcttttcttcacaataatgtcaaaagacataaaatcagtagaacattcacctaaaattcatcagagaaatgatccacagcacgtcaatgatagaacatttttcattgatgcctctaatcagagcttgactgccattcctttggagatcttcacattcacagaattagaagaagtgcatttggagaataaccagattgaagaaattccccaggagattcagcgtttaaagaacatcagggtcctctacctggataagaacaacctgaggagcctgtgcccggcgctggggctgctgagcagcctggagagcctggacctgagctacaaccccatcttctcctcctcccttgtcgttgtcagcttcctccacgccctgcgcgagctccggctctaccagaccgacctgaaggaaattcccgtcgtcatctttaaaaacctccaccatctcgagctgctcggactgaccggaaaccacctgaaatgtctgcccaaggaaatagtgaaccagaccaagctgagggagatctacctgaagcgaaaccagtttgaagttttcccccaggagctctgtgttctctacaccctggaaatcattgacctggacgagaacaaaataggtgccatcccagaagagatcggacacctgacggggctgcagaagttctatatggcttctaacaaccttcccgttctgcccgcgtccttgtgccagtgtagccaactgtcggtgctcgatttatcccacaacctcctccactccatcccgaagagcttcgccgagctcaggaagatgacggaaatcgggctgagcgggaaccgcctggagaaggtgccacgcctcatttgcaggtggacctcgctgcacctgctctacctgggaaacaccggcctgcacaggctgcggggctccttcaggtgcctggtcaacttgcgcttcctggacctaagccagaaccatctgcaccactgcccgctgcagatctgtgcactgaagaaccttgaagtcctgggactggatgacaataaaataggacaggtacggattccttttctggctgtcactatgctctcatccagggtccttcctgccctaagttggttctgtatctaaacagcaaatttgaactgactttatgggcgaaaatccaagattactaaatatccaacaaggtgatactttgtattactctctttttccctaacagcagcagtaatcataatagtagctaatgtttatttagagggtgtatgtgccagtcactgagctaagtgtttacatggatcatctcatttacctcacaacgactgtgtcctcaatggtatatgaaggaagtgaggggcagggagcttaactaacatatccaaggttacacagcctgtaagtgctgcagccgcgattccagcccacagctgccaggctccagggtctacattcttttttttttttttttctcttccccgagacggagtctagctctattgcacaggctggagtgcagtggtgtgatctcggctcactgcaacgtccacctcccgggttcaagcggttctcctgcctcagcctttcgaatagctgggattacaggcacctgccatcatgcccagctaatttttgtatttttagtagagacggggtttcacggtgttgtccaggctggtctcgaactcctgaccttgtgttccgcccgcctcggcctcccaaagtgctgggattacaagcgtgagccaccgcgcacggcccagggtctatattcttaacaaagacaatctcctgacagagtttccgttaacagcagatgtttctaatacacaacagccttagaagcctaaagttccatccataggaaactgcaaaaccagacttgtcccaacagaaactgtcccgtgtgtgcagggtggcatattcaaaaatggtcatttagcattgttgataatcatgaaattatgggagacaatctaaatgtcagtaggggagtgggcaaataaacttcaatatattcataaaacgaagttatatagtaatttaagtgaactggtactgtattgccaatatggatagatctcagtattgtgatgtttattgaaaagaaaacctaaggttccgcatcaaactgcagaaccttatgataccatttataaattttgaaatcacacaaaactatatatatacacacatatatgtatatacatacacacatatacacacaacacatattttatggatatttttatatataatgaaaatataaaatattgactggaagaaaactaaattcatgaaggtggctgcctctgggaagagagaaggaagtcaacaaaatagggaagcagctggatgcagtggctcactcctctaatcccagcagtttagggggccaaggagggaggatcactagaggccagaagttcaagaccatgctgggcaatgtaggaatgtgtctttaaaaaccaagaaagcaaatggggaagagatcataaggggactgaacttaattgcagtatttcattttgtttattaaaagatttgggcagttgggcacgcgtgggtttatgtttctttattattttataatattctatttatttcaattttaattttatttatttatctatttatttttgagatggagtctcactcactctgtcacccaggctggagtgcagtggtgctatcttggctcactgcaacctctgcctcctgggttcaagcgattctcctgcctcagcctcccaagtagttgggactacaggtgtgcgccatcacacccggctaatttttgtatttttaatagagacggggtttcaccatgttggccaggctggtctcaaactcctggcttcaagtgatccacccgttttggcctcacaaagtgctgggattacaggtgtaagccaccatggctggcctataatatttgatttaaaaagaaaaaaatagctgttaagagcaaaagacaactgtagagggagtaaaaaggggaatttggaaatcaacaactataatcaaataataggtctgctttacctggccatggacaccagtctcatgtgttccctataaattataaaagtcctgggccttacggatttatttttaaaaatctttttttttttttttttgagatgagctctcgctctgttgcccaggctggagtacaatggcgccatctcagctcactgcaacctccacctcccaggttcaagcgattctccttcctcagcctcccgagtagctgggactataggtgcctgccaccacgcccggctaatttatgtatttttagtagaggcagggtttcaccatattggccaggctggtctcaaactcctgacctcatgatctgcccacctcagcctcccaaagtgctgggattacaggcgtgagccactgtgcccggctgctaaaaaaatcttttatttgattttttatttctagaacttttttccccaaattgctatggggttttaaagctgcctttcaggaagtaaacattttgatggtaacttgtagatttaggtcgagattctaggacttaatctccactgatgtagcaactcaccttggaggatttttgaggttccgtgagagcccggccctgaactattccactgctgatgtaagaaattccttttagtggactaagtcagtcattctgcagttggagtgaaagacttaaaatataaagtacatgtgggagggataacacattatactgagccatgaataatacctaatccttttctgagagaaattttaagaaatcaaaggagcaaatcacacacagactgcttgttaacaaaaataagcttcatccaataccaagttttagcacaagtcaaactgcactgaaatgtagacatgttaaatattattgtattgaacatgacaatctctgtgtaccagtgctttttcctcttcagttattctgatgggttttgtgtgtgtgtgtgcatttgtcctcccttctcaatttcctcttatgctaataccaccttccaatgcatttctctcctcaatgaaacatggcctttaagccagctcattatctctccctccccaaagactcaactcatgggttactagctcttaaagcctaaccagtagcttctacttgcctgtgtgcatgcaaaaaatatctgattttcaatgtgtacctagatggattttatttgtagagtatacttctattaaaggagaaaagcaggccacgtgcggtgactcacgcctgtaatcacaacactttgggaggatgaggcgagtggatcaactgaggtcaggagtttgagaccagcctggccaacgtggcgaaaccccatctctactaaaaatacaaaaattagccgggcatggtagtgggcacctgtaatcccagctactcgggaggttgaggcaggagaatcgcttgaacccaggaggcagaggttgcaatgagccaagattgtaccattgccgtccagccgaggcaagaagagtgaaactccgcctcaaaaaaaaaaaaagaaaaagaaaaaggaaaaaaccaaaacaatgtaccagatcccaaaatggctatatgtcagttacagtgtcatcagtaattgtcctcatctaatgctctacagattttctatacatctagatttcttctcattatactttactatgactatgatgaaactaactactggatcttaaatactcctaaaaaaaatttttgaacattcaatgtgctttgaaaaagaaaagctaagcttttatgagttaagtgaacagcaataagaatgaaatttctaggttataataaaatggttagattgaaaaatcttttttcattgttttggactgcacagaatgcaggcattttgtattgaagacatctaagtgcttgatgaagaattttgaaatagccaaagaggaaagcttaaacatcagtttctccaaagattgacttcatctaattaaaataaataggtaaataaataaaactggaaaactgttacagcatttttaggaaaatgagtccttactctacacaaaaaagagaaaaatgcattatggaagattccaagtatgtgaaacttttacagataggttgtcctcagtgaactttctttttctccaactgtaagtgacccattcaccaattacctgtctattccacccatccatagagaggtgggggtgggagtggctcagctgagctctagccagaatgaaagtagggtggctgactagggaatggatgggaagaatgcccatgggctcaagcagggaactgtggggaaggatttcccagttaggaattaagccagataaaggaacatatgagttaaggagctgttgagctatatagctgggatttttttctacgagaaaataaggcatctctgtaacacagtcaatagggtgattgtcacatattttaagaatgagattttttcgccgggtgcggtggctcatgcctgtaatctcagcactttgggaggcctaggcgggcggaccacgaggtcaggagatcgagaccatcctggctgacatggtgaaaccccgtctctactaaaaatacaaaaaattagccgggcgtggtggtgggcgcctgtagtcccagctactcgggaggctgaggcaggagaatggcgtgaacccgggaagcggagcttgcagtgagccgagatcgcgccactgcactccagcctgggcggcagagcgagactccgtctcaaaaaaaaaaaaaaaaaaaaaaaagagatttttttcccatgtggtctcccatggtccagaaagaaaccgatagacggacataatggtgaagctgattttggctgtactaaagtaggaaatctgatgattagaagtagccatagaagataatgagcttttcttcacaggaggtggtgtttagataaaactggatggctcgctataaaaagtatgcaagcactgtattagaaggttgaaatagagaaccttcttaaggcgttccagccctgaaagtgtggcactctgtgaaatgccgacccagttcccacacaggttacacaagcctgggtattcactgaaaagcagaacatgacacgataggatcataatggagttcactgaacactgattagaaatggtgtgaatatatgtttgcctccaactgagatttcaactgaagtttcaaaattattaaagccttttaggatgaagagtcatatcactaaatttattagttccaataactgaatttataatgaatattattattgcaatattacacataactttagtatttttctttctatagtgtcaaacagttgccacactacagtccataaatggcaagaacataggttaaaaattgctccaatttttttttttttgagacagattctcgctctgtcgcccaggctggagtgcagtggcacaatctcggctcactgcaacctctgcctcccacattccagagattcccctgcctcagcctcccgagtagctgggattataggcacccgctaccacacccagctaatttttatattttttagtagagacaaggtttcgccatgttggccaggctggtcttgaactcctgacctcaggtgatccactggccttggcctcccaaagtgctgggattaaaggcataaaccaccgcgcccagccacaaaaaattgctccagtttaaagtggtgcataaaagtgaaatcagagactttagatctacaagtataaatactgtaatgcagatatgtgcacaaatttttcactagtaggagaggctaagttactccacttgtttagcagtctgcctcaaaaccagaagcccaatttatctctgctgttaaaaataatcttgacctgaaacttatctttttggaatacttctagttaccttcagaattgggctcactttcaaaactgaagatacttggactaacaggaaatgagttcctttcctttccggaggaagtcctttctttagcgtctttagagaaattatacattgggcaagaccagggattcaaacttacctatgtgccagaacacattaggaaactgcaggtaagcctccccaaatgagcaggctaagaagcacctgtcactgcctcttaaattggctgaaactgagaaaatatgaggtctccacaggctggatgtagaatcatccatactagatttccagcttcagacaagcaatcatttttacattttgaggtttccactgtccgtgaacaactcttcaacatttcattgtgattgctgttggatatgtcctgccatacttctttccactgtgtgatttggtgtgtttcatttgcagaaattgagtcataactctttccatttaatttccactttttataagtagccccctgaaaactggactattttgaagttaaagagtatcatacaagtgacatgctgggagcctacattttggtgcccaggatttcctgtaaggggaagtgtgacctctctccctgattggaaaagggaaatcatgttgcaccagcttcctggatctgcagggctgtgaggaatacttgcaaagcaacaggataacttcattcaaagtagccatagtagggtgtcttcatatattcatcctttaaagaactgttttttttttttcatgttcctgttgctgcacttttttttttgacagagtttcgctcttgttgcccaggctggagtgcaatggctcactgcaacctccacctcccgggttcaagcgattctcctgcctcagcctcccaaatagctgggattataggcgcccaccaccacacctggctaattttgtatttttagtaaagacggggttttgccatgttggccaggctggtctcgaactcctgacctcaggtgatccacctgcctcggcctcccaaagtgccgggattataggcataaaccaccgtgtctgacctgctgcactcttaatgatgataaagtaggcgtgggccaccacataaccccagtcatgcaatgccatgcacagcataggtagttctcactatgacacagggtgtctcttcctaattctccattcctttgccctgtgttcatagaacacctttcatcagcttttcctttgtacctgtcatgccacaatcttagggtgaagtacaaacattagatttttgcccagtgaagttgaaaatagttattttgaatacattcaaatccattccctgtgcattttggctactttcactgaggcaatattgggttgatagttgaggcaattatcattctgtagcaactgccacagacaattagctattaaaaaaggagttaatgataaatgtagttaaattattcaaattatttttccataaagttctggtgaaacaaataagcactagatgtctgtagtctcttttccctgcataaatggaaactaagtctaatggatttactcaaaaataattttgggtcttgatgatggtcctttagacatgctttttcccttaactcaatgcgtaatttccccactgaaagtgaaaaaaaaaaaaaaaaaaaaaaaaaaaaaaaatgcatgagcacccacaggtgattctggttattataattaattaatcaaggtatattattatggtacactcatgttatttcagagtctcaaagagctatatatagagaacaatcatctggagtacctgcccgtatccttggggtcaatgcctaacctagaagttcttgattgccggcacaatttgcttaagcaacttccagatgccatttgccaagcacaaggtgaggaaacttagtagattcacagcctagcagagtttgtggccagcatttcctatggcaaatggcttccttgctttgctaaagacctatctcagtgttcagagaactgagtctatcccattacttccttgcagggctcacttagcgacatgggggaggccaggtgtcctgattagtatagctaagagtcttgcaaaggcagttaagtcatttattaaaatggaaaggtaaatagcgactgctaagaaaattagcatttacccatacatttattacactaccaacaataatttactgtacacttactacatgccagaatttggagttgggatcctgcagtaaatttcatctaggtcacggagtcacttgagtaaaagaaaaagtattggcccagagtggtgaaattagcaggagactttcttggagctacataattgacctggaaaactatatatgattcctacttaaatagccaaacattttccactacactaagccattctttgtctgtacattcatccatccacttaatatgcttttgctgagcacccactgggaccagattttaaatgtttctttttttttttctgaatcctaggcttatgcacatgttttcaaactatggctattcttttttttttttttttttttttttttttttaagacagagtctcgctctgtcgctcaggctggagtgcagtggcgtgatctcggctccctgcaaactctgcctcccgggttcacgctattcttctgcctcagcctcctgagtagctggaactacaggcgcccgccaccacgcccggctaatttttttttttttttttttttttttttttttttttttttttttagtagagacggggtttcactgtgttagccaggatggtcttgatctcctgacctcgtgatctgcccaccttggcctcccaaagtgctggaattacaggcgtgagccaccgtgcctggcccaaactatagttattctttaatgaaaaaagaatggagagagtggaagctgatgcctactcataaggcattcaaaaactgggggcaaggccaggcgcggtgctcacgcctgtaatctcatcactttgggacgccgaggagggcagatcacctgaggttaggagttcaaaccagcctggccaacatggtgaaaacccatctctactaaaaatacaaaattagctgagtgtgatggcacgtgcctgtaatcccagctacttgggaggctgaggcaggagaattgcttgaatccgggaggcagaggttgcagtgagctgagattgcaccactgcactctagcctgttaacagggcaagactccgttttaataaaagttaaaaaatttaaaaaaaaaaagaaaaaaaaaatggagacaaggggttgtatgcagtaatccttagtaatgctcctgaccataaatttttatcctgtccttggtccctggaggagtgaaatattctcaaaatttttcagtgttttctatttttctgtctctaatatttatggacactggcttcaacaactttgaattgttataaagaagttgtaggccaggcgcggtggctcacgcctgtaattccagcactttgggaggccaaggcaggcagatcatgaggtcaggagttcgaaaccagcctagccaatacagtgaaaccccatctctactaaaaatacaaaaattagctgggcttggtggtgggtgcctgtaatcccagctactcaggagaatgaggcaggagaatcacttgaacccgggaggcggaggctgcactgaaccgagatggcgccactgcactccagcctcggtgacagagctagactctgtctcaaaaaaaaaaaaaaaatagccaagtgtggtggcgtgcacctgaaatcccagctacttgggaggctgaggcacttgaatcgcttcaacctgggaggcagaggttgtagtgagctcagatcatgccactgtactccagcctgggcaacaaagtgagactctgtctcaaaaaaaaaaaaaaaaaaaaaaatcaatagtctgctgaccttaggaacagcagggtctgagagtgatttttcccagtgggctgtcagtttcagctaaaaactgttgctctaaacaaacaaaacatttggaatatctggagactgaattctgttctcttcattttgagaaggagcaaacatagagctagaacttttattagatggtagaaaaagttttgtcgggtcttgtgcatccttcctctcattccctttgcaaatgcagaattggatccctcacctatgtggacaggattaggtgacaagttaatattgtttcttctaagattgaaccaccattacgaaaaaatcttttcagctttgaaagaattacggctggaggacaacttgctcacccatcttccagagaatttggattccctagtgaatcttaaggttctgacactgatggacaatcccatggaagaacccccaaaagaagtgtgtgctgaaggcaatgaggccatatggaaatacctcaaggaaaacagaaacaggaatataatggcaacaaaggtaaaatcagcccagattcttgataacagttgctttagagggagtctaatggtaaacacagtacagattatcctacggagcaactccttacacccttgtcctgcttctgaaaagagaagttacttggtaacttttatgtccccagggctaagtaagaagatttttaaatgtcagccctagcatttttgtcttttatgtcccttatttctttgtccaataagaagccaacaaataggcaaaggaaaccaaaacttcaacatttccaacaatctaaaattcgtggactatttcattggaatgaaaaaagtttgtattaacaaaagtagtaaaataagtttagaaaattagaaatgaaagcgtttatagatgagaggctgagcccagggttctgagctgccattaataaggatcaaaaggctgagatccttgtaattctgctctagccctttgagcccatggagatgtaggacaggtctggaatgtgtccacttcagccagtgttctttattctccaactggcccaagtccccatcatctcacagccggataactacataagccctctgactactgtccctgcttgcatgccagccccccacaacataccttctgctcagcagttgcactgatgctccactgaaattggcaatcctccattacactcagagtaagagtcaagtcttcagtccgtaaaaccccctctcaatagccctcaaccctatcagacctaatgtcctcccttttatgataaatcttttgtaatacctcttttactattccaaaataaattcagagataataaaaacatacaaaaggacataattttaatcaaaataacgcctgagttacaatttaaaggagaaagaaaagtaatttatatacaaatatatatttcaggcctggcgcggtggctctcgcctgtaatcccagcactttgggaggctgaggcgggtggatcacttgaggtcaggagttcgagatcagcctgaccaacatggtgaaaccctgtctctactaaaaatacaaaaattagctgggcatggtggtgcgtgcctgtaatcccagctactctggaggctgaggcaggagaatcgcttgaacccaggaggcgggggttacagtgagcctagattgtgccactgcactccagcctgggcaacagctgtctccaaaaataaatgaataaattatttcagtgtgtatatgctcaggatggattacacttgaaagaatgaaagttgtggttcttaattgaatacttcctaaaagcattttgaaaaactgtgcaccctcttgcacgttcttaaaatgatatttaacattgttggccacaagtttaaatcattgcaaaggatgtaatttccagtgaattttaaatgttgacattttaaaatagagctgttagatcaatattttaaatgtatccagtggaaactgaatatcattatgatttgtcaacaccaatttacaaatactcaaacaagttattattttataggcagaatttttatatcatattccttttcttcttaaacatgtacttccattctactttcccctcaaaattgatcctaaggttttatgtatacacatataagtctttcatagattgctcttttgtacttctaggtgacaaaaatatttatataaattaaattttaaaaatttaaaaatgtatatacattacaactattagtataaaatcacctaaaacaacataaaatttcttacaaattttaataattattagacatataggattttttagaacagtgtaccaaaatgagagggtttttttagcatagtttatatattcatgcataaatattgatgattattagaataacacagggttgattatagattctactcctgtttctcattttacagatgaaagccttgagaaaccttgttcacgtagatgagttaaagagaacagaagaagctttttttgcctgtaatgttttattttaaaaaaacaatgattcatgcatctctgagcttcttccagatttatatcccccaaatcgatagcaggtcttagctgacatgtcaactaggcttcccttatttttcttgaaggtagaattagaaaccacctgtcttgcaaaaggattggttaaccagtccctagagtcattcattttctcatcaacacttgtactttgaattgtctttttctgtgtgtgtgtgtgtgtgtgtgtgtgtgtgtcctaatgatttttggagtccagggcaatgcaccatagtaagattcaggtgggtgcaagctgtgcccttcctctgtggagcatcacaggggcaactgggatgggggatctgcagttatgttctcgggatgattttaggaaggggtacatatggaagctggagctcaggaaatggactgtcttcaacctatccatgcctgcacactgttggaaaggctttgtagaccagggtataggccacacaattgaagactgcttaaccttaagtcaacaaaaagccccataaatttccaaaatgcctctagagagcagtgctgttccctggatcccgattggtctgctgttttcactccccatctcctctttcctactctcactggacttcagtcacaagcagatctggtgttcctccaaggaccaagcatgttcctggctcagggccttaacactggctcttcctgtgcccagagatgctttccccagatatgagcaagattctggccctcacttcattccatctctgcttaaacattctcttatcagagagcccttccttgatccaccttatataaaacagcatacccccagccacctctttcatttgttcattcattcaacaaacatttattgagcttctactatgcaccagacactgttctaagcattgagatacatcagtgaacaaaacaaatatttatgtcctcacagtacttaaaatctagtaggagggaaataaaagcatgaaatagaaaacataaaatgaaatactatgttagagagtgctactgtttaaaaaaaaaaaaaagttagcctaaggggaactgaaattgccagtagtgtgtggaggtggagaagtggttgatttaaataagattgtcagagtaggcctcactgaaaaaatggcagtcttagcttaggctgccacaacaaaataccatagaacaggcggcttaaacaatggaaatgtattttctcacagttctggaggctggaagtctaaggtcagagtatcagcatgattggagtctggtgaaggccctcttcctggcctgtagaagctgacttctccctgtgtcttcatataacagaaagagagagagagagagagagagattgcactagagagtgctaactctctgatatctctccttataaggccactaatctcatcatgaggaccctgctgttatgacctcatataaatctaatcatctcctcaaagccccttctccaaattcattcacactggggattaggacttcagcatatgaatttggggcaacacagttcagtccgtagcaatgacaatcaagcaaatccttgaagcagcggaggggtgagccatctgaatactgagaagagttccaggcaaagaaagcagcgaatatacaggccctgagtcacaactgtgcctatgtgtctgagcagggaggaggcccgcatggctggagcagagtgagccagggaaaagggagttaagaggttagaggggtcaggattggggaggcagatcagagagggccttgtaagccatataaggactttggcttctattcagagagaaatggggagccactggacaagtctgctgctagaggaagggtgttgctgggtaggtaggagggaataggatccagggaacaagtgagggctggctttaggcaggagcacagacagcccagtaaggagcaggaaggcagggcgtaggcactcagatcccctcaccatgtgcggtcactctccatagcactcatcaccgtctgacaaattgaacattcatgtgtttattttgtactgtctcttcctcactggaatgtgagctccataaagttgagacagttatttctctgctgttgcccaaaagtctagaacaggcactggcacataaaaacaataaatgcattttttaaaaaatttgtctgaatgcctagccaattgagaaagatagaaaataaaatttagagttctaatcacatcccattctctccacgtcttcaagaccatgtatcagaataaagagatttaacaatttccagttcattgtgataccagccgatgctgaatttgggtttatcttgttttcagattcaggcatggtggcgtggaacaatggtacagagaggatttgggaaattcggtgaactactaaaaccacaaaagaaaggaaagacctctccaaaagataagaaaggaaagaaggatgtaaaaggaaaaccaggaaagggaaaaaagaaataatcctgtaaattgataaattggggtaatggaccttgatagattaagaagacaaaatatctaggaattagatgcctactacattaaaattattcataaaattacacttatgtgtaaaaataaatgattcttacttttactgaaatatttatggataaaatgatataacaccttggaattgcttctaaataatatgggagggggaggggaaagtgggtaggaatacaagtgaaacaagattggccgtacattgataactagaataaggtgatgagtacgcaggggttctttatactatttgcctacttttatttatttatttattttaagacaggatctcactctgttgcccaggctggcatgcagtggtgcaatattgggtcactgcaacctccatttcccaggttccaacaattctcatgcctcagcctcccgagtagctaggactacaggtgcatgccaccatgcctggctaacttttatattttttttgtagagatggggtttcaccatgttggccaggctggtctcgaactcctgacctcaagtgatctgcccgccttggcctcccaaagtgctgggattacatgcgtgagccactgcacccagccagcctacttttaaaacttttactgtgaaataattatagattcacaggaagttccaaagaaatgttcaggtaggtccaggcactactcagcctccctcaacgctgacctcttttataactatagcacaataacaaaaccagaagattgacattggtacaatcaacagtgcactcatttgtgtgtgtgtgtttgtgtaatcctatgcaattttgtcacatatagttttgtgcagccaccatcacagtcaagacatagaattgttccattgccacaagtttcccttgtgctattcctctgtagccatacctactgcctactcctctcccaatgcctaacttgttctccagatccataattgtgtcattttaggaatgtcacataaatggaaacacacagtttgtaactgggattggcttttttattcagcctaatccacctgaagtctatcgaactgggggcatgtatcagtggtttgttcctttctgttgctgaggagtattccatagtcccacagtttgtttaacctttcactcattgtttctagtttttttgctattgtgaacaaagctgctatgaacattcatgcataggtttttgcatatgcatagatactcatggaatgcatgggaatgctcatgatattcatggtattcttttatatcatgtaacccaaaatatcccctttacatcattcaaaacctcctcatcctgaaaaccttttaatttggagtagtgttgattttacatttgcatgtctttcaggcagtgattgcaatactaattattagtgtagtagaagaaagcaaaacataatttgactagagcttgtcagaatagaaatgtgcagacaaacatctctgccatgcaatgactttcatgctctagcaaaagaaaatcaaaaatttcaaaaatagtttagagcaacacaaaactgtcattaacgaattaaattagttttatgaagcaaattccatttcaaagaaatgcctggaggcaatatgttaacaattttttaaacaataaaaggttttaatttattctaacaagatatgtttttcatactgagttttagatttttaatcactttttactaagatttatatgtcagtgactatcattactgttcatggtttatatctgagataaaaggcaccagaatataaaataataaaccatagaaaggtacactttctgataaaaacctacatagactacattaagatacatatagtaatagtaatgatacatgaaactattagacagctagtgcctttcacattagaattacacacacacacacatacccctttatatttagaacatttaacttgtaggaaaagaagaggcaaaacatttctgggcaagaggaaagcagttgcagtaccaaaatctaaacacttttggcaaggcttctaaacagcaaatgaactaattatatatccaaaacaaatccattgaaaaatgccatttttgtttcatagacagagaataatggcatgctcatattagatattatatatatatttacatatatatgtgtattatatatgtatattatatatatgtgtatatatgtatattacatatatatatgtaatatatatatatatttacaaagctcttgtaatataagtcccattaaatggcccagaagttgaaattcagttcatgactctggaattcgttcatgttcttttcctttggagaatggtttgtagcttagtaggacatgggaaatcagtttactgaaacccaccatggtcaaagtgaatgcttctttttttatcttggtcaaagcattctagttcttcctcctgtgaagctgggagaatccatcttttcattcctatctcagtgatctgaggaagcttggtcacagcatataacaagtgtctaaaccattgtccacaatctcgaaaatttgatggtcgaaggctaatatccagctcgattagctctttgaggaaccgcacgttttggcagaacatggtccaccccgcatcacagatgctgtcattgtagctcaggtccagcttttgcagtttggccagatgacccgtctgtatgaccgatgctggaaaacagaatcactctaaatgctaacatacaagaatactgtctgccatggctattcccatttcccataacactatctccaggaatagtaatgacaagattagtaattagtaatgatttgttattagcagctttattcaggacatctgaaattagtaacagatttcctctctgtacatcccatctacagctttttttatttctttttccaaatctcaacccaataatttttttttgtcaagttcctgctctctgttccactgaagtccgagctcttcctacagattttctctaattaaatgtaaagagtgatggctcattggctttaactaaggaccatttgtaaataatcatcttgctgctttaattgttcattttcattcattcagtacttcttcatccagcaattatttaaatgagcattttccatatgcagaacatacctggataatttccaattcaccttagagaccccaatacatgtgacagttttccttttgaatagaacatatcagtactacctacaatggcacttaaaaatgatgactaatgtacaatctgagctatttgatcagaaaataaataagttaatgatgaaataaagacttctgtaagaggaggcaggagagataaccacggaaaatgggacatgcttcccttttcaaccaaacccaggaatggattgcagagatcaggtgggttgtatagaatctcagcgttgcaagggatcttggaagtctccttatccaacctcctaatcaataatcagagagaaatccttttcacagcctctctactcatgaccaccacaattctggctgaactgttctttcaagtttgccccagcattatggagcagctcctagcgggaggaagccctcccacagggccccaatctatcttctggtgtctttcacccagtgccccaatcagtcagctgtaacattcagctccttcttcctcctggcagccctgcagtgttggacaacagccaggtctcccttaaactttatccctgtaggactgaacatgccctggtctttcagtctttcctcacacgcatggctttcagatcaaggaggatgctccaactccatcactttcacttgccaacagtttgattccacagtgaatttgagagctcagccacccgtgcacacaacagctgcactctgtctctaggtgttcatgtcagtgtgtgtctcccttcctgtctcgcaacattaatcataatattctcaagacctaactgttaaaacaatgtgcacgctttttctcttttaaaaaatgttgtattatgaaaattttcaaacacaaaaagtagagagaataggagaaagtggaccaccatgtacccatcattcaacttcaacattatcttcattacatcaatcttgcctcatctagtcccctttcttctacttttttgttttttaaaaacacattttaggctgggtgtggtggctcacacctgtaataccagcactttgggaggctgaggtgagtggatcaccaggtcaggagttcgagaccagcctggccaagatagtgaaaccccgtctctactaaaaatacaaaaatgagctgggcatggtggcgggcacctgtaatcccagctactcgggaggctgaggtaggagaattgcttgaacccaggaggtggaggttgcagtgaaccaagatcgtgccactgcactctagcctgggtgacacagcaagactccctctcagaaaaaaataaaataaaatacataaataaataaatttattttttgtttggattttataatgtgagcaccctattttattatattttattattttagatttattacattttaaaaaatctaggtaggggaaatgtaggccatgggtatactctttatagtttactgtatgaaaaaataaatgccattaattatttttaaaatgtatataagctagtgattaacaaatttttaatgtttctattagaaaaaatataaaagtgacaattgctaaaaccacatatagtaatacttgttttttgttgctgttgttgtttttgtttttttgagatggagtctgctctcttgcccaggctggagtgcaatggcgcaatctcagctcactgcaacctccatctcccgggttcaagtgatcctcctgcctcagcctctcgagtagctgggattacaggcacctgccaccatgcccagctaatttgtgtacttttagtagagacagggtttcaccatgttggccaggctggtctcgaactcctgacctcaggtgatccacctgccttgtcctctcaaagtgctgggattacaggcgtgagccaccatgcctggcctgtaatacttgttattgagtaaaaattcaaagaaggaaaatataccctgataaaatgtaaaagtataaatttgacctgagaaaaaaactgtcagtaaaaattaagaaaaaatatacaatggctgaagacatggtgaataaaatttgatgcagacaaaaataaaaaagaccgaaatgaagaagcaaattttaattataaacattaaataaaataacttaaatatatttaatggtgtctaattcagagaaataaataaataaaaatcaaaagcttattttttagaagacacaacatcaataaaccccttgcagtagtcagaattctaaatagccaccttaagatttccattgtatccccaggactgaatgtggtagattttgctcccagaattagcttaggctatatggcacacctgactttaagaaagggagattatccatatggagtcaacctaatcacatgagccctttaaaagcagagagaatttcctcctactgctggcagaagaggaaggaagtcacagaagtcagagagatttaaagtgtgagaggcacggacaatccactcctgtcttgaaaatgaggggccatgtatcaaggaatgtggctggcctctagtagctgacagcagcccccagctgagagctagcaagaaaacgggaccctcagtcctaaagctgcaaggtcctcgactctgtcaacaagaatgagcttgaaagtggatttattcctagagccttcagatgagaactcagccaggctgacaccttgattttagtgttgtaataccctacacagagaaccgacacaagctgtgtcagacttcttacctacagaactgtgagccgggtgagggatgagaaattacttaatgatgcattattcatttgggtgatggttacatcagcaccccagacttcaccactacaatatacgcatggaacaaaactgcactggtgcccctcacatttatataagcttttaaaaagaactgtgaacaaatacatggatattgttttaatccacaaattaacatgttacacagcaacagaaaactaatacctttggtcagactagccaagaataaagagatagaaacacaaattatcaatatcaggaatgagacaggtggtatcactatgggcagtaaaaggataacaaggaaacaactttatttccataaattcaacaacctagatgaaatgggccaatttcttaaaagacactatcagaacttgcttaagaagaaatagacaactggaatagtcctagctctattttttttctatctctattttttaaattgaattcgtaatttaaaatatcccacaaagaaaattccaagtttagatggcttcagtggtgaattctgtgaaacagttgagcaataaataataccaattttacacaatctttctggaaaataaaagaggaaggaacactttccaactcattgtatgaggctacctataccctcataacaaagccagacaaagacattataagaaaaccagtagactattatccccttgtgaacataggcacaaatatcctcaacagaatattagcaaataacatccaacgctatataaacaagataatacataatgaccatgaccaggctgatttaacattaaaaaatcagctaatattattaattattatcattcattattattatgaatattaatgaactatagtttttttaaatgctcatctcaatagatgcagaaaaatataatttgacaaaattcgttataagaactcttagcaaattaggattccttaacctgataaagggtagctacaaaaaaacctatagctaacatcatacttaatggtgaaaaatggaatgcttttccccttagcttaggggactaagactggaagcaaggcaagaatgctctcatctcattcaacatctattggaaatctagccagctaaataaccaagaaaaagaaagaaaagatacacagagataaagaaataaatctgtctctaggccgggcacagtggctcacgcctgtaatcccagcactttgggaggctgaggcaggcagatcacgaggtcaggagatcgagactatcctgaccaacatggtgaaaccccgtctgtattaaaaacacaaaaactagctgggagtggtggcacatgcctgtagtcccagctactcagcaggctgaggcaggagaatcgcttgaacccaggagtcggaagttgtggtgagccgagatcatgccactgcactccagcctggtgacagaatgagactccatctcaaaaaaaaaaaaaaaaaacaaaacaaaacctgtctctaatcatagatgatatgattatctatatagaaaatcctacaggatctaccaaaaatatcctacagctaacagatgagtttagcaagtttgcagtaaaatgtcaatatacaaaaatcaattatatatccacgtaacattgggaatctaaaattaaacagtatcttttataagagaacaaaaattaaacactcagatataaatttaacaaaatataaaaactagaaaacaccagtgaaagaaatcaaagagtacttaaatacagagatagactgtgttcatggattggaatactcaatattgttaagatgtcatttctccctgaattgatctataaattcaatgtaatcccaataaaatttccagatggatttttaaaatagatattgacaatctgatgctagctttaaatggaaatgctaagtaactagaataaccaaaacaattttgaaaaagaaacaaagaatacttatactacttcatttcaagacttactataaagtttcagcaatcaagacagcgtgatattggtaaaataagagacacagagatcaatagaacagaactgagagaccagaagtaggccatcacaaatatggccaattgatttttcacaaaaatataaaggcaaatcaatggagaatggatagtcttttcagttaatggcactcaaataattggacagtaatatgcaaaaatattaacctctacccatacctcataccttatataaaaattaactcaaaataggtaataggtcaaaatataaaatgcaaatacaaagctttaagacaaaaatatggaaaaaatctttgagaacttagatttgcaaaacgctctaagatgcaacacaaaaaaactctattcatcaaattaacaaattgataaatctttatcaaaactgaaagctttgatctgcaaaaaaacactatcaagagaatgaaaaagccagtgggacagacccagagaaaataatagcaaattatatttctgataaaggacttacttgtattcagaaaaatctaaaaaactctccaaactcatcaataagaaaacaaacaatccaattttttaaatcaggcaaaagatttagaacagacatttcaccaaaggagctaagaaatgaaaatacacacataaaaagatgtttgacatcattggtcattagggaaatgcgaattaaaatcacaatgttttgtccccatcttctaattacaatcatttttgctataacacttgttttgaaaacacaagtttatttcaatgagattgaaatgtcaggaaacaatctgagtataatgcaaatttcttgtttgcattatgcacacaatttgtccacaggaaacactaggtgaacatataaaactgtccccagctgaattgagctgcatatagaaataaacagcctgggcacggtggctcacgcctgtaatcccagcattttgggaagcctaggcgggtggatcacctgaggtcaggtgtttgagaccagcctggccaacagggcgaaaccccgtctctaccaaaaatacaaaaattagccaggcgtggtggcatgcctctaatcccagctactcaggaggctgaggcaggagaatctgttgaacatggcaggcggaggttgcagtgagccaagatcatgctacttcattccagcctgggtgacagagtgaaactctgtctaaaaaaaaaaagaaagaaaatgcagacatgcacacacctcatgaggacaacaaccctcatctctccacacaccctctttccaccaatggaagtgtggacaggccacttctacaaacttcaggtctttctcgggaaaatgtaatatttgctcatttcttaactatttaatatgtaaaactgtattgctatttttcatagcttctgttttttaaaatatgccactgatgaagtgtttgagtgcggtgcttccaaccgtaagtcctgtggttattactgaataattcttgcataacacatgatttttaggcccatgtgccgtgtcatagcaaaactgactaatatatacactgagaacacagatacaactacctggagtgactgttctggcccttcattgggaggcgcgctcattgctttggaattccggctgaatagtgattggagtgtggggacaaggctagatgggagccagagagagtactctctgattcattgttttataatgggaaagtggaaacatagaatgagttttttattttgttttgttttgttttttgagaaggagtttcgcccctgctgcccaggctggagtgcagtggcacgatctcagctcactgcaacctcggccgcccaggttcaagtgattctcctgcctcagcctcccgagtagctgggattacaggcatgtgccaccatgtcctgctaattttgtatttttagtagagatggggtttcttcatgttggtcaggctggtcttgaactcctgacctcaagtgatccgccagcctcggcctcccaaagcgttgggattataggcgtgagccaccgtgcccagacacataaaatgattttagggaatatttgggtagcctcaatcccacagtgcaaaagttattccttattcaattatctttccatctttctagactgacatggaaaaagggtcagattgttactacagtatgcctttaaccctctcatctttttctaatagagaggagcctctaatcaaagccatcagcagtctagtatctgtgagaagtgatacctgtatttcagttacagtgataatcagtttcctgtttaaataaaagcatttaaattaaagagtcaatttaaaggaaaagttaagcaatagtgctggaaccatgtggatgggtgagatgtagatgactgaagtgggaacactcacggaccgcggaggtgtggaacagagctgtttgcctttcaggaacctccccacctatctatatccatatccttttaggaaatgccttccactgtcatgtggttttagaattgccttcgctcattttaattagacctctcggcagatgttggtgagaagggaatctgcacagagggcttcaccccaggtctggtacctcccccacctccccacctggtgctttgcaggggccgcacccactgctctgtttgccaagaccgcttgggaacaagtagatacacacccaggagagccacatcctctgtcaccagggaacagctgctcagcctcagcacttgaagagacatggaaagctttagtgtttccagaagcagcttcaagttgccaccaacacacttgttccaagaaaggttgaatacttccagagcagagaggtgaacagaggcttcagctaaaagtgataacaatacgaacagcagtaatttaggatttcttacagatcataggctttggatttgaggaaactggtctaggacaacacatgaatataactggggttgagaaagttgtagagaccattttcttctgccttaaatttatggcctcaatttatgttgtctgttttttgttttttgttttgagacagagccttgctctgtcaccaggctggagtgcagtggcgcgatcttggctcactgcaacctccgcctcccgggttcaagtgattcccctgcctcagcctctcgagcagctggggctacatgtgcgtgccaccacacccagctaattatttttgtattttaatagagacgctgtttcaccatgttgcccaggatggtctcgatctcctgactcaggatccgccagccttggcctcccgaagtactgggattacaggcgtgaaccaccgcgcccagcctgttgtctgtttttatttggggaaatattggaaactttagcaatgcaaaacttgataaattggaattcactgtccaactggggtttctttccttcacttcacatgtaggaaggagaaagaggcaaagtgcttggacagctagtcaagatttccagaatgtgtcctggttggtacatatttcactgcacagtcactgctgagattcagatgggggcaagcctccctcagagtctgaaataccaaaacttatttgtatttacttcacgcaattactgcaggcaaggaaagtaactaatgtattttggaaagatttttaaagaaaagtaaaagattttctgcttaattctcagttgcccccaatgttaaaattaaccagaatatcttattcccaagttaattgcactttaatctattctgccttccttctagaaaataatgtgttcaaggggaaaatatatatccttttataatatctagtaagaaaatccttacagagatctacattaaggagaaatggaactttttcttctaaaagtgatgtagggaaatatatatttgcttcatttacttaattcaaattgaatggtagatttatgtcagatgatataatttagtgtgatacctagttgatcatgattcattgattgtgcagctagaattagaaacagctgtgccttctaatggctgcaattcctttaaaaaaaaaatattttcccagaatgggcaacatggtaaaactctatctctaccaaaaatacaaaaattggccaggtgtggtggcatgttcctatagacccagaagctactgaggaggctgagatggcataatcacttgatcccaggagttcaaggctacagtgagccatgatagtgccactgcactccagcctgggcagcagagcaagaccctcccaaagtactgggattacaggtgtgagccactgtgcctgacccaagtccacggttctctactgggggttagtcatctagctaccctccgctcagcatacaccaaaattccatcctcacaaaagaaaagctcatgttcagcataaaccatgttgtctgtgcaaacaggttaggcacagtaaaccacccttctcagttaggaaatggtatgaacacccccagattccaagttctgggatattagctaagggccagccttactggttgatagcaggcctttacagggatagcagcatcaggcctgctacgttaactcttttttgcccccatacacgtgattggagttgctggatttgggtgcttcctggataatgctaaaaacagagtccttctctccaaccctctcaccagtgttttttatcagttggcacttccttaaaaatgaattgtactgtccaccagacaagggctattattaatgaaataaatgcattaaattcataaaaatgagtaattattattatacattaataaaaataaatgcatattatttacccccaaatttgaagaactctatatttagggcattcttgccctccttttcggcctgagtatttggctcagcctgagtattttgctcagctcgagtattttgctcagctcgcatagacttggtcctcaccatgtcctgctcccagcactccctcagcatcattcatcccattgtccacatgtctggatggggaaaagtcccaggatacgtagccttcagccctgctgttctagggcccatggacccaccagacaagtctaggtatgcttgaaggggtgcctgtgagctccctaaaactgattacagttattctgtggggaagagtatggtacattttctgtatgcaaaacatctggaattagacttcctgaaatcaaatcctgcctctggctcttatgaccttgggttacctcatgtacttaacatctctgtgcttcagtttccttgtctgcaaaatataaaatggaacaatggcacatgccttatacagttataagagttaaattggtgaatgcatgtaaagttcttggaaaggggcctggcacataggatatgctcaataaatgtcagttgttaagttctgcccacttggtgacaagtgcagtgtcagcaagtaagaggagatattttgaaacaaagagacttggtagcacttttccaaatccatcacccagggaaacagtagtttgtgcacacagtgctggggtccccaacaccacctccctttacttgctgacactaaacttgtcaccaaatgggcagaactttcagattcagtaggttcctgatgtaggctggggtatatctgtgaccttaaggcatacccagattcctcagacagcacataaatcctgttgggagtgattgcttggcagttagctaggctcacactctagtaaatggctcactttcccatcagatcccagatcctcaccatgtcctgcaggtgggcatgatccaccaggagggtggatcacttgaagtcaggagtttgagaccaggctggacaacacggtgaaaccctgtctctactaaaaatacaaaaattagtcaggtatggtgacgtgcacctgtgatcccagctactcaggaggctgaggcaggagaatcacttaaacctgggaagcggaggttgcagtgagccaaggtcgcgccactgcactccagtctgggtgacaatctgtctcaaaatacaaacaacaacaacaaaaaaaaccctgcacatactagaatcatttttatggactttcagaaggtcacttttaagaaggcatatgtcctgaaaagaagacaaattagtacttcgcaaactggctgagccttggaatgaaatgcagggaaaaagaagtctccctcgcacattattgcatggttcctgcagggatctgggaaatctcttaccaagagctgtaaaagtctcactctccaaagcacagttgttgataactaatgacttcaatgctggtaaaaatcggagcctgctgagtaagttttcagaagaactgcccatctttttgttggctgataaatccaattcttgaagatttgaaagtaaaggaatgacctgggctgttaaaaatatcaacagtgacatgttttaggcaccatctcacagggagtcttctgggtgtttggttcccacaatctgtttaatctgtcagtcaatacagctctccccaccccggccctccctcctttatacaccccaaaccagcctcttcccagcatgctgcttgggctttcttacttccaagccccttttcaggctagaagagcaaaggctgtggagacagagaagtagatcttggatctgctactaaagaactgtgtgattttggacaagttaattaacgtctctgaaccttagccttctcaactctaatactcttagccctctcggcagggcacagtggctcactgcctgtaatcccagcactttgggaggctgaggcgggtggatcacgaggtcaggagatcgagaccatcctggctaacacggtgaaactccgtctctactaaaaaaaaaaaaaaaaaaattagccgggcgcagtggcgggcgcctgtagttccagctactcgggaggctgagacaggagaatggcgtgaacccgggaggcggagcttgcagtgagccgagattgcgccactgcactccagcccgggcgacagagtgagactccgtctcaaaaaaaaaaaaaaaaaaaaaaaaaaaaactcttagccttctctatttcaagtggtcattgggaaggtaaaatgacttggtaaaggtaaagtgcttggtatagtgcctggcacatactaactgctcaattaatgtttgaaattataattcttttctcagaatgtaagtaccagtaaggcaatgaaaacaagccatcagaacagacacctattggtaacggcactgggtcctgaggggcccagctaggaattaccctcgttcgctatcttttggctacttctctggcctttgccccaactattaccaaggcagaaaatgcagtatgctggatctctacaaagctggcttacctccttgaagccttccagggtcacccacaccaaagtaaccccttggtcactatcacatcaccatattttattttcacagcacccagcattatgtgatattttcttgttgatatatttgttttctgtcttccctcactaaaggcaagctctgcgttataggaactatctcactcccagaatgggaatcagtacctgaaacatcagaggtacaaatgtttgtgggagaagggagagaggtcaggggaaagaaaggggaaaggcagggaaggcagatagatgggcacttgtaaagtcaacaggtgtaactatttctccctcttccaaccccctcagcactttgtatttcaccatgtagtttgggtatgcatcggtttactcctgcccttgccataccgaagctccctgagagttgggattttctgtagcccctggcacggtgccccacaccattagaggattcatcagtagttattgcttaaaggatctataattccatttctttggagcaatttacaatgatcggataaaagaatgttcaattatttaacagcgtaaagtacaaagcaggatgtattttcatttccatcttttcagaattaagcagaaggaaagcaatgcaattcattacagttatcaaataattattagttttccagggccattcacccatgtcagtggctgtgaacctaggtaaggaaagcttagtcctccgttatactagtgggaacaattgaggttctccagcactgaggagcaaaatgagatgtggtattcatgttatttagttgtaccaagggaatctggtgggctaataactctgaatgtcttcctaggtatgacgctcaggctatgataagtaaaggggatggtaggaacccataatgctccacgcaaagctcaaaaagggattattttgtcattttaaaatcttcatgaaagtcttgaattcttcccattttcccaaattgagagataagagtctgaaagataatttagcaggtttaaaaagatagatgtattagacctagaaacatattttacggtcttcctccccaaattgtactataaacaaccagaaacttacttttattctcattgtacactcattcattcattcattcacatattcaacatgcatttacttggtgccaaccatgtgcaggtgcctgtgcttgagcagtggggagatgccaaacgagacacctctagcctggaattgcccatgacctggggagagagagcatgggcaaagggcccaaggccagagcatgcctggcgtgtctgagaatcagcaagggcagtggccagggtggagtctgtgaggaggagggggagtgaatgaagtcagagtgttagaggacagggagaccatttgggctcttgcaataatctaagcatgagataaccgtggcctggaccagggtagtggaggtctagatggtgagccatggtcagatgctggatgtacattgaaggcttattgtggccacaggtgggataaaacccttaatctcaaggctacgcttgctctgttatgggaaattgcatttatatattacatgttgtaattacagaactatgtttgcagtaggaaaataagtgtagttgcccaaagcagtaacgtacagccatcacgcgccaccctgctgactctttttctgtaacttcatttgtatctgagtggcttcacttcacttgttattcagaaagcctcgataccctttgtgttgacgtttggttacaggtatgtaacctgtttgtaatcaactttgtgacactaagagatttatttctaaacagcaacataaattcaaaattttccctaagtgccaaatctatcatttgcagacatgtatgggtggaactgagattcactaacatttactgggcgtttaatacatgccaagtactacattggggcactcacagaactgttatgaattgatctttccaataacttcaaaagaagtaaatttaagtgtacatattaaaatttccaagtttccaaatataggccaagattccaaaagtctttcctttgctctgcaatatatacttactcagtgacatcacgtcatctgctgttagtgagcactggtgaagatctaggacttgtagatgctttagcatgaccaactgagccggcgagtcttcaaaacctccacctagatccttattgcaggaaagatctaatttcctcagctcacccaaatacctaaaagcagcatctacaaagaaagtcagaatcccattctggtagctggacacagtggtgtacctatagtcccagctgctagggagaccaaggcaggaggattgcttgagccccggagttcgagtccagcttgggcagcatagtgagatccatctcttaaaaaaagaaaaaccgggctgggcgtgatgactcccatctgtaatcctaggactttgggaggctgagagggtggatcacagggtcaggagttcaagaccagcctggccaagatggtgaaaccccatctctgctaccattctgacatatcgcaaggtggtaagaaggtgtggaacaggggtggggccatggtgcagtaagggaggttgagggaacacactgtgttcacaaaagacaaaaggaggaataagtgtagacttcctaccatctggccttctgtgaacccgaccatgatttcacacacacgcttcctaagatctgcatacattgccaagggttttgacatgaatcctgcaactacacttgagcatcctctcctattacacttgagcattggagtttacatagatttttagacttattcaagctgccagtgaatattacaggttctgtaagttgaaggggaaacacaatatcatttcctattctctgttaatatggatactatatacagaggagtaagttttaactgtggacgccatcgaagccgttctttttatcagtacctattccttcctactactgagcataaaataatgctgacactttcaaaagagaaaacctagtagttctagcagcaaagaaactttatttttcccagtgtttatcttaacctaaaatatactggccttttcagagtcagtcatactaaaggcttatttttataatcatgaaagtgtatgttctctataaaatatttagaaaataaataaaatataaaatatgtatatatttttgagatggagtctcttctgtcacccacatcggctcgctgcaacctcacctcctgagttcaagcaatttctcctgcctcagcctcccaagtagctgggattacaggcgcacgtaccaccacgcccaactaatttttgtatttttagtagagatggggtttcaccatgttggccaggctggtctcaaactcctgatctcaagtgatccgcctgcctcagcctcccaaagtgctgggattgcagatgtaagccactgtgcccagcctaaaggagatttcaattacccataatcttattccccagcacaaccactgtttatattttgctatatttcctagtaacttttcaatatatatatttatatgtatatcatatataattatacatgtaatcttaaatccagccattgttaactcacccaatattttgacactcttttgtgataatccacatgaatgtaacttcagtactttcagatttgaggtgctttttaatccctgagcaatactgttcagactgccaacaatgtctctgttaatggaaagatcaagtacttcgagactttgcagcataggtagcagttgacctagaaggaaagaaatccaaataagaagggtaggtaggaggggagtggagttttacatcacctggggatatcgtgacgtaaaactccactcccctcctacatacccttctttaaattcagaataagacaaaacacagcaaacttcccaagctatccagtgggcatcttcactttttttttttctcttcaaattccacttacccagaaatgtcccatcttctgacgtgagggagcaatccacaagctcaatcatttgtatcttgctccctttttggaacttctgaaggatcagaggcaaatttcctcccactttactgttccaagacaaatttagctcttcaagttcaggaatcatctcaaatgcttctcctgttaacaaatggcccgaaaattctgttggtcactagtcagaaaagcagggaattcatttcagaatcagcacaaccatgattaatggagtgtggaaactgggccaggtactgtcctgtttggcaccgaggaacagagagaaggaaagaacccaattccttcatagcagggcgtgcttctctagatttacaggcacagtcattctaatccctccaaaattctgaagccatgcgtatgagctaaacaattgttgttgtagaaaaatccacctattggtagggtggttttaggaagctgcttttgtggtggttcatctgctttcccttagcccctctctctgggatcagcatttctgagaagtttgaccagggatagaagtgaggcaaagcagataactggccaccacagaggtaaagctctctccaatgtcaagaatatcacatgcctatatatatatatatatatatatatatacacacacacacacacacacacacaagtatatatatacacatatatacatacacacacatatacatatacatatatatatatatgaggaatatcacatgcaacctgaactgaccactacagagagaaactaataatagagcatcaggcactagaagcttataacagccgtgctgccttaaggggtaaaggagggtgcagtgacacagggatgaaaactaacatttctgaaaccattacacactggaaagctcccagggctgcagagtggaggctgggagagaataggagaagtgaccaaacagatctgtccttaggaatgattttcactgccttgcgggtagacacatacatggaaaatgtactttctcaatgtgcaaacaattaagcattctggcaagtcccctgtatctagaaccctctttactac

SEQ ID NO: 5644 - DNA, 95482 bp, Homo sapiens
  PSARL gene - 185029880 - 185085361 of chr3; NCBI Entrez Gene ID: 55486; Build 35; sequence includes 20,000 bases upstream of initiation codon and 20,000 bases downstream of termination codon of the gene
tctcctgcctcagcctcctgagtagctggaattacaggcgcaccaccacaagccgctaatttttttgtatttttagtagagatggggtttcaccacgttggccaggctggtctcgaacttctgacctcaggtgatccacctgccttggcctcccaaagtgctgggattacaggtgtgagccactgcccccggccataatgctgttcatatagagcacctgacacatagcaggttctcaaatctgggtgctctctcttccctccagtgccccctggaggaggaaaccctacaaaaccttgttcataagaagcaagctctgcctcagagaagggtctgctcctgtgagaccaggggtgacagggtggtttggggtgacccaagggccgcaagcctcggcagcagtgtcctgggtggggacggaggcggtgagggaggatgggggtgccagggcacaggaaccctccccagacccacactaagccacctgcggagacggtgcagctggagctggacgaggtgctgggtgctgccccggttgtctgctatgaagaccgcaagcgactgccttacaccatgctgtcctccatgacgtgcagcgcctcagcagcgtcatggccatgggtgccgtgcgccagtgtgtgacctccacccgtgtgtgcagctatcccgtgagcaaggtaggtggccctacgcagccccacacccaacccagtgcctgcagaaagcatccttcctgccagcacagccatctgctatagcttctgccaacctgccagctatcagtcacttaatctctctctctctctgtggcgtttgggacgggggttatgattataaaagaatgtagccgggtgccatggcttacgcctacaatcccagcactttgagaggctgaggtgggaggattgcttgagcctaggagttcaagatcagcctgggcaacatggcgagaccccgtctctataaaacataaaaaaaaattagccaggcatggtggtgcacacctgtagtcccagatacttgggaggctaaggcaggaggatcgcttgagcccgggaggttgaggctgcagtgagccataattgcaccactgcactccgtactgagtgacagagtgagactctgtctcaaaaaaaaaatgtataatataaagaatgtactcactgagggataatttttaaagttctctgttgttcagagataacctttgcagacatgataatccaccactctccaatctttttttgcacacatatagtttacatagttgcaattctgctgaatatatcattctgaatccttcattgcacttaatattcagattcttctatagcagtggttctcaaacttccaggtacatcagaatcacctggacggcttgtgaaagcagacactgctggactcttcctccagacattatctgtctagggtgggctgagaatttgcctttctaacaagctcccaggtggtgctgatgctgtgagtccagggaccatgctttgaaaaccactgctctacatcattctgttttttgttgttttgtttttgttgttgtttttttgaaacagagtcttgttctgtctcccaggctggagtgcagtggtgtgatctcggctcaccacaacctctgtctcccacgttcaagcgattcttctgcctcagcctcctacatagctgggactacaggtgtgccaccatgcctggctaattttttttttttttttgtatttttagtaaagacggggtttcaccatgttggccaggctggtctcgaactcctgacctcgggtgatcgcccgcctaggcctcccaaagtgctgggattgcaggtgtgagccaccacactgggcatctacatcattcttaatggctgcataatgttccaccaaatggatgttttgcaattttaacccttgttggtgaacatttaggccatttgcaatttatgtgccttaggcttggtctgcattttgtattatctccttaaaactggtttctagcagaaatgccttgcttgcttctttcattttatagcaaggttaagaaaacaagtgccaaataaggagagaggaagaaagttataaaaataagtcaaatcaagaacagttgccacatatgtacataaaactcgagtctgaatttcattggagtgaagggaaaaaaggaaatctcgattaattatgagttattatgtaataaaaggaagcatgcctgtatcaggaaagctttggcttatcacatgcctgtaagttatgacaaggatcatcattcacaatattcttttgtgggccagtggaccatgtagtggcagtgatttaagcaggagtttttaaaagatgcagaaatattcttcaagatggcagctgcttcttatctcaattccttttaagagataaaattcctttcattcctacagtcagccaaaataacacagttgaagtttatataaataattatttatttttaacctctattcttttttttttttgagatggagtcttgctctgtcacctaggctggagtgcagtggctcaatcttggctcactgcagcctctgcctcccaggttcaagctattctgcctcagtctcccgagtagctgggatgacaggtgtgtgccaccatgcccggctaatttttgtattttttagtagagatagggtttcaccatgttggccaggctcgtctagaactcctgacctcaagtgatctgcctgcctcagcctcccaaagtgctgggattacaggcatgagccaccgcgtccggccaatatttatttatttttgagacagagtcttgctctgtcacccaggctagagtgcattggcacgatcacggctcaccacagcctctatctcccagctcaatcgatcttcccacctcaccctcccgagtagctaggactacaggcatgagcccccatgcctggctaattttcgttgtttttgttgttgttgttgctttgtttttttgcagagatgcagtttcaccatgttgcccaggttggtctcgagcatagttgaagatgatagctctctggtgatccagcttgagatagctttccgagcagatttttgacgtgagctggacaataacatgaggacacctgctctttgcccaggcttgctgtgtgctgagggctttgtgcccacggtgtcattcggtacaatggtgctctgtattgttgacggagccttgcagatcctagatgacagatgttgaattacttacctatcttactgtgtaacaaattaccccaaaacttagtggcttagaacaacagcatttatcatttcacagtttctgagggttaggaaaatgggtgtggctcagctggatgcctctgactcaaggtctctcatgaggttaccatcaagttgttgttggggctacagtgtcacctgaagactcccctaggggaggctccacttcaagctcacttacatggaggtcttcaggacccggttgctcatgaactgttggctggagaccttcagttccttgacacatgggcctctgcatagggtagctcaaaacatggcagctgaaccccatcagagagagcaagcaagagggcacccaaaatagaagcaatggtctttttgtaacctaatcttagatgtgatatcccattgcttttgccatattctttttttttgagacagaatctcgctctgtcaccccaggctggagtgcagtggtgcaatctcagctcagtgcagcctctgcctcctgggctcaagcaattctcctgcctcagcctcccgagtagctgtgattacaggcatgtgccaccatgcctggctaatttttgtatattttagtagagatggagtttaccatgttggccaggctggtcttgaactcctgacctcgagtgattggcctgcctcagcctaccaaggtgctgggattacgggtgtgagccaccgcacccggccgcttttgccatattctatttgttgggtttgttgttgttgttgttgttggtttgagacagtgtctccctctgttgcctgggttggagtgaagggacacaataatagctcactgcagcctcaacctcccaggcttgggtgatcctcccacctcagctgcctgagtagctggaactacaggcaccacattgtgccaccacaatgggctaatttttaaatttttggtagagatggggtttcaccatgttgcctaggttggtctcaaattcctgggctcaagtgatcctcccaccttggccttccagagtgctgggattccatgcatgagccactgcgtctggcccattttctatttgttagaagtgagttactaaatccatcctatcctcaaggggaggggattacacaaaggtgtgtatcctgggagtcaaggctaactggggtaactatcggggaatctgtcccgatagtcacgtaggttcttttctgtttttcctaagcgtcggccagcttgagaaataaagggacgagtacaaaagagagaaattttaaagctgggcgtctgggggagacatcacgtgtcggtgggttccgtgatgccccacaagccgcaaaaaccagcaagtttttattagggattttcaaaaggggagggaatgtgcaaataggtgtgggtcacagacatcaagtactttacaaggtaatggaatatcacaaggcaagtggaggcagggcaagatcacaggaccacaggactggggcaaaattaaaattgctaatgaagtttcgggcaccatggtcattgataacatcttatcaggagacagggttttgagagcaactggtctgaccaaaaatttattaggcgggaatttcctcttcctaataagcctgggagtgctatgggagactggggtctatttcacccctatagcctcgaccataagagacaggcacacctaggggggccgtttataggcctatacccccaggcgcgtattctctttcccagggatcttccttgctgagaaaaagaattcagtgatatttctcccatttgcttttgaaagaagagaaatatggctctgttccacccggctcatcggtggtcagagtttaaggttatctctcgtattccctgaacaattgctgttatcctgttcttttttcaaggtgcccagatttcatatcatttaaacagacatgctctacaatttgtgcagttaatgcaattatcacaaggttctgaggcaacatacatcctcctcagctgacaggattaagagattaaagtaaagacaggcataggaaatcacaagggtattgactggggaagtgataagtgtccatgaaatctttacaatttatgtttagagattgcagtaaagacaggcataagaaattataaaagtattaatttggggaactaataaatgtccgtgaaatcttcacaatccaggttcttctgccatggcttcagccagtccctccgttcggggtccctgacttcccgcaacaggtaacataccaacatgtgtaggtggtgaggttgccattttaatgaaaatgaaacagagcgactcatcttggtgccctggtgcagggtgatgcctctgtacatagaggtggtggcgggagccctgagactttcctcggaaaggagctttggctctgccccgagtactgccctggagtacagtggtgtgatctcagctcactgcagcctccacctccggggctcaagcaattctcccacctcatcctcccaagtagctggtattacaggcacgtgccaccacgtccagctaatttttattatttttattttttttttaatttgtagtaaagacggggtttcaccaggttggccaggctggtcttgaactcctgcctctgcctctcaaagtgctgggattacaggcataagccgccatgcccagccccattattaacttattattaatttgcccagacttgaggttccttcctccacagatttttttcttcacagaagccctatccttcggacgctttgttgctgtttcttttccatagatagagaaacttcagcataggcagcttaagaaactgcccaaacacagctagtaagtgacttagctgagtttcaaatgcatgtccctctgactctaaagtgttttcttttcctaccatatgccctgctgtttgtatttatacgaaaatgccactctaggtaagtgaaccaatgtgttcaatggagatgttttacactgtcattctgtccttggcagaaattggccagcaagtttacaggtttgtcaagagtctctgggaaagtggataggaccagggcatcaggtcatcttgctgctggcgtggcagaaggacccaggcccaggttgtctagaagctgtgccaacttaagttaaaaagagggggccagggtactgctctgtgttatgccgtttgggattagaaatttccttattaagagctcattcctgccaatttgattctaggacttgttctgtgataaaggctccaggggcccattaacgagctgaaatcaatattgagcttttacaacttggacgagagatgtctgctgaaagtggaatcaaagcttgacagtagatcattaaatgttacagatattcctaaactgttcctaaccatttcatcagctgagtgatcgtgacaacagcaatagtccctgatacgacggttgcacttccagcctgtctctcttctcagacattctatttgattgcgaattccaaattgccatttactgggcagaagctggcacagcgaccccaggaggtacccagcaggtagatggttctacagtctggggaagtggagggcggttgttgcggggggcggggcgctgtcctttttgcatactggataggctgtgctctgaacctgttccatgagctgagaacctcctttgcaaggaggccagaacatcacccaaaaaaggacacaaataattctggagggaaaagagcatcttgctaggagcctcctcctctgaaggtgattagtaagaaccgttgcaatgcagaggttacttaatcccaggtagagaaaatgggggaattcccatgactagaactgggaaatctatagctcactcaggcagcagcaagaacacaggcctccccaacacctctgcttgaagctacagagtgagcaagtctgggtgccctattggtacacatggctaggatgaggcaccttgcctaagcgtgccgtactgcaacaacggcaaaaaagaacaatttcccctgaaaacaatttctgcattctgtttttttttttgttgttgttgttttgtttttttagatggaatcttgctctgtcgcccaggctggaatgcagaggcgtgatcttggctcactacaacctttgcctgcctcagcctcccgagtagctgagactataggcacttgccaccacgcccgactaatttttgtatttttagtagagatggggtttcaccgtgttggccaggctggtctcaaactcctgacctcaagcgatccgccctgattggcctcccaaagtgctgggattacaggtgtgagccactgcgaccagccagcatctgctgctccatttctgcattctttattggtttctgtttagaatgcaggcttcaaactcgctaagcttttttttttttttttaatttcaagctttttctttggtcagaatcaagaattctgtagtcagccctctggtctctacagggatagctggtttaattttgtggtatttggtaaatgagccctggggtatgaggccttccccggaatcccagagctgagtgttctagggctggggaccataaccgaccccatcctggctccactttggcctccttatgctgtttccggtcagcccagggcccacatggtaaggagcagatgttaccctgctcccatctgcttggtctgattctctttctaatcactcacttctcctttgagatagagtgagggctgaggtgagggtgagagggaagatttgggtttgggtttgggggaaggtgagggttggggttaggttgaaggttagagttgggcttatggttcatgttttcctctccccaaccctaaagagtgaagcttgctgtctcctctctgtctttccatcactcagttcctctttctctgcttgtttgccattccatttctcctcgttctgtctcttcctcttaacacccacgtgtgcacacatcccctgccccagtgtgtattgtcctgggctgtccttggccccttccagacatgcccccagctgttggccttctctgtaggaggcaatggcttcatgtccctagacgtggctgggagtcttcaggacaaagctgggcagtccttagccaggagggtgtcctgctcagctccttcactgatgtgagcctggaggaagggcagcctgagggccggctgctgagtctcctcaaggcccctggactactcccaccaacacactgggtattctccaagctcactgtggctcagtgtcagggctgggtactgggtaccatctgaggctccctgagccacaccagcatctctctgcagggcaccatcatcttacccaacctggcctctgtgctctatgaccctgagtgctgggagacccctcgacagttcaaccctggccacttctcggacaaggatggaaactttgtggccaatgaggccttcctgccattctctgcaggtactaggcacagagctggatcctgggtggtgggtggggctgtggtgggacagacacagggacagctgccacctctgacttttctctctgtttccagggcatcgtgtctacccagcagaccagctggctcaaatggagctcttcctgatgtttgccaccctcctcaggacctttcggttccaactgccagaagggagcccggggctcaagctggagtacatctttggcggcacttggcaaccccagccccaggagatctgcgcagtgccccgcctgagcagccccagccctggtcctagggaggatggcctgtagccactgggggtctggaggcctgtcccccatgaagtccttcctcagtctcttttggttcctgcaaagttagaaaagaggaggaccaggggttcatgcagctcagctgctcatggttgcccctaacacaagctctgtggggtgacactggagaatagacttagcaaggattctacagaggtagctcagtttgggtagttcaattcttaaattaggttagttatgctttggcaggcgaagattttataagattggttaagtttggcattaaatcagtccacaaagttaatattggggaatcaagcctcacaaggcagcagctaactaggttcagaggaaaaggcaaactttcgagcaaaactatgaatataataatgcatgcaaatgcgaatactctagatgccggggactggtaaaccaaaaaaaaaaaaaaaaaaaaaaaaagtgaagcgggggcagcttattttctgccttctcctgccctctcctgaccagaaggaagaactgcagttctctgcagacctggggcagagaaagatctcaccatctcaatacagcaaagccagcagaccatataactgtttccagcaaattcttcaccaaagacccactttagtttccacacaagggtccctaaattttgaatccttgcatctccagacaagccttgtttattaaaaaagaatgacttgtggctgggcatggtggctcacacctgtaatcccagcactttgggagaccgaggcaggtggatcacttgaggtcagaagttcaagaccaacctggcaaacatggtgaaaccccatctctactaaaaatacaaaaattacccgggcatggtggcaggcacctgtaatcccagctactcgggaggctgaggcaggagaatcgcttgaacccagaaggcagaggttgcagtgagccaagatcgcaccactgctctccagcctgggatccaagagtgaaactgtctcaaaaacaaacaaacaaacaaacaaacaaacaaaagcaaaaacaaagaatgacttgtgagttcctggaggcagaggttgcagtgggcggagattataccactacagtccaacctgggtgacagagcgagactctgtctcagaaaaaaaaagactgacttgcatcaaggaaatgcaaactaaaatcaaatgaaataccattacataccgattagaactgctaaaaagaaaaccctgacaatcccaagtactggaaaagatgcgaagcaaatggaattctcataccctgcaggtggaaatgtaaaaaggtacgactacattggaaaacagtttggcaatttcttgtaaaattaaacattacaccacacaacccagcagtcccaatcttaggtattacccaaaagaaatgaaaatatatgttcacacaaatgcatatctatgaattatatgattccatttctgtgatattcttaaaaaggcaaacctatagggacagaaaatattccatagataagtggctgccaggattcgggagcagggttataggttgactgtaaaaagacatgaggaaactttctggggtaatagaaatgttctgtatcttgattgtggtgatggttacacaactgtatgtgtttgtcaaaactcatacaactgtacacttaaatgagtgttattgtatataagccatgcctcaataaatctgagctttaaaaaggaaatgcctcgggccggacacgttggctcacgccagtaatcctagcattttgagaggccaaggcgggcagatcaccggaggtcaggagttcaagaccagtctggcaaacatggtgaagccctgtctactaaaaatacaaaaaagttaactgggtatggtggcacgtgcctgtaatcccagttattctgaaggctgaggcaggaggatcgcttgaacctgggaggcggaggttgtagtaagcagagattgcaccactgcactacagcctgggagacagaatgagactccatctcaaaaaaaaaaaggaaatgccttacctctctcttttgtgttatttaaaggacgtacatatgaatgaaccaatgtttctaattagtaggagatcaatcattactgctacaccaggctgaaaggagtctaaccagaaataaaacatgacgtattggccaggcttaatggcttgcgcctgtaatcccagcactttggaaggctgaggtgggtggatcacttgaggccaggagttcaagatcagcctgggcaacatggttaaacccccatctctactaaaaatacaaaaattagccgggcgtggtggtgcacaccatagtctcagctacttgggtgactgaggcaggagaatcgcttgaacccaggaggcgaagattgcagtgagcagagatcgcgccactgcacttcagcctggctgacagagtaagaccctgtctcataacaaaacctaacaaaaaacaaaaaccatgatgtgtgaattagcctctggcctttcttcaggctttgtgaaatcctggagctttctcatagatatcttattttctgtgcggtgccatatccagggcctcgggagtccagactgggaagcactaggcaagtggggtcccagagagcaggagacagcctggggttctcggccctgggaggtcccaccctgagctggcagctctctgtgatccaggcaggatctggggcagagaaaacaaagccaggctctaattcacctgcttcctacctcactttcctaaccctttctctgttagagcccctgtctggagcttgcagccccttctaacactcatcctctccaccatccagcctcctgtctttgatcctgtccagccctctgcgtgttattccattgaaaggccaactcctccaggaagctttccctcacctggactttggccttggttgaaatcccagttttgctctcaataacccagtccttgtgtgcttcggtctcctcatatgacaaatggaggcttcctttaggattgtcgggagtgacaatgcccagcacagggcctggcgggtgatgaatgctctgtttatgttggcagggctctccttcccctagacagcatccaaaagtactcgcacctttgtttttagctctaaaatgatgacgctgcagggagcccttcccctgtggataggcttccctttcagcttccatatcctcatgacgatatgacaatagctgccatgtgttgattgccaaccgtgtgctaggaagtgcactgggcacctaacatagacgaagccatttaaataccaaagtgacaaggtagatacaattatctgaattaattaattaatttttgagatggagtctcactctgtcacccaggctggagttcagtgatcttggctcactgcaacccccacctcccgggttcaagcagttctcctgcctcagcttcccggatagctgggattataggcacgcgccaccacgcctggttaatttttgtatttttagtagagacagggtttcaccatgttgaccaggctggtttcaaactcctgacctcaggtgatctgcccatcttcgcctcccaaagtgctgggatcacaggtgtgagccaccgggccagcctgaatttacaggaataaaagtcagaagctagccggtgaattagttagaaagtatcagaatatcaataagcctcagttccctcatctgcaaagtggagataacaatgctaactcatttgattgatattaacattaaatataataatgcggccaggcgcagtggctcacgcctgtaatcccagcactttgggaggctgaggcgggtggattgcctgaggttaggagtccgagaccagcctggctaacatggtgaagccctgtctctactaaaaatacaaaaattagctgggtgtggtggcgcacgcctgtagttccagctacttgagaggctgaggcaggagaatcgcttgaacccgggaggcggaggttgcagtgagctgagatcatgccaccacactctagcctgggtgacagaacaagactccgtctcaaaaaaaaaaaatatatatatatatacacacacacacacgtatatatacatatatatacacgtatatatatgtatatgtgtatatatagtgtatatatgtatatgtgtatatatgtatatgtgtatatatgtatatatacgtgtatatgtgtatatatgtatatatatgtgtatatgtatatatacacgtatatatgtatatatatacgtgtatatatatgtataataatgcagccgggtgtggtgactcatgcctataatcccagtactttgggaggccaaggcgggcagatcacttgaggtcaggagttcgagaccagcctggccaaatatggtgaaaccttgtctctactaaaaatacaaaaattagccggacttagtggcgggcacctgtaatcccagctactcgggaggctgaggcacaagaattgcttgaatcgaggaggcggaggttgcagtgagcagagatggcaccactgcactctagcctgggcaatatagcgagactatctcaaaaaaaataaataaataaaaataaatttaaaaatataataatgcatgaagaatacctagcacagtccctggtacatgctaagtgcctaataaattgcaactactaataataatcaataaatattccttcgcctggttcatggtcagcacaccttacccagtccttccctttgtcagctgactgagccctggctgtcccctgaggatgctcctgcagcctctgaatggagggtgcttgtttcctgtgccagttcaggttctgatcagaaagggcacgctcactcactcaaatggagcaatgaggagagtttcagaacagagaacacagaagccaatgcatgtggctcaagaagggagggactgggaagaataagtgctctaaactcatttttcccttatgctccgatctcttgtttgtggctgtaattggctgagcccagctaggagccagagagcaagagagcccattgatgtagtccataaaggtcagcctcctggccgggcgcggtggctcacacctgtaatcccagcactttgggaggccgaggcgagtggatcacctgaggtcaggagttgaagaccagcctgaccaatatggtgaaaccctgcctctactaaaaatacaaaaattaggccaggcacagtggctcacgcctataatcccaacactttgggaggctgaggcaggcggatcacaaagtaaagagatcgagaccatcctggctaacatggtgaaaccccatctctactaaaaatacaaaaattagctaggtgtggtggcgtgtgcctgtaatcccagctactcaggaggctgaggcaggagaatcgcttgaacccaggaggcagaggttgcagtgagctgagatcgtgccactgcactccagcctggcgacagagtgagactctgtctaaaaagaaaataataaaatacaaaaattagccaggcatggtagggggcactcgtaatcccagctactcgggaggctgaggcaggagtatcacttgaacctgggagacggaggttgcagtgagcagagatcgcaccactgtgctccagcctgggcgagagagcgtctcaaaaaaaaaaaaaaagtcagcctccggtggcctggagcagtgtatgagagtgagctggaggggcaagcggaggatattcagcacaccccagccccaggccccttaggttccggaggtgagcatcctcctcatgccctcataattcttccagattacttgcccaaagaccaccttgaccacatatgtctcctctgctgaaactgtctcctttatctctagcacctcttcagcactattaatagccttctagtcaccctcttcttcactgaaatgttaggatttcattccaagtcctgccatcaccctgaagacctcaagttcgtgtgagcaatgcagtcaacgtccaggacctctctgtttctgagctccctcatgtttagtgactttcagttcgttcctcttcagccatcagccctatggccacacccaagttcttttcagtccctaagagaagctctcaccctctgaaatggtaaattcacagatccctatagagaatcgtgaagggtctaatatttcaccctacttgaaaactaacaagttagcctggtatagttttatgggtgctggcagaaaatacaagactcctgggtcagaaatgaaggacaatttattacccacagcaatagcattagccagactattagaatttttgtgctggttccttgagtcccaattctcatggagcaatgtgaagagggctggactgtacctgcagactcagtgggttgcattaaggagaggaattctgaactgaggaagtagaatcttttatttatttattttgagacagagtcttgctttgttgcccaggctggagtgcaacggcatgatctcagctcactgcagcctctgcctccatggttccagtgattctcctgcctcaacctcctgggtagctgggattacaggcgtgtaccatcacacctggctaatttttgtatttttagtagagacggggtttcaccatgttggccaggctggtctcgaactcctgacctcaggtgatccacccacctaggactcccaaagtgctagagccaccgtgcctggctgaatcagaatcttttatttatttaatgattattattttttttgagacaaagtctcgctttgtcccccaggctggagtgcagtggcacagtcttggctcactgcaacttctgcctcctgggttcacctgattctcttgcctcagcctcctgagtagctggaactacagacgtgtgccaccaagcctggctaatttttctaattttagtagagatggggttttaccatgttggccaggctggcgttgaactccttgcctcaagtgatccacccacctcggcctcccaaaatactgggattacaggcatgagcccctatgccccgtcatggcattagaatcttttatgataggcagcacacaagcctgtgctctctagggtgatattatctttcttccaaggttataagccaactgccctttgctcttgaggaaaacatctctacctttcaagattgttcgcttgtttactataaaaactcactattaaacagtagattccccaggctcagtattctttggttgagatgcaaatccactgcatgttcttcatccatttggctcatggcattgccaccatgggacttggagaacatgccgtggtaatataaagtgttttgtctctgacccaggagtctcctgtcttttgccaacatccaatcttttagcttgcaaatagggtaaaatcaaatcccagacttgacacctctgatataaccaaagtgaatttattttttagaaactgatgtgtattttccatcaacgttatttccatgttgcttaagagcctgtgcaagaacagcttaagaccattcagtggttgtttctacccattcagtggcctgagcagtgggagctgcagaccagtcttctgtggcaggctgagcactccagtcttcagtagggacctgatgaataggcacagagggcacctgtacaccatcagaccagtctccaacctcaggctgaatagcggtgaactcaggagctggagcagtccatttgccctgaaattcctccttggtcacagtcttttcagcagcaacctgctcctcttttccaatctcttcaggatctctgtagaagtagagatcaggcatgacctcccatgggtgttcgagggaaatggtgccacacacgcgcagaacttccagggccagcatccaccagctcggacccactgagggagctcccttgttgttgcatgtgatggcaatgtccacatagcgcagaggaaaatctgtgtgacatagagcaatggtaggtaggttaacataagatgtctctgtgagaggctggtggtcagccctgggatcagtaaccactagaagccgtggctccctgaaggctgcctgggtctggctagtgaaggttccaggagtgaagcggccaacaatttgagtggctccagtggcagcagcaaacttcagcacagccctctggccagtattgctagaggacatgacactgacatcaacagggtttttaaaggcagcgatggcacgagctgccagcagaaacttcttgcttctcccaggtcctcttcagatgtaggatgtagacgccatcacttttcttcttacagatgtgctactccatttggaagtcaaggttggtaccacctaagtgggttcctgctgcaaggaacttaaggacatcctcctccttcatttgcaggacatcaagggctctagacattgtgaaagtttccctttaagttacaatgagaattgtagggaccagccccacagggtcggtgggtctctccccacatgcagagacgagagagcgtagaaataaagacacaagacaaagagataaaagaaaagacagctgtgcccgggggaccactaccaccaagacacggagaccggtagtggccccaaatgccaggctgcactgatatttattggatacaagacaaaggggcaggataaggagagtgagccatctccaatgataggtaaggccacgtgggtcacgtgtccactggacgggggcccttccctgcctggcagccgaggcagagagagagaggagacaaagagagaaacaacttacaccattatgagagacttttagtactttcactaatttgctactgctatctagaaggcagagccaggtgtacaggatggaacacgaaggcagactaggagcgtgaccactgaagcacagcatcacagggagacggttaggcctccggataactgcgggaaagcctgactaatgtcaggccctccacaagaggtggaggagtagagtcttctctaaactcccccagggactactaagtagcaggtgtttttccttgacatgctaccgctagaccacagtctgcttggcaacgggcatcttcccagacgctggcattacccctagaccaaggagccctctggtggccctgtctgggcataatagaaggctcgcactcttgtcttttggtcactcctcactatgtcccctcagctcctgcctctgtatggcccggtttttcctaggttatgattatagagcgaggattattataatattggaataaagaataattgctacaaactgatgattaatgatattcatatataatcacgtctatgatctagatctagtataactcttgttgttttatatattttattatactggaacagctcgtgcccttggtctcttgcctcggcacctggatggcttgccgcccacagagaatctagaacaatgccgtatgggcccctctctgggttgtgtggaaaaggcgtgaatttattttagtttttcaaacaagtcgtgcgctgggagacatcacaaatgctattctttctgaggaacacttcaatcctcttctcttggtgacctctatcagtttctctgggaagccttctccctgagcctcccatgccccttccttcaattgggctatatcccccctctctagactcctacagagccttctcccccaatacaatagaatctttgtgaggtcagatatagtgtcttctcaattgtatccccaggtttaacatatcacctgacacactgtaggtgcttaataagagcttatggaatgaatgaagtgctattgcagagataagcataaagcggtatgtgagtacaaaggaagggaatctaaattggagtggaggtctgggaaaggcctcctggaagaggtgacacttgaggctgacctgaaggacaagtcggttagatgtttcaagtggtgagaacggtagcatgaatgctcagcagtgggaacgcggatggtgcctttgagtaatggccaatgactgtatggctgcagctagggtcggggggaatggaatggcagggaatcaagctaactgacaggtagttgagggatggattatgaaaaagtgaaagcccgcttttcatttcaggcttggattttgtgtttatttacttatttatttatgagaaagggtctcactctgttgcccaggctggcacgatatcggctcactgcaacctcccgagttcaagtgattctcccacctcagcctctcgagtagctgggattacaggtttgcgccaccacgcccagctaatttttgtatttgtatttgtaatttttttgagacggatctcgctctgtcacctaggctggagtgcagtggtccaatctcggctcactgcaacctccgcctcccaggttcaagcaatactcctgcctcagccaactgagtagctgggattacaggcccctgccaccatgcccggctaatttttgtatttttagtagagacggggtttcaccatgttggccgggctggtatcgaactcctgacctcaggtgatccgccggcctcggcctcccaaagtgctgggattaaaggggtgagccaccccgcccgataggcttggactttgttaaaggcatacagaataacacgaagtggtgagatgcagaaaaaagtagtaatttaagaaaacttggcttgccacgttggttcctctagggaccagccctgcaactccgggcaagtcctatcccctctgaccagaggcaaagtgaaacagtgatgacatctacctctagcagtgctgtgacgattaaatgcgatcttaggcaaagcgcctggtatgtgccgttactcgaaaaaatgacagttgtccctcttcgctctggccccatcctcctcatctgcaaatgccgggaggccgggccactctcgcaggtcgctcccggagccagctgagcagtgggaggggaagcggtgggacagaagggcgccagccagtcgtccgggcaccgtggctggttcggctgccgctcagccgcgcgggggcgctctagactgctcctcgtgctctatggtgttgccttcgccccggaagtagttgcgcagctggggttggtaaggtcgggccatggtggggcagaggttgggaagatggcgtggcgaggctgggcgcagagaggctggggctgcggccaggcgtggggtgcgtcggtgggcggccgcagctgcgaggagctcactgcggtcctaaccccgccgcagctcctcggacgcaggtaatagccgccgcgctctggtcttctcgcctcttggtccctgagctctggccgtgtatcctcgggggcggaggccgtctgggcctcttgtgctggccccagctcacccccttcaccttacctgccccttctctctcctctctcgcctccgtccagtcctcgcttctcgctccccttgcccagcccagccccccgcgagcctgcgctttctcctttcccattgggaaggacgtgactggaaggggaactaagctgagggttcattgcgtgccacacttcataatcgcgagtggaaactgttgagccagtttctgaagtgaagaagttagtacagctggcagaatggcggtttttattctttttccatctaattataaaggttgtgttccattacaaccagtcgccttctttagcttgtgatctaagggaggacgaagtctgatggaaggtatcactttgtgtctggcaaagtcgtaggagaggctttattgttgaattgagacagtggaagatttcgtttccggttgatttggaaagaaaactgccgaaccttccgagtagaagtgtgaagcgtatggttgatcagtattgctgatttttgcatcacagtaattcatttctaatttgagagagaagagagaaattcctcacctgtttaagaatctgatgtgcatttggctttgaaaattttcctcctcttttgttcaaaacttcattccttccaatttctgacttggttagatgggtgcctcgaatccacctgattgctgataagaaacattgtttatcaacacgtgggatagtcagtggtaaataatcgaggctctaatgtggcggagccattgcctaatctcaaggatcacctgaagagtttgtatggattttatgtcccaggcctcaccccagtcctcccaaatcacaatcaggagaggggtgggtggagtggaagaacctatatgtccgacaagcattccaggtgaattttatcagggacttgtgaaaactttacatacattgtatcttcatacactaacatagatctgtcaggcactaatcttaaactcctggggaggtggaaaatgaggacagatggaggtggtaatcccatttgagattgcatggtttaagggggaaagaaaagattaatactggccgggcgtggtggctcacacgcctgtaatcctagcactttgggaggctgaggcaggtggatcacctgaagttaggagttcaagaccagcctggccaacattgcaaaaccccgtctctactaaaaatacaagaaattagcggggcatggtggcgggcgcctgtaatcccagctactcgggagcctgaggcaggagaatggcttgaacctgggaggcggaggttgcagtgagccgagatcgtgccattgcacttcatcttgagcaacagagtgagactccatgtaaaataaataaatactgtacgtgtattaggaagcaacaggaagtgtgttaaacatttaagatttatgtacacatcaccgtattggttttaggaaggggaagcaaaagaaaactaatgagcctctagtaaaaattgagtataaagaccatttgaaacagtgaaccagaaacacatgaaatgttgaagattagtatttaatgtctgaaaagcttgccatttgtatagaaagtttgaaaatgacattttcgtggttgcataaaaaatatacatgagaatgtaggcctgaaatagagcatttgcctctggtaataagttcttaaagttaatagtatcagtttaccttatatataacctttattagctatatgttgacttcttatggctttgaaattagcgtgcagaagaatgacccaatccgtgtcatttgatgtattaataataggcctgaagtgggaccaggaatttgcattttacaagcactctaggtggtgatactagggtctgaaaactactgcaggcccaaggcggcccaccagccaagaatggtttacatttttaaaggattgtaaaacaaaaatagtaatatgtgacagatttcagtagtccacaaagaccgaaatatcttctatctggccttttacacaaaaggggaaaaaaatcttatttgggctccttgtaaactttactgttaccaaggtttgaggcttgaaagtggaaacctgtttaatttgccagttatatgaaactatccaagggaagaaaatagttgaattgtaacacttaacattttatatttttaaaaaacttgccgtttgtatggaaagtttatattgagatgatagtctctctctttctctctctctctctctctatatatatgtgtgtgtatatgtgcatatatatgtatatatgtgtgtgtatatatgtgcatatatgtatatatgtgtgtgtatatatgtgtatatatgtgtgtatatatgtgtgtgtatatatatgtgtgtgtgtatatatatatataaatatatatatatatatatatataaatatatatatatatatatatatttttttttttttttttttagagacattgtcttgctctgtttcccaggctggagtgcagtggcacgatctcagctcactgcaacttccgcctcccgggttcaagcgattctcctgcctcagcctcccgagtagctgggattacaggcatgcaccaccatgatgcctagctaagttttgtgttttttgtagagacggggttttgctgtgttggccaggctggtctcgaactcctggtctcaagtgatctgcctgcctctgcctcccagtgttgggattacaggcttgagtcaccatgcctagcctcaaaatatctttaagtaagatacttgacatattagtcaatcgtatatattatattttgttttaactgaccatctattaactcacgatggggtcaagaaaataattttgttatgccagagtttatgtagaatccatcctcccgcccagtatcttttgtattttttagaggcgagttgttctgtcacctaggttgaagtgcagtggcactatcatagctcactgcagcctcaaactcctgggttcaagggatccccctgcgtcagcctgcctggtagcaaggactacaggtacacactaccatgcctcgggctctattttgttttaagtggaatgaatctaatcaattgtgtgtgcttagacacattttgtctccatttgaacattaggccatttctacttaatttgttcatacaaatcttgagtaacataaacattaacactgacctgtatatttaagttgtattgtctttaccgttgcactcttaaaaacaatgcacaggctgggcatagtggctcacgcctgtaatcccagcactttgggaggccgaggcgggtggatcacctgaggtcaggagttctagaccagcctggccaacatggtgaaaacccgtctctactaaaaatacaaaaattagccaggcacggtggcaggggcctgtaatcccagctactcggggggccgaggcaggagaatcccttgaacccaggaggcagaggttgcagtgagccgagattgcatcactgtactccagcctgggggacaagagcaagacttcatctgaaaaaaaaaaaaaaaaatgcacaaaggctgtgcggtggcacaggcctgcagtcccagcactttgggaggctgaggcaggaagatcacttgagtctaggagtttgagaccagcctgggcaatatagggagactcctgtctctacaaaaagtaaaaaaaattagtgggtatggtggtgctgcctctggtcccagccacgtgggaggctaagggaggaggattgcttgaggccggaaggtgaaggttgctgtgagctatgagggcgccactgtcctccagcctgagtgagagagtgcaaccctgtctcaaaaaaagacccaaaaaataaaaaaccaaaacatttatgagactgtattgtaactattaggtgaacacatatattggtgtaactttttcttcttaaaagttataggattgtattaaaaaaaaagtctgagctggccaggcacagtggctcatgcctgtaatcccagcactttgggaggctgaggtgggtggatcacctgaggtcaggagttcgagaccaccctggccaacgtggtgaaaccccctctctactaaaaacacaaaaattagccaggtgtggtggcaggcgcctgtaatctcagctacttgggaggctgaggaaggagaatcgcctgaacccgggaagcggaggttgcagtgagccgagatcacggcattacactccaacctgggcagcaggagcaaaactgtgtcttaaaaacggaaaaaaaaaaactgaactataactgtggctggtggcaacttaagtattcatgacatcctcccactttgagcacatttgattgcttccccaaatcactagttcctggcagaaggaccaaagcagcagagtcaaggcaggcctgctgtcgtgagttgtcatatgcctcaagggaccctctttcccatccccatccattttattgcggcgcttcactttgttttccaacttattcaggtaagtaatttatttccctgtcttatatacccatctgattgggaagaggtgaataacctaaacctgtgaataagatagcaaacatttgcaattagggacatttatcatgcttttgcttgtttcacactttaagaaatttaaggctgggtgcagtggctcactcctgtaatcctttgggagcactttgggaggccgaggcaggcagatcacctgaggtcaggagttcgagaccagcctggccaatatggcgaaaccctgtctctactaaaaatacaaaaaaaaaaaaaaaaaaaaaaatcagtcctggtggcaggcatctgtaatcccagctacttgggaggctgaggcaggggaatcacttgaactctagaggcgaaggttgcagtgagttgagatggtgccactgcactccagcctgggtgacagagcgaggacctccccccgcccaccaaaaaaaggaaatttaaaatgaaagctcattaaaaagagaaaatgtaccttatataatatgtaataaacatactacatctaaaagcatccttattccaatagaaaaccaaactcttaactgacctaaacaattaggggaatttattggtttatgaagttcaaaagtgtagaggtaggactggcttctagcgagacaagtccagtgtctcaaattgtcaccagacaccattttctccatggcttgtctctgtttcctaaatgttggctttattctctcagcatgctatctccttgtggttataagatggctgccagcagctcttggggctatatatttttaggtgcaaatctagcagaaaaaaaagttgtcttctccgttatcacaaacaaaatcttgaaattgaatttcactggaccagattggcctaacttgggacaggtgcccatccttgaatcccttgaagttgccaaggaatgggatgtgaaatttggcttaagccaatcgtgggcttggtgtgtctcatcaaatgaaatggctggaaattctagagtatggtttggaaaaggagaagagggcatggatgctgggagtaagtcgtagtgaaacatttgtattggaattctttatttggttacctagataggattaatctgtgggacaacaaaccattctaatttaagtacaagtattgttggaagagtgaggaatcaggttctagctccttgctattccaagtggttcatgaactagcagtttgggtatcatctaggacaggggtttggcaaacttagtttgtaaaaggtcagatagaaaatatggccgcatgtggtctttgtcgcatattctttctctttctttttaaacaactctttaaacgtgtgaaaaccattcttagttggagactcaaatccactctataggccgcagtttgacaacccctaatttaggcgcttgtttagatatgcaaaatctcagactcaccttgccccagacctactaaattacaatgtttttaatgagatttccaggtgatttgtatgtaaactaaagtttccccaaacctgtggtatgaatagatcttgactctggcggcacatgagaatcacctggggaggtcttacaactactaaggccttgggtccactcctagacattctcatttgttatgaggtagagccatggtgtaggacttttaagagctcaccaggcagttctaatgtatagccagaattgagaattactgctctagactaggaagcataactgcctctgccacatctagtgtggtagataaaacaccatggccacaatattttgtagttcttatccaaagctggagtcaacttccctattccttgcagctgggttggacttgcggcttagtttgatcggtagcatgtggtggaagtaatattgtgcaaggtccagagtcggcctcagaagaccttgcagcttttgcctttgcccacttggaacactccctctgtcatggtagaagcccccgctagactactgaacaccaaggactgggcggtgaaagagcaagcagacaacaaccagcactaaggctccaggtacgagtgaagccatctgagactctccagctctgattaagcagtcaagagtactggctggggctgggcgcggtggctcacgcctgtaatcccagcactttgggagaccaaggcgggtggatcacttgagctcaggagttcgagaccggcctgaccaatatgatgaaaccccatctctactaaaaatacaaaaattagccaggtgtgctggtgtgtgcctggagtcccagctactcaggaggctgagacaggagaattgcttgtacctgggaggtggagattgcagtgagccgagatcatgccactgcgctccagcctgggtgacactgtctcaaaaaaaaaaaaaagtaataaattatggttttaagccagtgcattttagagtggtttgttaagatgtagataccttaattttaaaatgctttattactaaaaaattctaataatcatctgagcctgcagtgagtcataatctttttgctggtggagggtcttgcctctgttgatggctgtggactgatcagagtggcggttactgaaggttggggtagcggtggcaatttcttaaaataagacaacatgaagttcgccacgttgattgactcctcctttcacaaaagatttctcagtagcatgtgatgctgtctgatagcattttatccacagtagaacttctttcagagtaggagtaaatcctctcaaaccgtgctgctgctttatcagctaggtttatgtaatctaaatcctttgttgtcatttcaacagtgtccacagtgtcttcaccaggagtagattccatctcaagaaaccacttcctttgctcatccataagaaacaacttctcatctgttcaagtttgatcatgagattgcagcaattcaatcacatcttcaggctccacttctaattctagttctcttgctctttcttttttttcgagatggagtttcactcctgtcacccagactgaagtgcaatggcacgatcttggctcactgcaacctctgcctccttagttcaagcgattctcctgcctcagcctcctgagtagctgggattacaggcacccaccaccatgcccagttaatttttttgaatttttaataaagatgaggtttcaccatgttggccaggctggtctcgaactcctgacctcaggtgatccgcccgcctcggcctcccagggtactgggattacaggcatgagccactgcacccagcctctagttctctttctatttctaccgcatctgcagttacttcctccactcaagtcttgagcccctcaaagtcatacttgagtgttgtaatcaacttcttctaaactgttaatgttggtattttgacctcctctcatgaatcatgagtgttcccgatgacatctagaatggtagatcctttccagaagcttttcagtttaccttgcccagatccatcagaaaaatcactctgtggctattgccttacaaaatatatttctttttctttctttctttctttctttttctttttcttttttttttttttttttttttttttttacaaaatgtatttcttaggggaataaaaaaagaaaatatatttcttaaataataagacttaaacgttgaaattcctgcttgatgtatgtggttgcagaatggacattgtgttagcaggcatgaaaacaatattcatcttcttgtacctgtgcatctgagctcttgggtgaccagatacattgtcgatgaacagtagtattttgaaaggaatctttttttctcagcatttggtcgcaacattgggcttaaaatatttggtaaaccgtttgggcacagtggattgcgcctataataccagcactgtgggaggccaacacgggcggatcgcctgagatcaggagttcaagaccaccctggccaacacggtgaaaccccatctctactaaaaacacaaaaattagccggacatgatggcaggcgcctgtgatcccagctgctcggagggttgaggcaggagaactgcttgaacctgggaggcggaggttgtagtgagctgagatagtgccactgtacttccagcctgggcgacagagtgagactccatctcaaaaagtaaaaataaacaaataaaaaatattccataaacgatgctgtaaacaggagtgctgtaatctaggctttgttgttcgatttgtagagcacgggcagagtagtttaccatcattcttaagggttctaggattctcagaatggtaaatgagcattggcttcaacttagtcaccaacagcattagtgcctaatgaagtcagcctgtcctttgaagctttgaagccaggcattgcctcctcacctgtagctatgaaagtcttagatggcatcttcttccaatagaaggctgttttgtctgctttgcaaatctgtttagtgtagccaccttcatcttaggatcttcttgataagttgctgcagtttctacatccacacttgctgcttcaagttgtacttgtgtgttatagagacagcttgtttccttaaacctcatgaaccaacctctgctagcttcagacttttttcctgcagcttcctcaattctttcagccttcatagaattgaaggagttagtcttgctctagattggctgtggcttaagggaatgttgtggctgatttgatcttctattcatgtaattttttccatgttggcaataaggctgttttgctttcttactctatttttttttttttttttttttttggagacagagtcttgctctgtcgcccaggctggagtgcagtggcacaatctcagctcactgcagcctccatctcccaggttcaagcgattctcctgcctcaacctccccagtggctgggattacagtcgcccgccaccacgcccaggtaattcttgtatttttagtagagatggagtttcacattgttggccaggctggtctcgaactcctgacctcagttgatcctctcgtcttggtctcccaaagttctaggattacagatgggagccaccacacccagcctactatttttctcttctcaggagtagcacttaaaatttccttcagtagttttgctgttgttgatacagagtctagttctgtcatccaggttggagtgcagcaatgcatttgtagctcactgcaaccttgacctcctgggctcaagtgatcttcctgcctcagcctcccaagtagctagtactataggcgcaagccaccacacttggctaatttttaaattttttatagagacaggatctcactatggtgcccaggttggtttcaaactcctgaactcaagtgatcttcctgccttagcttcccaaagtgctggggttacagctgtgagccaccatgtctggcaagaattgtttctttgtatttacaagttggctatttgtgccagaggcttagctcctggcctatctcagcttttgacatgccttcttcactaagcttaattatttctaattggctgggcactttgggaggccgaagcgggaggatcacgtgaggtttgagttcgagaccagcctggccaacatggcgaaaccccatctctgctaaaaatacaaaaatcagctcggtgtggtggcaggtgcttgtagtcccagctacttgggaggctgaggcaggagaatcgcttgcacccgagaggtggaggttgcagtgagtcgagatcgcgccactgcactgcagcctgggtgatagagcaaaactccatctcaaaaaaaaaaaaaaagattatttctaatgatttcaagccagagacatgtgactgttcctttcagcttgaacacttagcggtgattgtagggttattaattgaccagtgtcaatattgttgtgttccaaggaataggggggtccaaagagagggaaaggtgggcaatggctggttggtagagcagtcagaacctacacaacattattaagttcattgtctcatggttcatggcacccaaaacaatttcagtagtaacatcaaaggtcactgatcacaaatcaccataacagataagaaaaaattgaagtgttgtgagaattacggaaatgtgacacagagccaccaagtgagcgcatgctgttggaaaaatggtgccaaaagacatgctagatgtatggttgccacaaaccttcaatttgtgtaacaaacttgggatatctgtgaagtacaataaatcgaggtatgcctgtgtgtgatgtattcagtatgtgtacctactgataagttctgaacttaaccctggggccagcttgtgtaatgtactcttaatgtcctcagcttgatgcacacttctggtgagatcctcgaggtatatattttaggcaaaaaggtctggctttgcctcaagtccagattcccaacctagcgtgtttatgttccttttaaaacttgtgcttcaaaattttaagtgaattggtgacaggtagaagtagttttttattagaattgattgtgtagtattaagctgttggaaatacaaatcctttgtatttcttatcctttgtatttctcagtccagtacatgacaaatgctaggaaccaagattactgggttacaacttgccatctttaattaattaattaatttttttttttttgagacggagtcttgctctgtcactcaggagctctcacactggagtgcaatggcgtgatctcgcctcactgcaacctctgcctcctgggttctagagagtctcctgccttagcttcctgagtagctgggattacaggcatgtgccaccacgcctgtaatcaaaatacaggcgtgcgccaccacgcccagctaagttttgtatttttagcagagatggagtttcaccatgttggccaagctggtctcgaactcttgacctcaggtgatcctcccaccccagcctcccaaagtgctgggattacaggcgtgagctaccatgcccggctgtcaacttgtcatctttatggtaaatatattcctattactttatgatacacctttgttttggcccaaagtggcattacttgttttgattaattaattgcgactttacttactagacctatctccaggttactttgggatctttaaatcaaatccagttgcaaaaagttaacatctaccactttaaaaattataccaggaatacatttggcagtaaataaactgatggttgtttaaataagaaggggagttatttatcaaatataggatgatgggaggtaagtggctagtgtctttgctcagtggctcaaaaatgtcaaggttagtgtctgaatcccttggcctttctcttggcatttgagatgactgcctcgtctctaggcattatattcttatttaaggcagaaagaagggggtgtgcttgacatcagtgacgtgtccatttttatcaggtaagcaaaacctttccaaggggctcctgaaaaattcttatgtttcatttggctgtaatcctgtgtgatatggttaccactagctctaggggagcctggaaaagtgaagatatttcctattacagaaaaagcaggcaaggggaaagggttggaaatagatttgggattagctattcaacagggtttgctaaaggatattcgttataagactggtaacaggctctgaagggagttaagagccatttagagcaacagtaccattggttgcataagtttataactttccaaaatagatgaacttactcaaaccttttctgctttttctgtaatagatttctttgaaaggaatatcacttatttggaagtataaattctgaaattaaaatctcaagtcaaattataatcactttcctcactgtgatttctgagttgaattgagtggactcagtgttgaagagaaagggcattcttaggccaggcatggtggcacatgcctgtaatcccagcactttgggaggccgaggcgggtggatcatctgaggtcaggagttcgcgaccagcctgaataacgtggtaaaacctcgtctctactaaatacaaaaaaattagccaggtgtggcagtacatgcctgtaatccgagctacttgggaggctgagacaggagaatcgctcgtacctgggaagtggaggttgcagtgagctgagatcacgccattgcatgccagcctgggcaacaagagcgaaactccatctcaaaaaaaaaaaaaaaaaatgcattctaggcaagtaatagtagtagtagctatgctattattctgagtttcatttatttccaaaatgcctattaagatacctccacctggatgtcctatgagcattcttttaaatactttattgagatacagtttacatatagtaaaatgtataagtattaaatatacagccagtgcattctgattaatgtatacacctgtgtgactatcacctaaatcaagataaagatggccgtcatcccagcaagtttcctcttgctcctttcctgtcaagccccacccattccaggcaatcgctcatctaatatttatcactacaggttagtgtgtctgtcaacttcttagcaatggaagtcacagaatcacatatcatgtactcttttgtattttacttcttttgccaaaagtgtttttgagagttatccatgatgtatgattagttcttccccacccctcccccccaagcctttttttttttttttggccaagtgtaatattccattatatgaatataccacagaatttctcctgttaatggaaatttaagtttcagtttttagctagaggaatgaagctgccatgactgcaagcattttaaacagcaccccagctggaattgttcgtctcttatctcccagttgcctattttgaggcttccaattttccttatcttattgaatagtaccaccttactttgaatatagtaccaccttactttgagtatagtaccaccttgagtatagtaccaccttactttgagaatagtaccaccttactttcagtatagtactaccttactttgagtatagtaccaccttactttgagtatagtaccatcttactttgagttactcacaataaagcttaatcattttttgatcccttttttattctgacagataattattgaccttttattagggactagacttggtgatagagatataatgaatataaaactgtaatctaatgggggcgtgggcagtagtggagataagtattaaaaaaactgctttggaactctagaagtgcaaaggagagaagtacccagcctggggcagctagggaagacttcctggaggaggagatatattaactgaaatctgaagggcccaaaaaagttaaagggaagtatataccaaaatatgagtagcattgtcgtagttaagagagcaaaacagatcataggaactgcaagaaagtcagtataacaggtatagagaggatttgaggtggcagagggaggaagtggcaagagagaggaaggggtcggattgaagggatgtgtgctgagtttgatggggtgatgaaaagttattgtggggtttaaagcaagggaacattacatttgtgcttaatacaatgtgaaggatgcacttggagtggggcagtactggaagcaaggagatctgctaggaaatggtggcgtattccaggccagaagggatgagctaaggagttgcattagaattaggaagagatttttggccctctgagaggacatttgagaaactatagaatgtggaggaaaagcagtgtgaggccagaagaacatgcaacaggttaaagtgtttgaagttaaggaaagtgttgccatgatccaggtatgagataaaggactagactaggaattttaaaagtatttttgatagagttggcttttaattgaataagaataaaggaaagataactccaaaatgacttctagatttttttttttttgagacaaggtcttactctgtcacctatgctggagtgcagtggtgtgatcttggctcactgcaacctctgcctcccaggttcacgcgattcttctgcctcagcctcccgagtagctgggactctacaggtgtgcaccaccacacctggctaatttttgtatttttagtggagacgaggtttcaccatattggccaggctggtctcaaactcctgacctcgtgatccacctgcctcagcctcccaaagtgctgggattacaggcgtgagccactgtgcccggcccccagcctagatttttaacctcagtaactgagagaactgtggtcttattgaaagagtacgtcagaaaatggaggtgtttgtagaggagaatgagttaattctattttgaatatattggttttaaagtaatggggagcatatccaagtagcattattcagtatagagttggaaatactggagtagaaagttcaggttaggactaaaataaatttgaatcatttacatgcttagaagtcattcaggtcacaaaaattcaaccaaatagcttgttttaggggctgggatacaaagacaaaagacctacccgagctctgcttttgaggagctttgaggctagtagaagggataatatgttatgatattcctcactgaatattgttcgttatatatataatatctttgaacatactatcccttctagaagggatatcataatatcccttaataataataatatacattattatcccttataataataaggtatagccaggcgcagtggctcatgcctgtaatcctagcactttgggaggccaatgcgggtggatcacctgaggtcaggagttcgagaccagcctgaccaacatggtgaaaccccatatctactaaaaatacaaaaattagccaggtgtggtggtgggtgcctataatcccagctactagggatgctgaggcaggagaatcacttgcatctggggaggcagaggttgcagtgagccaagattatgtcattgtactccagcctgggtggcagaataagactctgtctcagaataattataagaagggataatatgttcagggtacaaacagaaagggatctttactttgtgacctgggaaagttacagttttacaaaagaaaaagaagactgtttcaagaatttatatgggttgagtttgaatggggtagaggaaaaggggaagataccgggagttaaagatgaatttgaagagtaggaagtgctgttacagaagctaggactaggaggcatgatcagtagtgttagatattttgaggaagtcaagctgtagactcaaacaacaaaatttttttttaactgttggggtaacagctcacaaataatttggtggatgtccccaaaacagtgaaataaaggggagaggtgagaggagtgttttaatttataatgggcaatacttagaaaagaaaataattattgaatttggagtggcttcaaggacaatacatttaaatatttgttccagaaattgaccaaactttaaacaaaaaaccagaagtcattctgactgaaactgacaactggtggggcaccatggctcatgcctgtagtcctagcaccttgggaagccatggcaggaggattgtgtgagcccaagtgtttgagactagcttgggcaacatggcagaaccccatctctacaaaaggtacaaaaattaacaatgtggtagcctacgcttgtagtcccagctacttgggaggctgaggcaggaggatcgcttgagcctgagacgtggaggctgcagtgagccatgatcgtaccactgagcgacagagggagggagtaatcgtactctagcctgggcgacggagggagaccctgtctcaaaaaaaaaaaaagaaacggacaatttatagagttctctagctttttaccaggtcttcagattctttctgtgtggagaatggatacaaattattttgttgactgatagaaagtaatagcccaaagtagtatcctctgaagttgctgtagtttgtgtgtcaccttttccagaaaggttgaattttgtggctttgaattctgtctgagagtaggagtcttggctgtttttggactgtagagtgagaataaattgagatggtgatgatgcaggccaagtggaggttcatagaagttgatatttgcaagacgctactgtgtttctcatctgttatttttgccccataggtttaacttctttattcaacaaaaatgcggattcagaaaagcacccaggaaggttgaacctcgaagatcagacccagggacaagtggtgaagcatacaagagaagtgctttgattcctcctgtggaagaaacagtcttttatccttctccctatcctataaggagtctcataaaacctttattttttactgttggggtaagagctcactttgctaggagttacctaccttgctagaaatgcagtgttaaagtactttgtcccatttgggctcccttaaagtaaggacaggtagaggggggatcaaaaagagctgggctcatgaattctaattatagagtctgaatttttttttttttttttgagacggagtctcactctgtcgcccaggttggagtgcagtggcgcgatctcggctcactgcaagctccacctcctgggttcacaccattctcctgcctcagcttcccaagtagctgggactgtaggcactggccaccacgcctggctaattttttgtatttttagtagagacggggtttcaccttgttagccaggatggtctcgatctcctgacctcatgatccgcccgccttggcctcccaaagttctgggattacaggagtgagccactgcgcccggcctagagtctgaacttaaaaattgcttttattattaaattctggcttacttatgtaagccctagagaataaacatatgggccttgtttggtacagcatttcaagcggtgctaagttggtattttcagttttatttgaggatttatagctggaaacaggccccagggtattgtgaagttaatacaatgggaaacaataaaatgtcctttttggccaggcacagtggctcatgcctgtaatcccagcactggaggccaaggtgggtggatcacctgaggtcaggagttcgagacccctctggccaacatgatgaaaccccgtctctactaaaaatacaaaaattagccgggcctggaggcaggtacctgtaatcctagctactccagaggctgagacaggagaatcacttgaacctggcaggcagaggttgcagtgagcccatatcgcaccattacagtctggcctgggagacaagagtgaaactccatctcaaaaagaaaaaaaaaagcccttttcacttattaggtttcactgtgccaagtattcccttctgttggtttgtaaaaagcaatgacagtgaagaattctccttggaaataatgtatagatctatttccctcttaaatctattttgtaatatatctaattttatatagtttacaggctgtgcatttggatcagctgctatttggcaatatgaatcactgaaatccagggtccagagttattttgatggtataaaagctgattggttggatagcataagaccacaaaaagaaggagacttcagaaaggaggtaaagataaacactgctttctttcttctagttaatcacggttttaaaaaactgatacttaatagatgcacgtgttttcagtgtacatgatgcattcacataatgtgtaataatgaaatctgaggaactgaatatctatcaccttaaacatttatctttatgctaggtatatttgaattgttctccactagctattttgaaatgtactatagattatagttgactgtagttactctactggtaatcccaggttttgaagcctggttatttatgaagtgcttttagttaatggcaacatcagattaatagatgtcaagtcagtgcacttaatattcttcacagtaagtattgattactgttttatatatctggtgttgtacttaacagtgttccagaattctgtccctctacccacatgcatcaaaaatcaccacggatagttgttaaaaatgttaacgttggccgggcacagcggctcaagtctataatcctagcactttgggaggccaaggcagtcaggagctggagaccagcctggccaacatagtgaaatcccatctctactgaaaatacaaaaattagccaggcgtggtggtgcatgcctgtggccccagctactcaggaagctgaggcaggagaatcgcctgaacccaagaggcagaggttgcagtgagacgagattgtgccactgcactccagcctgggtgacagagcgagaactcatctcaaaaaaaaaaaaaaagaaaagaaattaatgttaatagttgttaatgtttctgcgtggaggatgtctcagctctactaaagtttaaggatctcagtggatctcagctctactaaagtttaaaggccactgttttacttggatcaccttgatggattgctttagagcagcagtcaccaacctttttggtaccagggactggttttgtgcaagacaatttttccacaggtcggggttgcaggggggcagatggttatgggatgaaactgttccacctcagatcatcaggcattagattctcataaggagcgtgccacctagatccctcacatgtgcatctcacagtagggtttgcattcatgtgagaatcttatgcagccactgatctgacaggaggcagagctctggtggtaatgctctcccactgctcacctcctgctgtgtggcccagttcctaacaggccacggaccactagtggtcagcagccgggttgttggggaccctggctttagagtacgtatttgaactgcagggaatttttcaaaatatacatgccttagggatagagctagcaagtgatttttttttctaagagacagcgtcccactctgtcacctaggcctcagtgcagtaatgggatcatagctcactgaagcctcaaactcctgggtttgagcagtcctcccgcctcagtctcctgagtagctgggactacaggcgtgtgccaccatgctgggccaattatttcattttttgtggagacaggagtctcactttgttgcccaggctggtctcaaactcctgacctcaagtgatctcccaccttggcctcccaaagtgctggaatttcacaagtgtgagccactgtgcctggccccaagaggagttttaaacgtttctcagtgacatgatatttacacacctgtggtaaatacctgctgttgagtgtctctaaactgtgctcgagatgaaatacggaaaaaaaaaaaaaaaaaagaaatatggagcttttagagcttttcatttactttatatgcaagtcgatggccctctttcttaactgatttcttaaaaatgtttgcttttagataaaacatgtattttgtttctttttttttttcttttgagacagagtctcacttgttgcccaggctggagtgcagtggcgcgatctctgctcactgcaagctctgcctcccgggttcacgccattctccttcctcagcctccggagtagctgggactacaggtgcccgccaccacgcccggctaattttttgtatttttggtagagacggggtttcaccgtgttagccaggatggtctcgatctcctgacctcgtgatctgcccacctcggcctccaaaagtgctgggattacaggcatgagccaccgagcccagccaatattttatttcttttattcaccaatacatattgaacactgagattttagttaatatgtggtttcaggcccatttggttttcaagcacttctgtttttttaatgacacattgcccttccaatctggagagtaggttgatatcttctttacttttccccttccttggaacagtgtgatcctggccagcaagagcctgagaaggaagccttgcattttctttttgctaatgatgttttgagttttctctaagtagggaaagggattcattcctccttgttttcccatgggcacattcaagaagcatgagccctatctgtgttagagaggctttatgccagaacagtggataatatttgcaggtgaaaatgacaataactagccatcggcatctgttcagtcaatgtatttgagaagatagtaaaactgacctattccattatcctggatctcttacaaagctataggtttccagcacatgtctgcacatgaagttttgatatccaaatgtacccaaatggttcttgagaatggtgaaaaatgatacaaacagtatacataatcttcatttaaagattgatttgtttataatataattaaatgataagttgaatgtataaaacctatgcccattaaagaagtttgaaacaatgtgtaaatttaacatggaaacatgaaagtcctgggaacccctttcgtgccactatacacgaagttctgggagttcatacacagtgcaattataattatagaaatggaatcggccggggcggctcatatctgtaatcccagcaccttgggagactgaggtgggaggattgcttcagcccaggagttcaagaccagccttggcaacacagggggaccctgtctcttaaaaagaaaaaaaaagaaaataaatggaactatacatactaatctgtagtttcttttaccttggattttttcttttaataacaaaatctggttcaatttcttagttggaatatattttttattttaaaactttaatcatggaaaatttcaagcagatacaaatgtagagagaatagtatgatgaatcattatcgtccagcttcagtgttccccaagacagggccaatttttttttcatctatttccctttttttcccttccctttccacccttgtattattgtaaagcaaattctagacgtatttcatgcataaaattttcaacatgtatccctgaaaaattaggaccctcctctttttattaaactccagtaccattactatatctttaaaaaagtgcaatttagtagacaatattctcagaattttaaaacataagaccttggtatgaataatcacttccttggtacctgtctgtatctgtgagtgtgctaggggctttacattattgttattccttgtgataacactgctgggtacctattattgtcccatttcatgtgtcaagaaactgaagtttagaaataattgtctgaggttccagagctatccagtggttggttctgtgtggagaatgtgggctgcctgactataaaacatgtgccttttccactctaccacgtatttattatgtctgtgaccaccagtgatttttgcagaagaggaattcctcttatgtgcgaggcattttcttctggtttttcatttttgtagcctgaaatttctcacatgtggtgatgcaattttctgtctgttttagattaacaagtggtggaataacctaagtgatggccagcggactgtgacaggtttgtgttagcttacacgttttaaccattcaagggaagagaaatcaaaccaaaaggtacagtatgtcacaagcaatggctcttgtaccatgctcaccagtggtttagaagacagtctctgtactgataggctaatgtaatagtatataaagtggtgaggtataaaggtttacatgatgctctgggtccgttactttctaattttgatttagtatgatactgattgatcagttttgttgtagaattccagcttgtggaatagcttattaattattacttcccttattaaagaaactaatggaaacattaagtaccttctatattcaggatgctgtaatacacattctgtccctacttggagttgcttacagagtagttgtctccctttttacagataaggaaaccggctttcagagaaggaacttttgaaagtcaaactgctagtaagcaatagagcagagtttcaaaacccaagtctgtccattcgaaaaccagttttcgctcttctcccccatgctatttataaaaccccatttaaatgtaagcatgacatgcatgtcaccatgataactttttttctttgtaaattgttatggaaagacagatttggctcttcaagttaacacctctgcaatatttcatggagtcagttatttgagaaacttgaaaatagatttttgccaggaagagtggctcatgcctgtaatcccagaactttgggaggccaaggtgggcggattccttgagctcaggagttcgaggccagctcaggcaacatgacaaaaccccatctctaccaaagatacaaaaaattagccaggtgtggtggtgcgtgcctggggtcccagctacttgggaggctgaagcaggagaattttgaacctgggaggcagaggttgcagtgagctgtggtcctactattacactccaacctgggtgacagatgagactctcaaaaacaaaaaaattttttttaagttttttaacgattgcatagaaaagaaaaaattatttctagagaattgcaaaatattgcttttgctcaaatttgattagacttaaagtctaattgattagacttaaataagcatttaagacttattttgtactcttaattttctgtacttaagtggagaaagggtgtttatctttcttcattcaaactgtttattctctctggaaggcttaatttttctgactttattggaacccgatgcagctttcaggcttatggttcagacattgcttcctttaggaagtgctttctttttttctgaactcattgcagtttttatcattgataatgcagtgtgccttatgtaattgtatgtgtaacatccttgagggcagtataagcatctggaggacaacaatgacatctttcattttgtgacagcacctagcatatatcatgtacacagtaagggcactcagttaaaatctgttgagtgaatgaatgttgaatggaatcttaaccaagggattgagatttttcagtgttgccataactaagaccatagaattgataggtcagtgacatcttaaaatgattacttcaaagatagctctttagtagcacatctgtttccactagattaatgtattttgtttgcttgcttcttttatgaaagtaatgaggctgggtgcagtggcttacgcctgtaatcccagcactttgggaggccgaggcgggcagatcacctgaggtcaggagtcagagaccagcctggccaacacggtgaaaccccatctctactaaaaatacaaaaaattagcttaggcgtggtggtgcacgcctgttaatcccagctactagggaggctgaagcagaattgcttgaacctggaaggctgaggttgcagtgagctaagattgcgccactgcactccagcctggacgacagagcgagactctgtctcaaaaaaaaaaaaaaaaaaagtaacgaaattaagatttctttagggtggcaaggttttgccttcactattttcaaagcatttcactattagtttatacctcacattctttgaaggtggtcatgattttatgccatttaacatatgaagaagcctagcatcagagtttaaaaccttttctcatgctggtgaatactttcttcaaagaagctagaggtaattaaaaatcagaattctttccccctagtctttttcttttttgaaatcaaatcagccatttggcatgaagagcgtagcagtagagagagatgcttgtgatctgtcttgcaacttgaatgtaagctgctttgaacaacataaatgtgaatggtcatgctgcaggtcttaaatctttattgttagattatccaagtgactttaacctcaggaaatgccatttgaactgtcttgtgtcacctcagacttttcttgtaggaaataattattctagtaatagtgattctagctttacaatgtctgtaagtggtgcttaatcaattacctatatatgagagtctcaagaataaactgtttatttagtatgtcttgtcttcttcctggggtgccaattagtccagctttccttgctgagcactcctgattgcttcttgtagactgcaaagtgaagttggctcagcttctggttttaatcagtgatagatttatggggtgacaggtctactccgtcccactttctttctttggattggagatgttttccgaatgggtttttttttttttcgttttatattttgaaagaacttgacaagtttgacctagagagtttttaaagctttgtgagaccagtgtgcctctctgctttgtagtattcatacctagacaatggcagcatgaaagctctagtcggttaaagatttctcactgctacaccaaacacttcatgtaagtattccttgccattgaatctgttgagctcttgaatttggatggaaagattttggatacggtaagttcagacagtaaagtgttaatccaaatatacatagtttctgagtttcagagaatgaggggtatctcaaatttatccatgtctctttggttcctaggtataggtaagaacagtcagattgtaaggcatacccataatttattttattgttaaggtggcatctggtggtgaggtaaaaaacccctttctagctgggtgcagtggctcatgcctgtaatcccagcactttgggagcacttttgggaggtggatcacctgaggtcaggagttggagaccagcctggccaacatggtgaaaccccatctctactaaaaatacaaaattagctggacgtggtggtgcatgcctataatcccagctacttgggaggctgaggcaggagaatcgcttgaacttgggaggcagaggttgcagtgagccgagatcatgccattgccctccagcctgggcagtagagtgagactctgtctcaaaacaacaacaaaaacctccccttcttacagctgatgccaggtttggagtctgtagttttgtttttgtttttgttttgagatggagtcttgctctgtcacccaggctggagtgcagtggcgtgatctctgctcacgggcaagctctgcctcctgggttcacgccattctccttcctcagcctataagtgcccggctaatttttttgtatttttagtagagacggggtttcaccgcgttagccaggatggtctagatcttctgacctcgtgatccaccgcctcggcctcccaaagtgctgggattacaggcgtgagccaccgcgcccggcgagtctgtagtttttgactgttctgtctcaatctgtctgtgcaaatccctttttaaagctatgctaggaaacttgttttaatcctttttttttggtttgtttggggattttttttttggtcttaatttttattacacagaaataatctccccaggcttcatattgctctgaaaaagtgtttataagcccactaggtatttgtggggcaagcggggagtataacgtggcattcttcaaacttaaatttgtcatccctggtgcttttatatttcacctaattttctgttctattgccctgatctgtcagccttttaagcctctcctagaggtccccaggcaacccccagagagaatattttctcctccctttctagctttcagggttgtctttgaggcacttgccaggttttcctgttagttcaagagaatgctgactttactgtattgagattcaggtaaagccacaggaaaaaatcagctaaattattatttttgatcaagaaggagcaaggacagaaaaggatagggagagagatcgcaagaaaactgtgccgtagttcctctactagtgtattttttgtcagctccaaagcttagtcactactactctccagtctttgaccccttgccccaacttctaaagtctattcttttttctttgctgttctgtttctgccaggcttattctttttcatttcagttctctctctccttgtaccttttcaaggttttgagctgtcttcccagactaaggcctccttacctattcctgatgttgctggtaaggcaatgttttccttggtcttatagcccatctttaccttttaatcagaatcagtcactgtttttctgtaactcctgacttcccagtctgcaaacaagttatttttgtagaagaatagcaaagttaatccttgagtgccaaccacacttcaagtatcatgctatgtgctttacatgcatttctattattattagtcatcataagaaccctgttatcctcatttctcagatggggcaaggaacggccaagtaactgcgatcacacagctagaactgggtggattcgggaatcaaatccacttcatgtatcaaagaatagggtttttattatgtccttttcacttttctagaatagcaaaccaccattaattacctttctgataaaccacactgcctccccctatcaagtatctgggtgctgattcacagcacaaattgcagcaaattgttccaaagtagcagcctacccccagggaggaaagggagccctttttgactgcctagactagattttgtcattgtaaaatgaataaatatgcatggtagcagatgaaaattggaatagaggatacataaagtgaaaaataagtctttctctcactctgaacttccagttctgcacttttcctttcccataataaccattgcatgtttagttacttgtgtgttcttccaaagcatctatttatatataggcatttatatctatctgtggtttaacacaaaaatagaaacatgcagtacatactcttctgcaccatgattttttttcacttaatattttaaagaacattctatatcaatacaagtaggtttgttacattctttttaatattttattgaggtataatatacatagaagaatgtgaatatgtcagatgtacaactcaactaattaattttcacaggctgagcacatccatgtaaccagcacctggattgataaatggaaattaccagcacatcaggcttttttgtttgttttggtttgttttgagacagcgtctcacttgtcactcaggctggagtgcagtggcatgatcacggctcactgcagcctcaacctcccaaggctggtcttgagctcctgggctcaagtgatcctcctgccttggcctcccaaattgctgggattacaggtgtgaaccactgtgcctggccagcatattctttttaatggcattatggtattccatgtaaatgagtattatttaacaaatcttttattaatagatatttaggttgttttcagtcttctgcttttatgaatattactacagtgaaatgccttatatatagatctctgtaccttgtacaagtatatttttaggataagttactggaaatagaattgctgggtcaaagaatatacatttaaaattttgtgtattgcaaagttgtcttaaaagaagttgtgtaccattttaaatgtcctccaacaatgtacagagtataaatacatcagattgatttctaaaagttccccacaggggaggttagatattctcatctgcagggagagtacagagaaataacaatccttttttgtggttagcaattacaagggcctttgcctccctcattgtgaatttgccctttctgtttacccgtattagtttcaaactttctgtctctatcccagtgggaggatggaagatggacagtctctctgggtttcttcttgattccaggtagctgtggacccagtccttaattagtttggtggatactgcctaggaaaagaaatgatagccactgtgtgaggccaacaggttgatctttgcacctgcctggttcccagagaacctgaggtaaggatggcttgagcctagttctttggctgctgtggatgtacttgcttgtcagtgtctggactggccaggtctgggttggtatagtagccccttcagataaaggagctttggaggggtgaattggcccacccagaaacagaggggatctgtgaatagctattagaccccaagtggtatggtaagtcctttataggaaaatgagaaaaagggttttactacctttcttgggctgaggaggaagataacctgaggtcattgaaccaagtagtgctttccaaatcagtgcatctgcctttttaaaaattaagatataattcacatataaaattcaccatttaaagcaggggttcccagccctgggcagggactggtaccagaaccgggctgcagagcaggaggtgagcggcaggggaacaagtgaaactttgtttgtggggttttttttgtttttttttttgtttgtttatttttttgagacagagtcttgctctgtcacccaggctagaatgtagtggtgtgatcttggctcactgcaatctctcccggattcaggtgattctcctgccttagcctcccaagtagctgggattacaggcacctgtcatcacgcctgggtaacttttgtatttttagtagagacagggttttgccatgttggccaggctgggatctaggttgtgtactccttatgagaatctaatgcctgatgatctgttactgtctcccatcatacccagacaggactgtctggttgcagggaaacaagctcagggttcccactgattctacattatgataagttgataagttgtgtaattacttcattatatattatgatataatagaaataaagtgcagaataaatgtaatgcacttgaatcattctgaaaccatccccccacccctggtctatggaaaaattgtctaacacaaaaccggtccttggtgccaaaaaggttggagaccactgatttaaaatgtgcagttggctgagtgtggtggcccacacttgtaatcctaccacttgggaggcctggcacttaggaggccgaggtcagaggattgcttgagtctagaccagcctgggcagcatagtgagacctcccacatctctctaaaaataataataaataaaaatagaaagccaaagtaaattcagtggtttttattatatttaaaaggctgtgcaactattaacgtcatctaatcccagggccttttcattatcccagaaagaaaccccattcccgttagcagtcactcccccattccctccttccctccttcccctcagccttaggcagccatcaacctgctttctctagggactttcctcttctggagatttcatatacatcaagtcacataatatgtggccttttgtgtctgtttctttcacttagcataatgtttttaaggttcactcgtgttgcagtatatatcatcagtacttctgtttctttttatggccaaatgatattccagtgtatggatatattacatttgtttattccttcatcagttgatgggcatttgagttgtttccattcttcagctattaataatggtgctatgaacctccatgtgcacatttttgtgtggacatatgttttcatttctcggtatatatagccaggaatggaattgctgggtcatatggtaactgttttttttttttttaattgtaaaaaaaaaaaacatgaaatataccatcttaatcatttttaagcatatagttcagtagagttcagtatattcacatttttgtaaaaccaatctctagaactttttcattttgcagatctgaaactctactcattaaacaatacgtcccctttttctcctcccttcatcccttgataaccaccattctacttcctttttctatgcatttggctactttagatacctcatacaagtagaatcataaaatacttggtgttttggactggcttatttcataatgtccacaaggtttatccatgttggagcacgtgacagtatttacttccttttttaaggctaaataatattttattttgtgtgtatatcacattttgtttatccattcacctattgatggacatttgagttatttctacctcttgttattgtgaataatgctgctatgaaaatgggtgtgcaaatatctctttgagaccgaccatgcattcgattctattttttgagatggaatctcactctgtcgcgtgggctggagtgcagtggcgtgatctcagctcactgcaagctctacctcccaggttcaggcaattctgtctcagcctaccgagtggctgggactacaggtgtacaccaccatgcccggctaatttttgtatttttttttttggtagagacagggtttcaccatattggtcaggctggtctcaaactcctgacctcaggtgatccacttgcctcggcctcccaaagtgctgggattacaggcatgagccaccacacctggccaattcttttggatgtatatccagttacaggattggtggatcacatggttattgtatttttaattttttgaggaattctcacgctgttttccatggcggttgtaccattttacattctcgccaacagcgctcaagtcttccaatttctcacattcttgccaacatttgttattttctctttgtgtgagtgtgtaggtgtttgacagtagccatcttgatgagtgtgagataatacctcactgtggttttgatttgctttttctggtgattagtgatgttgagcatcttttcacgtgctcgttggccatttgttttatcatctctggaaaaatgtatttcaagtactcgagttatttgatttttttttgttgttgagttataagcattctttttcgtttgtttttttgagacagagtcttgctctttcgcccagaccagagtgcagtggagcgatctcggctcactgcaatctccatctcctgggttcaagcactcttcccacctcagctgggattacaggcgtgtgccaccacgcctggctaatttttgtactttttagtagagatggggtttcgccatgttggccaggctggtctcgaaaccctgacttcaaatgatccacctacctcagcctcccaaagtgctgggtttacaggcatgagccacttgcacccgcctgagttataagcattctttatttgttcttgatatcacccccttttcagatacattatttgcaaatacttccattctgtgatttatttctgcttttttactcttttgattgtatcttttgatacacaaaagtttttaagtttgatatagtcccagttgtctattttttcttttgttgcctgtgcctttggtgtcatagccaagaaatcattaccaagtccagtgtcatgaggcttctcttctgttttcttctaggagttttatagttgagggtctaacatttaggtctttaatccattttgagttaatttttgtatattggtataagataaagatctagctgctgtcttttgcatgtgggtatccagttttccctttgttttctttttgaagaactatcaaattgttttccataggtagctacaccattttccactccttcaagtagtgtgaggattccatctgttattgcctgtcttttctatcagcaactacaattttttttgtattttttaattgtaaaatatatataacataaaatttgccattatagacattttttagtgcacactttagttgctttaagtacattcacagtgttgtaggttgggcatggtggctcatgcctgtaatcccagcactttgggaggcggaggtgggaggattggctgaggccaggagtttcagacagtgttgtataaccgtcactactatctatttccaggactttttcattatcccaaacagaaacactgaacctgttaaacaatagctccctattaccccctcccctcagccactagtaaccgcattctactttctgtctctgtgagtttgtctattctagatccttcatataagtggaaccataatttttttttctttttggtccagcttcttttgcatagcatagcgttttaatggttcgtcgatattgtagcatgatgaaaatttcctttgtaaagctcaaatattccattctatgtatttaccacattttggttatccattcttctgttgatggacatttgggttgtctccatctcttggttattgtgactaatgctgtgatgtacaaaggttctgacatccccacatccttggcaatactgtttttaatttttttgagacagagtctcgctctgtcactcaggctggagtgcagttgtatgaacatggctcactacaacctcaacctggtctcaaacaaccctccttccacagcctcttgagtagctgggaccataggcacgcgccaccacacctggctaattttttaattttctgtagagatgaggtcttgccaagttgcccaggctgctttcgaactcctgggctcaaataatcctcttgccccggcctcccaaagtgctgggattacaggtgtgagccaccatgcctggcctattttccttttttttaaatgtgataatagccatcgtaatgggtatagttttgatttccattttgctagtgactagtaatggtgagcatcttttcatgtgcttattgagtatttgtgtttcttctctggagaactgtctatttacttcctttcccatttttacattgggttgttgagtttttttttatatattctggatattaatcccttattggatatgatttgcacattttctcccattttgttgcctttattatatccatcctggtgagtgtgaaggggtgtatcactgtggttttgatttgcctttccttaatgactaatgaacatcttttcatgtcttattgtatatttattcttcttcggagaaatgcctgtttctccaaatctttttcccatttaaaaatagctatttatctttttattgagttgtaaaagttatttatatattctggatactagacccttattaagagatatgattcacaaatatttttcccattctgtgagttgtctgatcactttcttcacagtgttttctgaagcataaacattctaattttgctgaagttcattttatctatttttttcttttgttgcttgtacttttaagtgtcatgtcaaggaaaccgtgacctaattcaaagtcacaaagatgtgtacctatgttttcttctaagagctttaaaattttagctcttaaatttaggcatttgattaattcggagttaatgtttgtatttgagatttgagataggggtccaaactcattctgtgcttatggctatccacttgtctgagcaccattttttgacaagactattctttcccctagtgaattgttttggaaccttagtcaaaaatcaggtgaccgtaatcgtatgggtgtatttctggactgtcaattctgtccattgatctatatatctgaccttattctaatactacattgtctttattcctgtaggtttgtgttgtaaattctgaaactatgaattgtgagtcttccaactgttaatatgaaatattacattgatttttcatatgttgaaccaagctggcattcctgtgacaaattccacttggtcatgatttataatcctttttatatatggctggatttggtttgccaatattttcttgaggatttttgcatctcttttcataaaggaatattgatagttttttgtgatgtctttggttttgatacggaggtgatagtggctacatagaatgttccttcctcttctattttttgaaagagtttgagaaggattggtgttaattctcttttatatttggtagaatttcccagttgtagtaagttgaatagtgtgcttccccaaaatttgtgtccacgtagaaccacagaatgttactttacttgaaatagggtctttgcagatttgattagttacagagagatcatattacattaggatgtaccttaaatccattgactcatgtccttataagaagaagagaggacaaagaaaaatacagaaaacaagaccaaagagatggtggcagagattggagtgatgcacctgtaagccaaacaatgccaagaattgtcgagagccaccagaagctaggaagaggggaggaaggacacttccctagacccttcaaaaggaagcatggccctgctgacactttacaccttgatttcagacttctagcttccagaactggaagagaatagatttttgttttaagccaccaagtttgtgttacaacagctgtaggaaactcaaatactagtgaagccaatgagaaacataggcacctaacacctaatctggctctggggttttctttgtggtaagttttttgaattactaattcagtctctttacttactcttggtctgttcagattttctatttcttcgagtcaattttagtagtttgtatctttctaggaattttaaatttcatctaagttattctcatttgttggtatataattgttcattgtattttgtagtaattctgatttctataaggttcgtagtaacattctgctttcattcctgattttagtaatttgtttttatttttatttttcttttttagcaaatctcagacctgtatgagatgacttttgtaatttgagtctttttttctttgtcactgtagctaaaagtttgtcaattttattgatcatttcaaacaaatccaacttttggatttattaatttttctgttatttttctattcatttacgtatgttcttcattctttccttctgcttcctttggttttagtttgctcctctctacactttcttaaggtgaaaagttagattattgaattgagatctctttttttaatgtgggcattcatagcaccacttttgttgcctcctataaattttggtatattgtatttttgttttcattcatctgagtttcctagttgccctcgtgatttcttctttgaaccgttggttatttaggagtttgttaatttccatatactggtgaattttctgaatttatttctgtattgatttgtaatttcattccaagtgatcagaggacatagtttgtataattttagtgttttagtttaagtttattgagagttgttttgtgactgaacatatcctggaatgtgctgcatgtgcacttgagaagaatgtatattctgtttttgttgggtggtgtgttctatagatgtctgttaggtctagtcgttttatagagctgctgaagtcttttgcttccttgctgatcatttaattattctctccattattataaatagagttctgaagtctccagctattattgttatttattcctttagttctgtccatttttcttcatttttgagattcttttgttaggtacatatgtttctaattgctatttcttgatggattgaccttttcatcattatataatatcctcctttttctctagcaatgaattttgtcttaaggtctattttgtcttactatgcatgtggccttgtagagtccaggaatatgttagaggttttcagagtttctatggaaatcttattcccctgcttttcctcaagatttttgattagtctcttatttgcccccaagtgttatccatcatctcaggcagcctcaaacttaaaacacttacctgtcattgtttttgacaaatgccctctgtgaaaagttttatacttggggagctcccagtcaggttaaacagacagccctgaaagtgggttttgcatggaatcaacagccaggtcaaataatgacaattctttgggaatgaggctttgaaagagctccagctccattctaccagctacctcggttttcaagactaccttgtaactagagagtgggggattggactaggccaagttaaaatgctgcaaagctttgggaggccgacgcgggcagatcacgaggtcaggagattgagaccatcctggctgacatggtgaaacccggtctctactaagaatacaaaaaattagctgggcgtggtagcgggtgcctgtagtcccagctactcgggaggctgaggcaggagaatggtgtgaacccgggaggcggagctttcagtgagcggagattgcgccactgcactccagcctgggagacagcgagactccgtctcaaaaaagaaaaaaatgaataaacaaacaaaaaacgctgcaaagctaggtgttttgagattcagctgtttttcttaagtaaatacaccctggtttgctataagcctttgattagtttccagagttctgaaaaggttgattctgacattttttgccagttctttcattgctcttatgaaggagagttttcagagctccttactttgttatttttcactgacatagtccagtgcgttacacaggtgtgagggtaggcactaggacagcagtgccttcctgaatcagtagtgccaagcttgtccaagagttaccgagtcaggaagaagcaggtgacatccctcctaagtggagatatacaaaacttaagctcttctatttctcaaaggaaaaggagagaggaggaaaccattattctttgttcatttgcatgctaggtgcatgtactatcttatttaagcctcactacaacctttatgaggtaggaggtattgtcctcattttacaaatgagggaataaagtgccacaggccacaaaactgctaagtgacatacttaggattcagacttgaaaaggccattctcttttcaccatgttttccatttgctggttcactgtgtgactgctacatttcatcatgttttctcatttcatcgtcactcagcccttttttttctttttatttatttatttatttattttgagacagggtctccctctgtcgcccagactggagtacagtggtgcaattttggctcactgcagacttgacctcctgggctcaagcaatcctcccaccttagcctcccaaatagctaggacccaagcatgtgccaccatgcccagctgattttgttcatttttttgtaaagaggaggtctcactatgttgcccagggtggtctcaaatttctaggctcaagggatggatcctcctgcctggacctcccaaagtgctaggattataggcgtgagccaccacacccggcccgttcaaccctttcaggtagattttattattctcattttacagaagaggaaacaagctgagcggttaggcctcttccccaggttataatgtaagtaggacagagtcacttctgctggactccttcacccatacttttagccaaaatgcagtactgcctcagtaggcctaggattgccacacatcctctcatgctcatccgcttctggggaccagcatatgctgtttcccagcaaggaagccgtttttatgtggtgtctgaagtcctagagtgaccaaggtcaaaataaatcctcctggctacccatgtcttgatgtatagtagaaagagcactagattaggaattctggcttggccactgaatttggccctctgacaacttgtaccttttagagcctgtttttctcatctataactggccttcagaatagggtttacaaagaagaaagtatgtgcatttcacttttcttatttcttttaaatttgttaagtgtgtcttatgaatttatagtggttcacgtacataatttgttaataagtatacatatatgggatgtgtctgttactaatggatggtgtttactaatggggtgccccatgaaagcagtttgatgaccactggcttatgaagtaagggattttggctacagtctgtttcagtgccagtactcattatttatcagaaaagcttcttgcgtttggattgaaaacttagcagtgttaactctttgtctactgttaacctcaatgtctttggttatctttccccccgctttttttttttttgagacagtttccctcttgttgcccaggctggagtgcaatggcgtgatctcggctcacctcaacctccgcctcctgggttcaagtgattctcctgcctcagcctcctgagtaaccgggactacaggcatgcaccaccacgcccagctaattttgtatttttagtagagacgaggtttcttcatgttggtcaggctggtctcgaactcccgacctcaggtgatccgtccgcctcagcctcccaaagtactgctgggattacagacgtgagccaccgcacccggcctttatctttcattttttttcatgtattttcctttattttaatcactttatccagaaacatatcctcgtcttgacagtgctgtggtgcctgtggtttccagaagctgggtgtgctgtgtgtctgtggtttgaggaagttgcccatggaactgacagaggaagcagagtagtcgttgccatttttcagcctagtaggcaggatcagggaccccatcttgctctctttgccttgaaccacaattagaataaaacaccaaagccctgactgatcatgatcatagcaatccgatctttatgatcatggccagaccattctcaggtcgtctttaccctaagatatcaatcactgggtatgacaacctagacctaagggtgcactctgggtagtaaagatgattaactctcccaaaggaatctaaggaatccagagcaacacgaatcactgctctcttcctatagggtaaacctcccaagactccagtccctgtgaggaggctctgcccgcctgcccttcccagggttccaggctccacattgggaggtgtacacagtgctcttcgctcttcattgccttgtgtatgatcccttttcccatctttgcataaatgctgtccctctcaccatctttaaaagagttctgggtaattatttaccaaaggtggtataatgctgtcacagtccctgctagtgagacatctgatacaactgatggaatcagttcaacaaaatgcagtaaaattttatttaatgtactacggagaaagaaaaaatgctaccagttataagatgcatcctgatttcagatattaaaatggaaaaaatgtcttaagatctgtgaaaaatgtagcttcctttcccacctctcaagtgggagagcaaaaactggacagactagaaatgccaggggctagctgagaaccttacagaatgagcaactgcggaagccacaggtaacaccgagatgtagatcagctgccagggacaagacaaagaatgttttctaaagtaaatcctcttaccagtatgttattgaaatcagtccttattggcatcgaagaaggtgaaagtgctacttgcctgttgcctacagagactggaggaatgacaaatgtttattttaattcaacaagtagaggaatacctgctatgtgaaggagttgtggcaattcataaaattaatatattttttgaagtttgtagttttcaataataatttcttatctaaaatgtaacaagttaattatattatcgaataaacctcaatttcgtagtactaacaacatcaacacttacagaaaaaggaaagtcactcaactcccacatgtaaacagactttagaagcagttgcagaggttttctaaattatccctgaattcctatcacatgactatttttctcagacatgttgaccttcacctacacagatgactcacatatgtttccataagctggcagtaagtttaagaagcataccatgccctgaggaaaaagaagtaatgttagctcttctactcttggccaaagaacctaattctgtatattacttctgtctttggtttggctattatagacaataaattattgatctgattataattgagaaaagtaagctcttctaaagaagtaaaatatggatctagggaaaggaagttagctcccagagcatttacaatttcccaggaattctgtgactttaccaaccctaggcagtgctgatactttaaaagcattcatttcacttgcttttttttggctcaccccctatcccccaggtatacagtactcttacataattgtggaagaatcttacaagggggtaatgtagatcagactttcctgctttcatttttaacctccctaaattataaatatttattttgtaggtattatagctgcaaatgtccttgtattctgtttatggagagtaccttctctgcagcggacaatgatcagatatttcacatcgaatccagcctcaagtaagtctaacttgtgtgaatttattttaaggtagaaataatatgaaagaaatatgctttagttaatggaagtgctgtaaaaaagacgaattacctatcaatagctacaagcaaaatgcagaggataggctgtaagctccttcactgaggacagggacctcacctctctttttctttttctttgttttttttgagacggagtcttcctctgttgcccaggctggagtgcagtggtgcagtcttagctcactacaacctccacctcccaggttcaagtgattctcctgcctcagcctccctagtagctaggattacaggtgcccgccaccacacccagctagtttttgtatttttaatagagacagggtttcaccgtgttggataggctgttcttgaacacctgacctcaggtgatctgcctggctcggctggagtgcagtggcgtgatctcagctcactgcaagctccgcctcccgggttcatgccattctcctgcctcagcctcctgagtagctgggactacaggtgcccgccaccacgccccgctaatttttttgtatttttagtagagacggggtttcaacatgttagccaggatggtctcgatctcctgacctcgtgatccgcccgcctcagcctcccaaagtgctgggattataggcgtgagccactgcgcccggccaatttactttttattttattttattttattttttgagacagggtcttgctctgttgcccaggctagagtgcagtgatacgatcttggctcactgcaacctctgcttctcaggctcaactgatcctcccacctcagcccccaggagctgggactacaggtgcatgccaccatgcccagctaattttttttgtttttagtgcagatgaggtcttgccatgttgcccagactgcttatttttttctaatcaacttttgccataaggacaagttgctttcattgaactgagagtttttattggttgcttactaagtagaaaagagatttattaagacagctttttgtcacttttaaaaatgatgtcttaagctgggcatagtgactcacatctataatcccagcacttggggaggctgaggcaggtgaactgcttgagctcaggagttcgagaccagcctgggaaacatggtgaaaccccatctctactaaaaatacaaaaattagttgggcatggggtatgtacctgtggtcccagctactcaggaggctgaggtgggaggatcacttgagcccttgagcctcaacttgaggaagttgaggctgcagtgagccaagatcgtgccactgcactccagcctggggcgacagagcaagactctctccaaaaaaaaaaaaaagtcttaaaaatagctgtttttgttttccatgtttgtttcataaattttttttttttttttttttttgagatagagtctcgctctatggcccaggctggagtgcagtggctcaatcttggctcactgcaaactctacctcctgggtccaagtgattctcccgcctcagccttccgagtagcaggaattacaaacgtgcgccaccacacctggctaatttttatatttttaatagagatggggtttgactatgttggccaggctggtcttgaactcctgacttagtgatccgcctgccttggcctcccaaagtgctgggattacaggcgtgagccactgcgtccggcctaattttaaaagtttaaaatggataatttttattggctgtgtgtttcatgattaccagactatgtttctctctcttgtagaggtcctttgttctccaatgttgctgtcaacattcagtcatttctccttatttcacatggcagcaaatatgtatgttttgtggagcttctcttccagcatagtgaacattctgggtcaagagcagttcatggcagtgtacctatctgcaggtaatatgctttaatctcggggcctttgagagtataagcactctaagctatctgcagaacggacaaagggaatgattactgccatattctacacgtagtgagtgctcagaacatatttgtttctcacagtgtatgtagagaagggagccacagattggtggagatgttgccttttctgttcattttgctgatttcttcttacatatgaattatgtgggtatgtttaattttaagttaggataaacaggcgttaagtaagggttagtgtagaatttaagcatgtcatttttgtaatctcatcgggccttgatttcattagtttaggccctccattttatagatagtggttcccagacttcccggctgcctcaatctcctgggtctttgttaaataaccttaagcaagctcatttcccccagtgtgttcagttcacagaaagctttaaatcagagctatacaatatgattgtcaagagtgagtttgttctgtcttctttgcaagaatgtagcagggaaccacttcctagccatggtcttgaagatggtatcgtttcttatttcagttaggaaattctcatgcatgaatccaggtccctagatgctgctaacgtgacagttggtcaaattttacttacctctctgtttgtaaaatgtacttacttaatacaatataaaaattaatttctaaaatctctacatttagaaacagtatatctggcagttgtgctgtgatgtagtgaaaaacactaagcttggcgatagacccaggttcagatcctatttctactaccagctgagtgatgttgcaaaaatgactaaacctcatgatacttacctcctcatgacaaggggttaaagaaaggactacataaaagcatctaccacaagccccagagtagatgcttaattagtgttcatcgaatacttatgtgtatctagtccttcaaaaaaagaagctgagcattgtgtttggcttgtaagataagtgtatagttctttcccaagcactagttatgttgtagttacagagggtctgtttcagatacattaattcctgctccataggaggtttttaaaaatgagccacgttgactcaaatggcactgaagccaaagagacttacgggatcatccagtctgttgtcccaccccagatattctgatttcgtgtgtctggagtacagccagagaatatactcttgggaatgagtcttcatgttatagttgaggaaaatggtaactgagaagtggagtgaatgaccgtgtcgctcagcagatcatgcagcaggtcagacttttcatcccctgtaaagtcgctgaaatgataggcaggagaagtattcatgcccgtaccctcacagtgatccagattgaaacccgacactgtttatctgtgtagaaatcagaaatgaaaaccattttcatggctggatgtggtgccgcacgcctgtaatcccagctactcaggaggctgggggacaagaataacttgaacccggtaggcacaggttgcagtgagccaaaattgtaccactgcacttcagcagccggggcgaaagagtgaaactctgtctcaaaaaaaaaaaaaagaaaagaaaaaaaaaagtaaaccatttttatacctcacttaaattattgtaatgtgacttgtttttcaggtgttatttccaattttgtcagttacgtgggtaaagttgccacaggaagatatggaccatcacttggtgcagtaagtatttctattgtaaattttttttaatttaatttttaaatttactttgaaataagtttagacttagaagaatgttgtaaaattgataagaggttctcatatacccttcaccctactgttaactaacatcgaaaccaagaaattaacattgaaacaatacagttgactaatttagaatttatacatttgtaaagctttgtaaatgtccggctatagcttttaaccattggtcatatatatatgtttaccagagcagagtatatctcagaacagtaagtgtgcaatcctcgtaaaccagagagcctaatccagtattggaagattctaattatagatttgaatctggtactttatcctcctatttagtcaatattggagtgcctactaggtgctatgctagagcctggggataacagctggtgagcaagatgatcacgattatttgtgttggttttagaaagtggggaacaacaacaacaaaaaaggctcctgccctcagagctcttatattctggatgcttaaaaaaatttttcttaggctggatgcagtggtttacacctgtaatcccagcactttgggaggccaaggtgagaggatgagcccaagaattcgaaaccagccctggtaacataccaagatcctatctgtacaaaaaaatttaaaaaattaactgggggtggtggcttatgccggtagtctcagctactcaggaggctgaggaaggaggatagcttgagcctaggaggttgaggctgcggtgagctgtgattgtaccactgcaccccagcctgggtgacatagcaagaccctatctcaaaaaaaaaatttttttttaagtgtgttttgaggctgggtgcagtggctcacacctgtaatcccagcactttgggaggctgaggtgggcagctcacttgaggtcaggagttcaagaccagcctggtcaacatggtgaaaccctgtccctcctgaaaatacaataattagccaggtgtggttgtgcatgcttgtaatcccagctactcgggaggctgaggcaggagaattacttgaacccagcgggtagaggttgcagtgagctgagattgcaccactgcactccagcctgggtgacagaacaagaccctgtctcacagaacaagaccctgtctcaaagaaaaaaaatttttttaagtgtcttttgagtttaatggcagatttctgggcacatggaaatctttatgtaatatttccttacacattcagtttgtacttatttaaatactaattcatttaaatgcattcaaatagggaatttcctatttaaaggaactctaaaaaggtcaattttgaaaagaattcttatgtaaaataaccattccctaatttgtatgttccccaaatttgtttacacttaattttcctagtgaggcctgtgttctgtcctgtgaccacatgctttcttaagcctccttctttcccttcgtggaatgtttattttctttatacaatttcgctctgatataatttatatatttcgaatcatattgtctacctcattcaacagctaagcacctaatatatgaaggcagtgaagaccactaggatgaatcagagactcagaattcgaatttagctggggagaaaacatacacacatctaatacacactgaaaggaatgaggattctctagaggactttgggggctctaagagtgaagagacctttctaattagctgaaaggacctgcgagggcattttgatgtgctcttggacagctgttgtcctcatcttatagataagaaactgaagtgcaaacttaatgaagtatggcagtaaggtatttggagttagagtgggggtgaatcctggttctgctacttacgtgtgatttctaggacatattactgaacttctctgaatttcagtttccctttataaaatggggataacaccatctatttctgaggtgcaaagcaagtacatttagagtgcttagcacaataagaagcacatggtaagaaatgtggacatggtagttcctgttcagtcatcaaaatcctacagcgccgtggtaggataacattatccccaaatatcttaatgaatctgtgattaaaattcaaggaaattaaatcaccaggtataatggcatttttaatgagaaatctgggaaaaaaacaccattaacaaagttgtgttgttacaaaatgtaaagcgttagtcctcttggtttagtgagacgttataagatgcaggggacagccaggcacagtggctcacgcctgtaggcccaacactttgggagccacggcaggaagatcacttgagcccaggaggtttgagactagcctgggcaacaaagtgagaccccatctctacaaaaaatttcaaaattaagccgggcatggtggcatgcacctgtaatcctacctactcaggagaggtgggagggtgggaggaatgcctgagcctaggagggtgaggctgctgtgagccatgagcatgccactgtgctccaacctggacaacatagcgagaccccatctcaaaaaaaaaaaaagaaagttgaatgggactgttaaaatatgtttgtaaattactgtattggtactatcctggataatttttaaacttttctgtagagacagggtctccctatgttgccaaggctggtctcaaactcctgggctcaagtgatcctcctacctgggcctcccaaagtgttgggattactggtgtgagccactacacccggccaattgtcttttcttattcaagttgagatttttctggttcttgatatgatgagtgatttttcagttgaagcctgatcattttagatatgatgagactttggatcttattgaaatctgctgtttcagtggtcttcctctgacactgttctgatgaggagagggggtgccgtgactcgttactgctgggtgtaggagtagacgtccaggttcctcactcagccgcctttgcctcctgagtgataggggctcttgtcactgcagggcagggatgggagctgagggcgtgcaggctacctagtgtgcctctgctaatgtcgctgtggctaggaggagcaagggtgcttctttccgctgacaccgcctgttaggcgtattgggatgcctcattacagtgtggcaagggtgggagtctaggctctgctcagcctttgctgggcacccgtttctctaaatattgtctaaaaggtctcttttgctaggctatctttttttggtccttgactagagagaacatgttgagggatgatcgatatgaggccaaaagaaagcccagggaactcaccaccacaacattgattgaatctcaggcttcctagctggtccgctttcctctctcttcctttcacagtcctcttacatttgtttcatatgtaacacccagggtctttagctgtacttagcttttgtaagcagagggagcagattcacttaaattataataccaaataaagttaaaaaacataagtatgatagatttgaagattatatagatacagaaaaatgtttgtgagcccaggcgcagtggctcacaactgtaatcccagcactttgggaggccgaggtgggtggatcacttgaggccaggagttcgaaaccagcctggccaacatggtggaaccccatctctactaaaaatacaaaaattagctgggcatggtggtgtgtacctgttagtcccagctacttggcaggctgaggtgtgagaattaacttgaacctgggaggcggaggttgcagtgagatcgtgccaccgcactccagtttgggcaatagcgagactctgtctcaaaaaatatatgtttatgaaataagtaaaaaaaaatcagatgtgcatattgattacaggtatataaccagtacataaaaatattgatggagaacaaaagaccttcacctcttcccatggacccacacctcttaggtctgttggatcagggttcatgactcactgtacttaaactgtgtatgaatgtgagcgttttctgagaagagaagggttcattttcattaaattcttctttctgactcgaaaaagtgaaaaaagtctctctgcatgggagtaagcccaaatatttgtcaaaaaacaagttgtgatttattcagacatataaatatttaaatttatataaaagccacatcgagaaaattctagaaggatgatggaactgtgtatgtaataattacaataagttataatcacaaaaaaaccagcgttccatggaattgtacagataacgacaattttttttaacagatggagaataatcatctatggaatagtagtttagaagaacttcatagaattttttttttttttttttttttttttttttgagatggagtttcgttcttgttgcccaggctggagtgcaaaggtgcgatctcggctcgctacaacctctgcctcccgggttcaagcaattctcctgcctcaacctcctgagtagctgggattacaggcatgcacgaccatgcccagctaattttgtatttttagcagagactgggtttcttcatgttggtcaggctggtctcgaactccagacctcaggtgatctgcccgcctcagcctcccaaagtcctgggattacaggtgtaagcgactgtgcctggcagaacttcatagaattttaatgctctttcatatcaactaatcaaattatatttgcttcattttggggaaacgtgtaattttgatttgttttggggtttttttgagataaagtgtcactctgtcgcccaggctggagtacagtggctcaatcttggctcaccacaacctcagccttccgagtagctgggactacaggcgcccaccaccacgtctggctaatttttgtgtttttagtagagacggggtttcactatgttggctaggctggtcttgaactcctgacctcaggtgatccacctgcctcggcccctcagagtgctgggattacaggcgtgagccaccgtgcccggctacaattatagtctcttgcacagaagccagcttggtcaaaattcaggtcttcttgggtcctccttttgaggagtgttcatgctgtccttccatcttgcagttaccctgacttctaagaatgcaacccgagcttgtttccctgttgaggccacttggcagttatatgagggactggggacatctgagatctctgggactcataataattttctttaaagttttagtaattccccaaatgtaagataatcttgtattctgaagcaacccgtcacatagaagacattaagaaaacattgattaagagaggtagatgctattttccagaaacaaccgtttttatatgaaaaggtaggaacctttctttttaatgataggggcttctttcaaaagttattttgctcttaggtgtcttttttttttttttaaacatctcattcataaataattaaaaacttatggaaagttgcaggaaatagtacagaggactcccataaagtcttttttgtttgtttgttttgttttgttttgagacagagtctcgctgttttacccaggctggagtgcagtgggacaatctcggctcactgcaacctctgcctcccgggttcaagcaattctcgggccttagcatcctaagtaggtgggattataagcatccgccaccacgcccagctaatttttttttttttttttttttttgtatttttagtagagacggggttttaccacgttggtcaggctggtctcaaactcctgacctcaggtgatccacctgcctcggcctccaaaagtgctgggattataggcgagagccactgcacccagccccatgtagtctttttaaaaagcaggcaactcaggtttactagttaacatgcaaaaaactgcacatatttaaagtttggtaagctttgacatgtagacacccgtgaaaccatcaccacactcaagatcatggacatattcatcccaaaagcttcctagtggtcactccttcctgcccctcctctacccctggcgacaacttacctacttctactaaagataaattagtttgcaaatggaaccatacagcatatactagtatttgttgtcctggcctcatttactctgtataattactttgagactcatccatgttctgtgtatcagtttattcctttattatttttgagacagggtcttactctgttgcccaggcaggagtgcagtggtgcaatcatagctcactgtaaccttgacctcctgggcttaagggatcctcatgcctcacactgtgctggaattacaggcgtgagccaccacactggcaatgttttgtttctttatgaagatgaataaagatttcacatgaattttttaagatgaaacatgcttcatgcatgcaggtttctttgggcgtattcatgcccactccctctggttggagctttgtcagagaagtgtgagcagttctttcctaggccataggtgaaagatgcgcatgacacgcttagcactgtccttgcggttcatgaggcacatacatcttactgccccgtagtaaaaattcagtctttccaagcgattactgtgtgaaggacatttagttccttcacctattattggggacataagtaactgaaagctttgaagctttgtgctcacctagaaatgtgcagcatgtaaactttctagaaaatgtgctgctctttagaccttgtagccactaagcagttgcatattgagtttcccattctccctgctgtgttactttgcagtctggtgccatcatgacagtcctcgcagctgtctgcactaagatcccagaagggaggcttgccattattttccttccgatgttcacgttcacagcagggaatgtaagtatttttatgaagtgcagtgctggggatagtggtgatgtttttatgttgagtgggttcttgcccttaagttagaaatgtcagtgctggagcaatcacagttgtgccgcttgtttcttgctgcctttcaggccctgaaagccattatcgccatggatacagcaggaatgatcctgggatggaaattttttgatcatgcggcacatcttgggggagctctttttggaatgtaagtttgagtgtaattgattgctaaactgcttccttgggtcatgcgctcctcctaccccagcctcacccctaccccccatccccatggcagagacattgaactatgcaacggaagcagaagcaggtgggcttgggagggtgaggaaacctcaacgtggcttgctttgggtttacccagcatacctggctcattgtagagacagtctgtgcctttaccctacgcttaaccttaagttgccccaactgttggcctgttattcccagccccctcttagaagactgcagcctggcccccagtctatgctgacatcttctttttccccttcagactttcctgccctcctctcccctgcctggcgtcccaccctgctaccctgacctctgtctcgccagtgctatttagacatgctgagttggcggagccattgctctgtatgactggagtagaggccggtgactgcaaaccaatgtggaccacttactgagtacccgctgtatgcaggcaccaagctagttcccttatgttatactattactactcccattttactgatgggaaactgaggctcagacatcatcttccccaggccaaacagctcttcaatagcagagcagagctgtaaacccacctctataagccctttccacccccaccacaccatatggaattggttgctaaactgcttccttgggtcacagcaaatggcattgtggttacaagaccttccacgtgtgcttcaaacaatggggttttgcctagactagtgcttagtagtaactgtatcacggaaacacggtcaggactcttggcgtccatctgatcgtgggagacccgtcagcatgagctggatcccctcggggcctgtcttttcttacataaatgttgccttttgcccttacttggtttttattttgttccgcgacaatggaaaacttaatttttttttttattaaaaagaaaaatctattctggccaggtgcagtggctcacgcctgtaatcccagcactttgggaggccaaggcaggcggatcacaaggtcaggagatcgagaccatcctggctaacacagtgaaaccccgtctctactaaaaatacaaaaaacttagccgggcgtggtggcgggcgcctgtagtcccagctactcgggaggctgaggcaggagaatggtgtgaacccagaaggcagagcttgcagtgagccgagatcacgccactgcactccagcctgggcgacaaagtgagactctgtctcaaaaaaaaaaaaaagaaaaatctattctaagtgaagcagtttttcccagtaggtggcagaactaaatgccattatgccatttataattttaagtgattaaagaggagtagtatgtagtatatgcaaggtctagctctaacagcagtgcagtataaatagtagaaactgacctgatattacagtatgagaaacatgaaggggttctgttttgtgagctctaaatttatcttccatgtatacttcaaggctcttctccccagtagatttttattcatctgaactataattaggtggcctttttccattctgaaaataattggatcaaatgcattttaaagtccagggtctgaaaggtggaggaatcctttctctttactgtttctaatttaaactccttttcatttactagatttcagtcatgtccagaattcatcttttctaaaagctttaatctagatttagaaatctaaaatcttttatttatttttttttcgttgaagtgccctgattttgttggtggtaaagactccattagtatccacttatacatttccctgactttgcctctgaccaaaccttacagtattcacattgtactgttgcaataataatagctaacatattaatacgctgaatatttgctgtgtgcctaagctaaggatttaattctcttaaaatcctgtgaggtattttattttacagaaaaagaaactgcttaaagaaagtaacttatccaggtcacacaagtaacaattgcagagctggagtttcagatgagggctggcttgcgctgccgctacagaaaagagtgccctagaaatcggtcatcttgcatttcccgattttagtttagccaaatgaaaaattccttttggatttatgagtataatcagacagtatacctgtgaaattaaagtatttgactctttgcttgaaataagtaggttaaaaagatttgggtggccgggcgcagtggctcacgcctgtaatcccagcactttgggaggctgaggcaagtagatcacttgaggtcaggagttcgagaccagcctgaccaatatggggaaacctcgtctctactaaaaatacaaaaattagccgggcgtggtggtgcatgcctgtaataccagctacttggaggctgaggcaggagaatcacttgaagccaggaggcagaggttacagtgagctgagatcacgccactgcactccagcctgggcaacagagcgcgactctgtctaacaacaaaaaagatttgggaaaacactttattaatgaagagttcctgacaaagtgatttttttggggagaatttttataattgcatttgaatattagggtgctcctttttctctcattctaaattcaccagagacttaagcacagagaatttttattacatgcctgttaattaatgtgtataatcagattttaactatatttagtgaatattaagattcaggtacaaatcaagccctttataattaaacatacacattcagaacatttttaaaatattaaaacattaaactgctcttctcacccactccaagtcaaatagcattttttcagtcaggtgtctgggagctcgatgcaagataacaaaatctggtctctgcctcagggaacatgaaatctgtttggggaagccagagcaaaaataaaggttttaatagcaagctctcactaactgcccctggaaatccaccccacatcctccaggaagcctttctctacccccagtgccctcaggagcttctccaaggcaggcccttcccagagcgcagtgtgctccccagctcacagaagatgctccctacacgctgcaggaaagtccagtgcctgcagcacaggcttcagcagcagactcgggttctagtctcagtctgctgattcctagttgtggaacctgagcaggcgaagttactaaacctctctgtgcgtcagcctcccaggctcgttgcttcaggccgcagttaggctgtgtgaacaggagagtggggatgggaactaggtatcttaaagcggggcagagtttggatgagcgggccacccttcgtatagttaggaggaagatgacgggaggcatggaagctgggatagccatcctgagtcagtgctaattctgacacttcagaacatcgagtcagtctgacctgcgagtgagctttcattgaccacttagaaactattagcaccttggacaaactactttctttcagacctggttgcttcatgtctgcgatgggaaaactgatacttaacttgcagatagtggtgaatcaaaagtagtatatgtgaagtactcacacactgcggagcattcagccatcgtcccatcctacttctaccttttacatattgtaatatgaaagctaaaccatttctcgatgtgagtcagttttaatcggctacatagtgagtggcattcgattttaaaaatgtcaacttgggatctgtcaccatgctacttaccatttgtatgtcacactgtttgaatgtcggacctggtttgtttttctccagatggtatgttacttacggtcatgaactgatttggaagaacagggagccgctagtgaaaatctggcatgaaataaggactaatggccccaaaaaaggaggtggctctaagtaaaactgggattggacagtagtggtgcatctggtccttgccgcctgagagccccaggagacatcggctagagtgaccatggctatgctcccgtctggaagatgccagcatctggcctcccactgttttcagctgtgtcccccagtccgtgtctttttagaatgtgaatgatgataaagttgtgaaataaaggtttctatctagtttgtaagcagatgtgtgtgttctctctttaaggggccgacacggctctggcattttgctttggttgttgcattgacaggacctggggagagtgcaccctgaaaggcctgatcagaacatgaaggcgctggttgcctgtctttggaccctccagtgcctctgcttagccttcactcttccttgcctccccctcccctgggttggctgcacataaaagtcgagagtatcccctctccagcacaatctgaaataacagctgcagtattttctcaattttcaggaaaggtagtgttttctggcagtgagtggcatatacaaaaagctattttcaggttttgctttctaggttcaatttgtagataaattaagaggtagaaagaagtgatttgggtaaattcagacttgaatctgagccgaattttatcttctgtttgaaagtgttctaattgaagcgtctcactgaaatagcagatagtggctgtcgtcgtcacagcctcactgttgtggaattcatgttaccctcgtgactgagaatgacatctaggaaatgcagtttgagagtatgttcttcttgaagtcatttacaggagaatttttagtcttttgatggcttcaaaatgttataccaagtcttgcagctttgtcctgggaggatcgaaggccctgatttcagcctcctgtggccgatcggactcaggttgtgtgccgtgggggatgggaatggcggctttggaaaaggagtgggagtggtgcccacctcaccaggcaagtgagaactgcatggcagcacgcgcccagcacatagaaattgtccagtatttggcagtccttcatatccttcttccatcaggctggacttgtttctactatgatttacagttattcttcccaggcacaggattctgttctaaactcgtatcacttctaggggagagagttatcttagccatcattttgccagcgaggaaacggcacacgtggtgtaggggcactgcccaaggtcacaatgctttgctctgacatctgctaacaactctgcaacacagatgaggcaagatgcgttttccagagatgggataggaggctgagttcatagggacattccctctagagcccaacattaattcacatcgtgctttgggcagaccaggcaaagaggcaatgaagacatctctgtgtccctgctttgtgactgggaaaaagttagaagtccctgtagcatctcctggtccctaaaacccctcaatgctggagcctctgtgcatggcctggggaggccagaacctggctgtggccggagaagccttgctgtccacagctccctcctgattgcccacgagggtgcttcactttctcctcttggcttctctggggacccgcgatcactgccttcaaggccatgcactccctggcccgtgggcctcttgggctgtgccgcctccactggcatctgaagtgtggggtacctaggaacatgccgtggctgccgtctccctcattccatacacttcttgagtgggtgcacttgctgaagcctcagttatctgtgaggattctgagctccagacccacagaatctctctgtactcttagtaaatgtgtctactgcaacacacgcatggttccaggctctgggaccacccccccgccctgcacaggcccctcaaatagcactcggcttaaggagtgacacgagcaatcggtgaagtctgaaacccggagccattcgagatctccctctctcgcctcttatttctagaattcagcccctcagccttcccagtgcctgtgactccgtggtggtcctcacttcttagtccctggactgttgagcctgttcttccagctggtctccaaagcaaccctgtgcttctccatatgcctgccagagtgctaaaaacatgtctgtcattcctttgttgtcacctgtgaaaaacttttatttatttgagacagggtctctctctctctctctcgtccaggctggagttcagtggtgcaatcatagctcactgtagccttgaagtcctgggctcaagcctcagcctccaagtagctggcactgcaggcacacactaccacgcctggctaatttttaaaagttttttgtagagacagggtctcactgtgttgcccaggcagttctcaaactcctgggctcaagcagtcctcttgcctcagcctcccaaagtgctgggattccacgcatgagccatctgcacccggccatatgaaaagctaaaattccttagtgtggccaccaagaccctccatggtctgctacctcagctgaaccctcctcccccgtgacctacattcccacctggcccaaccaccctccctcacaacaggtggcgagtccagctttccccagcctgcctccctctcatgctgacctggccttgtcagttcaattacacttccttccgtccctcactaccacactaaacctcctgaaggcacccagaattattcctagcacatagcaactgctctttgactgttgtttgatcaatgaagtaataaaaagagagctgctctcttttcctgcgagatggagaattttagtcccaagcgccatctgccaggctggctaacccagggccgtggcggacagtccacaaagagttcactctgacccggcccctgtgtgtcattttccaggatctccctctacacctggcgcctcgcctgctgcctgctgggacatggcctggcctgctcagctgacctgctgccacttctaggcagccgtcatgtcactttgctacaacttcaagctaagacaggcaatgttttgggagatgaatctgttttctgactggccagggatgtgctgcagtcccctcccaggcgcagactggataccttccaagtacaaccttgaaatggagctctgggtaattaatgctgtctcagtagtgttattagtaattggtctgcagtgtataccgagagcatgtgtcaaatattcagaaaagcgtttgtgggtggtcagggagttgtttgagacggtgtcctgcattgaacagacctgcctttacgctggaggatccctcaacagctctgcctgaaaacagccatgcatgcacaggaggaaaggaacttgatagccttgtggccagttctgtggccgctttatcaaactaaagcttttgcaaatggccatgctttaaaattaggaatttcagaacccagggaaaggtcgattggtggctaatgccaattctaatgaaaagtggattggttgtcacaaatgtagactagcatcctaaaggcaaataggcggcgactcacaggctgactgaaacacgtgttctccgggaagcagggccccgagtcttctctgacaccctcattgctgcacctgcccctgtgcccgcggagtccatgcggtgcagcctggcacaaatgcagcagtcgctgggcgtcccgaggccacatggagaacctcccggctggcggactgctcccagctgcgaccatcgggcccttggcctctgcgaagccggggccatttataagatgacactgagggaactttggattcaattctgaggcattcttcgagatggacacttgtaaatgaatgcaggcggtttccggtgccccctggcgacggtgcagcctttcccccatccgcgctccctccagctccagccgtgcgcagccggccccggccaagtggggctgccgccgagtgcgccccctcccgggacgcccaccctcgtgccggggggcggtgctgcggcggcgcggggcgggccgcgggggcggggacgctgggcgcaggaggcgcggccgggagcgccgcgcgccgggagcggggcggcgggcgccggggctggcatggcgtggccctgtatcagccgcctgtgctgcctggcgcggcgctggaaccagctggaccgctccgacgtggcggtgccgctcactctgcacggctactcggacctcgacagcgaggagccgggcacgggcggcgccgcctcgcgcaggggccagcctcccgcgggcgcccgggattccggccgggacgtgccgctcactcagtaccagcgggacttcggcttgtggaccacgcccgccgggcccaaggatccgccgccggggcgcggaccgggggcgggcggccgcaggggcaaatcctccgcgcagtcctccgcgccacctgcgcccggcgcccgcggggtctacgtgctgcccatcggcgacgcggacgcggctgcagcagtgaccacgtcgtacaggtatgggctgggtagggaccgcaacgagtccccaccctgtggtgggaggacgcggaggcccggagccagagggatggggtgggcggcagagcggaggcgcctggagcccggatcccacgcgacctcggagctgccggcggcctcagaggtcacccccgtttggtccgtgggcactgcaggcggcgccttcgctgctccatgcccggactcagtgctcgagcacccccgtgccgggagcgcaccgctgccctcgcagccgccctcctgggggcagccgtcagaatggcctgccttcagccgagttggaaccggcctccctttaactcccaccgccgggcctagccgtgcgaggggtgcgcgcaggccatgtcccccagctctctccggtcactgcctagtgtgcgggcgttggtggtgaggaccgagcgcagggtcccgtgtgggtgagcccttcagagtcccactgtgacaggggctttcagggagaacgggtccgcgggccctccccacctcccagcccagctctgctcctggacagccgagggctttctcccttttttcctcttaccacaaaagtaattcatactgtagaaaaatgggaaagtacagaaattacaacaaaatacgtatctccttgatccctccccagacgagttctttctactccgtaatgtgcatttggtgcatatgcactgatatatttttacgtggttagattcttactgtacacttttttcaccagttgtagaagtctgtccgtgttactacatgttctgcaacatgaattttaataaacgtgcagtattttatcctatggatatgcctttatatcttcaagttttatttatctacttccttaccattgactatttagggtgtttctaatgtgggactattaaaagcactacttttcctttgatgcagctatttcactactaggaattttccctacaggtatcctacaaggtagggtgggagctcaggagcgtaagataggtggagacattgtacaacaaaccccttgtcctgctgatgtagggaactggttaattatagcacagccatgaaatgggatactgaaacccagcggatcttaaatatacgcataccaaaaaagcaaggtgcccagcagcacgtaggctatttgtgttttaaaaaggggtattaatatacacacatatgctcaaataagcacaggatgccctgatggatgtctgaggagatggtaccgttagggagaggaacttgatagggactgccaggggtggaaggcttttcactctgctcttttgaacgattgctttttttgcctttgtaacatgtccatgtattgcctatctttttaacttttttttttggagacggagtctcgctctgtcacccaggctggagtgcagtggtgcaatctcggctcactgcaatgtctgcctccctggttccagcaattctcctgcctcagcctcccgagtagctgggattacaggcttgtgccaccatgcccagttaatttttatttttatttttatttttgatttttttcttttttgagacagagtctcgctctgtcgctcaggctggagagcagtggcgccatcttggctcactgtaacctccgcctcctaggttcaagcaattcttctgcctcagcttcctgagtagctgggattataggtgtgtgccatcacgcccagctaattttttgtatttttagtagagatggggtttcaccatgttggtcaggcaggtcttgaactcctgacctcatgatccgcctgcctcggcctcccaaagtgctgggattacaggcatgagccaccatgcccggatgagggactccttctaaaagctaagccagccaggcatggtggctcacacctgtaatcccagcactttgggaagcttaggtgggaggatcacttgagcccaggagttcaagaccagcctgggcaacatagtgagaccctgcctctacaaaaaatagaaaattagctgggcgtggtggtgcctgcctgtgattccagctacttgggaggctgaggtgggaggatccctcaagcctgcgaggtcgaggctgcagtgagcagtgtttgtgccactgcactccacctaggcaacagagcaagaccttgcttcaaataaataaaagctaagcctctgctagaacatccctagtaaagaggagcccagcgccatgcaagtcagctcgctccatgggcagactgttgtaactgacagaaagcgcttccttcccggagctgaagctgtctccctgcaagctccaccccttgccctgctctggtgcctagaacttcagccgctggaatgcgctgcacgctcaggacccctggccttccagactctccgctattcaggcccctccagctggctagtctagggcctgagcgctgcggctcagtgttgcccactccagctttggcggctcagcttgaggacgtgtcagtgaatgcaagacccaccctgcaaccactgtcccccagcgagttccttacaaagtgccgacctatgagggagcctcctcctggggacatggaatgttctttgtgtcttgataatggtggtggtacccaagtggttacatttgtcaaaagtcatccagctgtatgtttttaatggatgaattgtatggtttggaaataatgccttgatacagttgggtttttggggggtttttttgttgttgtttgttttgttgttgttgctgctgttgcccaggctggagtgcagggacatgatctcagttcactgcagcctcaacctcccaggctcaagtgattttctcacctcagcctcccgagtagctgagaccacaggtgggcactacatgtggggttttgtgtgtgtgtgtgtgtgtgtgtgtgtgtgtgtgtgtgtgtgtgtgtgtgtgttttagagatggggtttatgttgcccaggctggtctcaaattcctgggctcaagcgatcctcctgcctcagcctcccaaagtgctggaattaaaggcatcagccactgtgcccagcttggtttttaaaactaataaaattggggggataagttcatactttttggctctttaattccacagttaggaatttatcccaaagaaatgatgatatgaacaaagatttagctgtaaggatgcttatcacagaagttactttttttttattttaaagttaaaaagaggccggtcgcagtggctcacacctgtaatcccagcattttgggaggccgagatggacggatctcctgaggtcagttcaagaccatcctggccaacatggtgaaaccccgtctctactaaaaatataaaaattaggccgggcgtggtggctcacccctataaccccagcactttgggaggatgagatgggcagatcccaagttcgagaccagcctggccaacatagtgaaaccccatctctactaaaaattagctgggcgtgatggcacgcacctgtaatcccagctactcgggaggctgaagcaggagaatccattgaacccaggaggtggaggacgcagtgagccgagatagagccactgcactcctgcctgggcaatagagcgagactccatctcaaaaaaaaaaaaaaaaaaaaaagcaatccctcatctgtgtggaacatgtggtgagtgaatgtcctgccgggccctcccagctctggtgacggtgaaggtactagctgtcgccttctctgctttaacgcacaccaggctcagcactccctgaggttagccccctgcagccttcgtgtagtgcttgccgtccccattctacagacaaggaaactgagtggctggcacagctctgaatggcagagaagggagtggaacccgtgtgacttgccccagagatcaaatttgtagcccccatgggttttcatcccttaagagctgcctccttggagtcacttgctttcttgaactgtgtcctgaggccagctgtggaaaagccttgacagacaggagtcggggcttgttggggttcttacctcctggtgtgtaaattcaggtgggtcagcctctctttttttcttttttttttttttgagacggagtctcactctgtcaccaggctggagtgcagtggcgccatctcggctcactgcaacctccgcctcccgggttcaagcgattctcctgcctcagcctccagagtagctgggactacaggcgcccaccaccacacccagctaatttttgtatttttattttgtattatttatttatttatttgagatggagtcttgctttgttgcccaagctggagtgcagtggcgcaaccttggctcactgcaacctccgcctcccgggttcacgccattctcctgcctcagcctcccgagtagctgggactacaggcgcccgccaccatgcctggctaatttttatgtattttttttttttactagagacggggtttcaccgtgttagccaggatggtctcgatctcctgatctcgtgatccgcccgccccagcctcctgaagtgctgggattacaggcatgagccactgtgcctggcctaatttttgtatttttagtagagacggggtttcaccatgttggccaggatggtctcgttctcttgacctcatgatctgcccgccttgccctcccaaagtgctgagattacaggcgttaagccaccgcgcctggctgggtcagcctctctgaccctttcttcatccgaaaagcaggaatagcaagagcttggctgcctggacccctgcccccaattcgggcagaaacacaggatcactgttgaacttgaccctcccagcgccatgccagtgggcctctgggacccccaccttccagctctgggacctgatacaagccactccctccagccttgtcttgtaagatgtacatcatctaagcaaacttaagaaattcagaaagccaaggaaacgaacagagccaggaatcctgaagatgtgaggccactcctaactcaaggttcttgagggagtacccaggatccccgggcctcagcttcttcacccctgcaggacctgccttgctggcttctggtctgcacgtgagttgatctgccttgcctgcctggccacatgggcacagcaggtcctacccacatccagcctggctccttccacctgacaggccccctctgaattctctctgggccattgggcatctttggcccagttgctagccccgcccacttctggaaggcagtccttgctccctggttgcttccctccttcctgcctaggtggggcagttaaagggctgatattcaagttccacaagacttggccccactttactgagtgcccgaaacgaagactcacaacagcctcaggcacatgggtcagcagccccacttttcagaagaaactgaggctcagggaagttgaggaatgtgtctgaagccatgttgggctgagaacccaggcctcccaatcctctgtccggggctgatgccggaacatgcttgagcactgtatgggggcacagcaggcagggaggcctgtatttcttactaatcttggcctgagccatgagtctgttttctttctctccaggcagtcaccgggtcctgcccattccatctttaaggtcccctctcccatctgggctccagccccgggttcctcctctggcggccgccaggattgctgtcgtctgtggctctggtggcttcctgctctgagacccctgcagccacctcagggcagcgggctcaggatgccaggcccaaggctcagcgtgggcatgtgaagtgttttggggacagaagggcgcgcccaggggaggacctgcttccgcaggaggaacagagcagcatatggtttgggcagctggtcttcagaagctcgcggcttcgggagtgaaaattacctgacggggccccggcctagctctcctcctggcaccccagtgctggccatggacacagccattccctgcccacgcagcctgcccagtggtgccccagctttgcagctgccaaggagaaaggcagctttgttgacctcagggcctgaagcccaaccccggcagtgtccagcctgggcaggagcaactccgcacacgtgggtgccaggcccagctagctggacacttccaccttggccaggtgctcctgggacacagggacttctgccttctgagctccccatcttgcagaggagtgggtagaattaaaggaggtcccttttgttcagagaaatggaagcactgtcttttcatggagaaagctgctcccggtacatggagctagcggtgccagcctcatcctctccctccagggcccgccttcccccatcacaccaccctccccgccacaggctcagcaacagcgcatgatccactccctccaccatgcacagagctgtgcaaaggccaggccaccttggagtcttttgagatggtcactgcgatccattcttctgcatgagttaatgagacaaagtataaaaaactaaaagttctgagccttatttttcttttcagtcttaagcgggtctggcaagccagggctgtgcccggtgctgagggcatttcctcttcaggcataagcagtcaccatgacctgggtctcttgaagcagcctggctctggaggggcaggtgtgggagaatcgcagggggtgcaggtatagcaccggggctgctcgtctccaagacccagcagtgccaggtgctgttgcgttctgaatgagacccaggtgctaactgagctctgccctgaccctgccgctcgcctgcagtgtgagaataagcttcctctcctacttccttagggaccggggtgagcccagatttcccagtggatcgctgaggtgaggggccaggcagccacacacctttctcctggagctgggcctgcacgggagtgcacttgccttgccagttctgtctttgggaagatgatgaggactgcctggagccgagggtttcagcaattggcagggccgtgcatggggcagagcagcagcccctggggagtcggtaaaggggtggctgaccctgtgcaagcttgtgaccgtgttctctgttccagacaggaattccaggcttggactggagtgaagccctcaagatccacaaagacaaaaccagcccgagtcatcacaacccacacttcgggatgggacagcagccctggggccggcttccaggtcagccggaagctggtgtagcaggggtgtgggtatagaggcctctttccccgggtagggattaggagccagattttcatggtgtaaaatgcaattatgaccagggacagcagtgccaaccagatgtcccgaacaaaaacccaaggtacttcctcatcagtagccagctgggtggccctctagcgttggcctctctggtgagcagggtctctctgcctcctaaatccccatcttacccttggccactgaacgctagtgactggcctgagtaccacagcatttgtgtaagaggaaagagacgatggaagggagtgggggcatctcagctccgattcccaagtggttcagggagcagaatggaaggtccgtgtaccactcagctgctaatgcagtgacgcctatggctcacggtgggcaagtcccctctgacccttcaggtctcaactcctggaggatgcagaggatgggaggggattttttcctggagctgggtagtggggaagagtagggagttaaggaaaagtcccactgatatgtggccacacttcatttttcaggtcccagaggtgaggaagaagttcactcctaacccctccgccatctttcaggcctcagctccccggattctcaacgtgtgactgcctgcaccgtgacaccatggctgccgacaggacagggctggggagcggcctcaggacccactgccgcggggctgggcgagagcatggcatgggcccctgcgggagggcacagcccctctcaaagctgtcaccagggccaaagtgctggtgtggagcagatgcaccgatggacttggcacacccagctcagcctcaagcatcctcttgagaagcctgtggaaggctcctgcgttcgttaactgccatctggccgtctctcagttttgaaatctctgaggagcctgaggatcaagtcagttgggaaccgaattggtccatggaagctgaggaatgtggacacatccggcccttgaaagaaccagttatgtccacttttggtggatttcccaggatgcgtgagcacttgattaatttcataacctacagtgagacccttggctcttcctacaaatggcccctgcagttgaagctgttggaatcttgggccgtcacctgcatgactcatggtgatgctgagtatccaggaggaaatttccagaagaaacagaccgtcagtcacgggcttccacttcacagacctccttatggccaagatgagcctcatgttttaacaaaacagttcttgggattgaatgactcacatttaccttgtgctaggttctaaagattgaatccacattttgttactaatgattttcccgctaacataaggatgatgagcagggcactatcatacacactggctgagaactggaactgtttttgggaaggtggcatttgtctcattccctgaaataccttaaaatgtcctctacaccaacccttccgtctaccctgctcacatgtacagtgacggggaactcaccaccttttgaagaggcagttcattttctttgcaaagctctctcctaacttcctccgtaaattccagccagcatggccacatgggtcacgcctggtgccttcacacgtttgaggggtcttcgtctctttttaaagcttagaggtacaagctcaggacagtcttcagtaaggaaatttgtggatttccctttggatctttcttcctctccagcccacaagtggctctagtgagacgagcatttaagctgcaggtggtggcactcgggtctcagagccaccagacgtgcaggtgggacagtggttccagctccgactgcctgtcagcgtccctcccaggtgctagccctggcaggcacagccctcccctcatgccagcaaaggaaatgctcttgatgagaggctcgctttaaagaagcccaaagcgtgtgcttatccaaggggttcagctattcctgacttcacggcttgcatgtttgatttttctaagagaaaagaggctgcctgctgggtgtctgtggaaatgagattaaaaactgtacaatctcagattttactaaaatgcaaaaatgtagtttcagtttcttaaattataagcacgagtcttctcacgcttgttttctccagtctcttggtgctaaggacttcagtgtggtgcagctgccgccacacctcagaggcctgttgatgctgagcacttcttgctgtggggtgcagagcacatgtggtaggtgcagcccacagaacccacccgtcccctaccctcacccaggcgcctctctctgaagctcctcaggctctaatcccagcttcacttgctacctgtgagcaactggggttccgtttcttcactgagaagtgacgacgctaccagctacaccttgtggcttgccaagagcatccgtgtttatgggtggggtgctcagtacaggaaataactgaggcacaggtgttaggattattctttcctgccttagtcccccctcctcactttccctgggagccagctgtgttcccacctgcagctcccagcatcctctagcttgatgccgtgtgctcccagcccctcaccccccctggccaacgtcaccctgcacagcgcccagatgcttgtttgttcttttcctataatgggctggtcagctctgctgcagctcagccaggaccaaccgggcctgccccttcctggcagtgctggtggggcagccgcagtggaggcctcaccacaccagacaggcctgactgcaagacaaacaaacagatggtcaagagcctctgcaatgcacagcagacagcttttcacagacaccaactccagtgttgctctgagggtgcatcatcatcgaggcagggtcttgctttgtcacccagtggtgtgaacactgctcactgcatcctcaacctcctgggctcaagtgatcctcccgcctcagcctctcgagtagttgggaccacaggggcatgccaccatgcctggcttttttttttttggctgtcacccaggctggagtgcagtggtgcaatctcggctcactgcaacctctgcctcccacgttcaagcgatattctcccacctcagcctcccgagtagctgggattacaggcgcccaccaccatgcccagctaatttttgtagagacggggcgtcatgttggctgggctggtctcgaactcctgacctcagatgatcctcccatctcagcctcccaaagtgctgggattacaggcgttgagctatcacacccggccattttttatttatttttgtacattttgtagaaacagggtctccctatggttgcccaggctggtcctgaactcctgggctcaagcaatcctcctgcctcagcctccacaaagcactgggattgcaggtgtaagccactgcacccagcctggcctctttatgaggagatgtgggttatgctgaaactccttcccactcacttaggtctaaataatcaggcctaacatgttcagcaagtgacccaagaagcaactgagacagacaagtctcaaccatgtggtcccaactcatagctatctatcaatcatctctcacacacatacataatacgcatataagactgaaagaaaggcactgagagatgttagcagtgattatctttcagaggaggaattatgagtagtttttcaaacacattttttatgcttgctaaagtttctgtaaacatttttataataattctgtaaagaaaaagttcttaaaaataaaaagcaagccaggcatggtggctcatgtctgtaatcccagcactttggaaggccaaggcaggtggatcacttgaggtcaggagtttgagaccagcctggtcaacatggtgaaaccctatctctactaaaaatacaaaaattagccagacgtgctcacttgaacccaggaggcggaggttgcagtgagctgagatcgtgccactgcactccaacctgggcgagagagcagactcttttttttttttttttttttgagacaatggagtcttgttcttgtcacccaggctggatggagtgcaatggcacgatctcggctcactgcaacctccgcctcccaggttcaagcgattctcctgcctcagcctcctgagtagctaggattacaggcacctgctaccacgcctggctaatttttatatttttagtatagacggggtttcactatgttggccacgatggtctcgatctcctgactttgtgatctgcctgcctcggcctcccaaagtgctgggattacaggcatgagccaccgtgcccggcccagactctgtctctaaataaataaaaagcagttcaacatgttagcaaattccagacaaaagaaaatgttaactttttaattatttcacaacccaagctgccactgcgggagctgcctcaagcagccacgggctgcactatgacgctctgcaggtggaaagtcctaaagatccttccgcaagtcgagggggtttgcaggcatttagaacaaggtctcgcctctctgtgctccatggtacagaactccaggactcaggccacgttcccaaaagcagcttttgaaaaaagctaggccctgcagcccaccccagacaaatggaagaacctcccctttgaacagggtcaagatgatgatgaagccccaaagccagttctgttggccccgttcacacaggactccttccatcaataacttggagtccaagtcacgtaaggtactgcctgtgacactgatctgagcctgctctcgctcctgccaaaaccttggctgagacaatgaacatttatgaaggcaagcctaggcacacccctctcagccatcagactctttgactctccattatgactctcagcaaagtctggtccccagaaagttacatacttggactgtatcataatgcctttgaagaaccaaagctttcaaaatctttcagctcttacgtttctggatttttcactatttctgagccatatgctagcagatggtcacagcataaggaccgtgtcacaggagtgacttgtttcagtcctcaacacagtccaattttaccctgccagataacccggtatgtttctttgttagacacgaggagctgattctctctctgccttggctttaaggaagctctgagctcatttatgcagttttcttttgccccaagctgtcaggaataattatgtccatttccaaattttttttagacttttatgtaactgtaatcctttatcttatacggttgcaacatttttttttttttggcaagaagtagaggaattaatttaaacatatcaataagactctacaccatcacctcatcccagtgcagggagaaccctgcctgagtaccatgcttcaaactcagaaacacccaccacaaataccaaaagatttattgtagacaattttgttacacaattatacacattatgatacacgtttgaaacattaacacacgtggagactgctaaatcatttaatatttcttttgcaaaaagataatttctttaggctgtgatacctgcaataaccaatctgttctcatttggatcagatctttctccctctgtcctggagatctcacagttcactttgctgaagcaatctatccacttccctatcgaccttgcttatagcagttcaggtatagactatttgagccttatatactaaactgttaagccagtgcgtgccctatgccctgctgagaatagattccttctgtacttgcagccctcagatgctgaattgatcaatcaatttttgagacggggtctcctctgtcaccagggctggagtgcagtggtatgatcttggcacactgcaacctccgcctcctgggttcaagtgattcttcctgcctcagcctcccgagtagctggaattacaggcacacaccaccatgcccagctaattttctgtatttttagtagagacggggtttcaccatgttggtcgggctggtctcgaactcccaacctcaggtgacccacccacctcgacctcccagagtgctgggattacaggcgtgagccaccatgcccggcccagatgctcaatttaaaaggcagagtttattcagtcactccccgccttaccttcctgactcaaacatctacaggacccatgaaaacaggaattacgttgcttgggtaagtttctctgactctgactcacaggtttccgattttcctggagcagaatagaacagatttctgactgggcatgcattctttgttctgccttccacacaggctgtgttaggaagtctgagatggggcgcctccaatagacccgggcacctggcagcgccaccttctcctgcctgccactccctcccatcgagggggcctctgcttgtggacacagactaatctcactgcttctgggcactggcatccttatttctgggcatgggcagttacttctccaactttaaggcactcactggtatttcttttaaatacttttcttcttgggaaaaactccttaacagagaagagtatatacaatccacggataggacagacgaccccagaagagcctgccgggcgccgctccccactggccactcagcatggggtcagcagcagaagctcctgcaggccatgcagatggcgtggaacctgcgatctgcttcgcacacatgtgtaacgctgctacacttctgccaagtgtctgggactggtgcacacagtctattcctagcatagtgagttttcttggttataatcaaacctcttcctgactcctgttgggacctctccgtcccttgccactgctttgacaatggttctagtaatgctctcgtgctcaaaaaaggaattctgctcagtctgccgtctctcaggccttcatggttcttggctctaggtatggcctcttcctatagctgactcacttgggctcagagtacagcccctccacaccaaggccaggcatgggagagaaccacctgctgaaggctgaagcccaatctctcttcagggtaactgctggagctactggtaactccagcccacaaaatgggtgaaatctctagcctgccactcattttctacctcctggggaggcgggcccaaggagcccccttaagcacacccagggagaagggcctgaggcacacggcctggcccgctctcgtggggcctttacaaagactgcagaaacgctggccgacaaagcacggatccactgacagcctcactccacactcaggaaacaaactcctgtcctaggaggatttcatctggagtgcagcgtgctggtgacacgtgggaacaggcagcggcaaaggttgggtagccatgacatgccgagtcacactggaaaccacctccttcccgagcagcagggtcctcagttacagcttcgctgtgccttcaaagcctgcttctccagggcacctcactccgctcactggtcctcattcaatattcccatgtgtttgtttgtgaggaagtccagaaaaggaatgttgcaaatggcctggtgaatattactcactgtaatttctttgggaatcctggtccaaaaaacaaagggtgttaccaggtgaaattctctcacgtatatctcatcatttattcacttaactcatcacagggaccatcccaggcagaggccccgtggagagggctcctgagccacagacatagcttagggccactctggggtgaggactgccttcctgtcataggcatgagaaggatgtcaacaagttggttgaataattaggaaaaaagattctgagaactgagaaaagagaaagaaaacaaagcggatggcagaacggaatgacacatttgtgagtgagtctcagcagaccgaaagctgagtcaaagcaccacaaaactctgggaccttatttcccatctcctagaaagacgggagacggagccacgccaggccaggcgtgatgttaatcgttccatcaaaagcacctaagtcactctacccctccaggacagggagcacagaggtaagcaggggccacaggaggccctggctcacttgtgggtccaagcaggacagtgggcagcaggaccggaactcttggttccccttccttttctctaaagacgcctatgttgtctgatatattcctgtgaagtttcatctactattcctctgatttaggcccttcatgtcctcaggcactttgctacaattttataaatctgtgacagcctttagcataatgcaataaaataatatttgtttcctccgaaagaaaagcagatgtggcctatctaccatcctttcagggcctaggaacagactgaaactcagtgtcttaatcaaagacaacgagtcagcaaagagcagtggcgagcccaggggcctcagagccaatgagacctgagtcggaagtccaggtctacactgtatttgctgggtaagctgggtaaaattacctttcaaagcccggtttcctgatttttaaaaagagaataatagttctgcaatgaaaaacaaattaggtaatatatgcaacgcttggccctcgtgtctgacatgtaatggacactgttatctttaattgcaaagctaatatttattcaaccctgtaataaaacagagtcctaggtgtctgtgaagtaatgagga

SEQ ID NO: 5645 - DNA, 705115 bp, Homo sapiens
  LPP gene - 189413423 - 190078537 of chr3; NCBI Entrez Gene ID: 4026; Build 35; sequence includes 20,000 bases upstream of initiation codon and 20,000 bases downstream of termination codon of the gene
tctcagggagatgtttctctccatctttccttgctgcccctgagactttgacttgactttttactcctgtgaaacaacctcctgatggtgatagaaagaataggctgaccacatggacattttgtgtttatgctgttgtgacagggctttcttagagtaaatcaataacatgttcctggttgagatttggcctgtcctataacttgactttagggagagaatgtgctgattatgctgaagatagcgtgttggtttgtgtgtctttcatgtttattactgtacaagaagaagttggcgttctggtacctcccctccctcaaccattacaacaaggaaaacaaaatccactgagaggcagcatagcatggcgatgaagaacatggactgtgagctagattgcctagattcagttcccagctctgtcgctgtctagatctgtgtctgtgtctcggtttccttacctgtaaaacgggaatgatgataattgtagctactgtacaaggttattggaaaggttaaatgagttcatatttctaaagtatgtaaaaaattgcctggcatacaacaagtgccatgtaagtgtttgttaagtgaggacaacaacaaaattttataaacttgccctgctttccactgttccttacaggacatgatatttgcacaagtctgacctctgttgtgtgtggtcaggcactgaagggtgacatgttcacatgtgtggtctggtggacactagttttgatgactgctttgccataagaacttcgctggctatgggaaaatgtgtggttgagaaatagcaagtagaaggttctttttttttttctgctagtaggatagagtttgggttaaatggcatttgcagctgagtttatccatttttaaatttttcctggagttacactgtgcagcctatgcatcaatggttttatctggctcgattagtcagtggatagtttttaatttgacttaaaaaattgggggtcacataaagggaaccagcaaaagatttggattctgatgaacaaggtttaaggctcagctctgccactgacatgctgtgttacatgggcaagtccccactcaccatctttggtcctttatgtactcttctggttctcattgtttcttccctgaaaaaatcagggtgctgaatggtcaggtgagctccctattctctgttggtgagtggccctcattcctggtcagttagccatgggctattgagggaagatgttttatgaagtgtattgatggtaaatttagacagcaaaagaatccaattgatcatcttaattttttcctctgtacttcgtaattgtgccgataagaagtcctcatttcagctttacaccttttctaatttcccagatatttctgtgtatcaccagaaggcagaatggatccaaatagttattaccactcagctcttagaagttgtttgggctggagaaatgttttcattattaggacactttctgggtcctctctctagagaggcaactgagcctcaaccataccatctcccaggctcactccgtcctgcccaatctgtttacatctctactttggaggcaagctctatccagttctactaacctcagtgcgatgactcagggaaaacctagtttctttttcctaggaaaatcaggttgaccacaacttctgtagttcttgagggaagaagggaagtataatgatgttggaagtcaaaatattgacattaagatagccaagtggagttttattatgtatgtatgcatgtagacatgattgaaatgtatattacaagctcatatgacatacctttataatagagaggtacctgtggattctaccttacttttgttagtgttttcactgtttcatgtgagttttacaatgaacctgtgagatttgcagagttaagagttatatacccgtctatggtagaaaacacaggttcattcagaggagtaaagtggcttgcttgagatctgtgtcagtggtagtcttctgactagtgtttcacagagttgttttgacctaagaaagttagagcctgggccagacgcggtggctcacgcctgtaatcccagcactttgggaggccgaggtgggcagatcacctgagatcaggagttcaagaccagcctggccaacatggtgaaacctcgtctctactaaaagtacaaaaattagctgggcgtcgtggcttgtggctataatcccagctactcaggaggcttaggcaggagaattgcttgaacctgggaggtggaggttgcaataagctgagattgcgccattgcactccagcctgggcgacaagagcgagactctgtcaaaaaaaaaaagaaagaaaaaagaaagaggctgacgaaatttgtgatttttgaagcaacagaggaaatttagaaagaatgaaacttacgccgttaatattaagttataccaaggatctactcataatataacccaagactagaaacttaaagtactgtatagttgataaagagaacgaagccgtagagagtttactgaatttctcaatgaagtggcaagcatctatccatccttccattcattttgtcatattattagaaaaaaatacacagcatgccagctgccatgttgagccttgattcatcaaagttaaattagaatgacatatggcagtttagcatttaaaatgtggctagttcgaactgagatgtgccgttaagtataacacaccagatttcaaaggcttagtataaaaagtaatgtaaaatatcttattaataaattatatgatgttcattacttcttggaatgataatattttggatatattgggttaaattaaaatgcatttctcctatgatttcctgctttttaaaaatgtggctgcaggaaattaacaatttcatatgtggcttgcatcttattccttttggacagcactattctagcttgtgtctagtagaggaagtaagatttatacggacatgcttttctgagagcgtggcatctcgcttctttactcctctgcctttatatttgtctctactgcctcaccttcttttggcttcttaacccattctggtcggatggaagttgttcttgtccgggtctagagggctcagatgcattcctttttagcagtgctcttatttggcattggtggtgctgtttctgttgaccactcccagtgtctctggatgttttgttattcctttacctccctagcctctccttggggtttctttgcaggctcttgctctctcttgtatcccataaatacaagcattgcagagctttgtctcatgactgctaggtgtttatctccagtttggaactcctgaacttcaggcccacactcctacatgccttttggacactccagttggaaatcccaaagttgcatggggctcaccgtgtcttttggcattgttagcttggtgagtgacatcgcccaatcctggaaactgggactcattccggatggctcctctctgtccttcactcttgcctctgactgtcctcagtcttacagagtcaaccacggtaacacgtcctgcccacttccctcctccctctacctttggagcctgtcctccattcaggccctcagcatctctctcctggagtgcttcagcagtctcagctggccttctttttctattcttaccctcatccatcctattctctcttttcttcctgagtgatattccaaaaatgcaaatctgttcatgctatgtccctgtttttaaaatccttcaatgctttcctcattcagggcaaattaagaatcctttgcatgaattaagggacaggaatggaaagaggcaggaagtggtttgacccctgcctctttctgtcctcatctcactaatctccaagatgatcttgtgctctaggaatatacctgggattctctgtagctcccgtgacctcacacatagtgttcccttgtctgaaacaccattgcccactctatcagtcctttcaagattttgctctgataccacctctgcctggaatactcctctgactgttattgtctctgcttcctccattttaggccatttgttgaactgggctgcatttccttgagagcaatggtaattctttatatttctgtatcttcaaatcaaaaataggtgtgcaagtgatatttgttgagcaaataaatgccaaataataaattgtatagataagacattgtgggagttgagataaaaattctagccaggtagggatgggagcatggagggttcaaggaatggtgacatttaagattggccttcaatttgggtagtattgggtgggacagtgcagaggagacccctatagtcatggttattgtgccatgttctgcaggactgaaggatattgaataggcccattccctgctcaataccatcaccaccagagtagaataaggatggtaatctcaggagtccctttgggctagtgtctatcattttctcctgagctgggttatataactcggcagagctttattgccccagtacacagctggcatggcaggcaggcactccgatccttgcttgtgagctgccttggaggaagcgagtgcagaatggttgcctgcgttttcatctttacttctccttcacagccgcctttctgtatagcatagaggtgacctcagcaccagagacaggaaagaacacaatgagtcatctcaggccctaatgaggtgcataagggaccctacttaagagtgagggtcaggtgaggtcatgctatgcctggggtgagttttgcctcggggctccaggcggcactggagcagagctgagctaattttacccacaggagctgactgtgctgaagggcagggcttatgacattggccttatcatcctgtgatacccagaaagctcccaaggtgcaaccccgttatgtctgggctgttttcccctcttctagttaaatacatttttccattaggcgtgcatatcgaaaagcaggatgctgaggtgcaaagagctttggatttgggtggaaggccacggagttggatttggatctcgcccctacctttgaccttgcacaagttacataattcgagtctcagtttcctcatttgtaaaacctcattcgtatacctgtgtcctaagattgcttctaggtttacacacttggtgaaacgtagcaagcgattgctatgtgccagtcactgttctagctgctttattcatattgtttcacttaatcctctaaagaaacctatgaggatggtgttattgttatccctgtttataaatagggaaacaaatgcacaaggagcttagataagttgccccaggccaccagccagtgacagagctgaattcaggccagtggctccaggcaccacactcctaaacaatataccttattgttttgaaatgatagaaactttccttgctatatagcacaggcttaatgttttctaactacctgctgtgtataagggcctgggcttgatgctgggtaagagagcagcatagctgttgtgctgttctgtagacttgaatcacatttgtagatggaagcccttggtcagctgaagggtatggtggatagactttggtatctgacattgtaggcactgggtggagtgctcctcacacgacctctcatctcatcctcataacttcttcaatagtcaggcattggcatgcccattttacagatgaggtaatagagaggtagcatcacctcctcacatttacttggtagacagagcgactggggctgttgggtcccatgtttatgttgattcatttgcattccccatgaactgtgcagtgtctcagagctattattgttgcagaactcacccctgcccttctgcccaccactgacaaccctagagaaactggtgtccatgaaaaacgtgggtcaccagatgagaaagtcacatctgcatggtcagagcaggcaccaggtgaaggtaaaagaaagggctgggctttgttccaattgtttattactgtgtagcaaattacccccaaactcagtggtatacaacaatcgtttagtatgctcatggattatgtggatcaggaacttggacagagcaaagggggaatgacgcttctgtgctccacaatgcctgggatctcagctggaagactcgaaggctgggtgctagagggatatggttgctcactcactcacatgacatctgagacgttaaccaggcctgttggtcagaatatctacatgtggtctttccatgtggcctggacttcctcacagcctggtggctgcttccaaagggcaagccttgagaggaagggagagagggagaaagagagcgagtgagcattagcaggtgcaggaagaagctgtagatgcatcatctcgctatactttattggtcggagtagtccccaactcgcttagattcaaggggagaggcaatagactttacatcttggtggggtggccaagttctggaagagcatgtgggacggaaaatttgctggagcctttgttggaaaatacaacggaggctccttttggccaaaaaggaggaacagacgtctctgtggagctgcacggaggtagagccacagggtatgcagcaggcgcacctgtatggtgctgagtattcactggcaaatcaggaaaacaaaggtcaagccaggaatcctaaggaaaggatcagtagttacgctataaccatgcttcattgtatatgaattagcgtttatattgtccataaactagtttgtgtaactctgatttgctgattacatcgactgcttatgtaaccctggagttctaggtctattttggatttttttttttttctgtgagatggggttttcctgttgcctacctaggctggagttcaatggcgtgatcttggctcactgcaacctccccctcccaggttcaagacattctcctgcctcagcctcccgagtagctgggactataggtgcacaccaccatgcccagctaacttttgtatttttagtagagacggggtttcaccatgttggccaggctggtctcgaactcctgacctcaggtgatcctcccaaagtgctgggattacagccttgagccaccgcgcctggccctatttggcttcttatactaaactgagatattttttgttccttcacagaggcaagggagaagcttttagatatagacagacataggtctcagccaaataaataaagaatgagtgatcggttaatttatctatttttttttccctcctgcatctaacaaagttcaggaaagacattctgtataatttaacaggaaagagatgctaacaaagttattgaaaagactggagctactgggtttaagaatttttttttttttttttttctgagacggagtttcactcttgttgcccaggctggagtgcagtggtgcgatcgcggctcaccgcaacctctgcctcccaggttcaagagattctcctgtctcagcctcccgagtaactgtgattacaggcacatgccaccatgccccactaatttttgtatttttagtggagacggggtttcatcatattggtcaggctggttagccacaatccagggataaggaagatgtgattaggaagccactgctgaggcctcagaaacttttctcaacatcttaatagttagtgatggggcactggattggcctatggagtgtccttttgcccttcatgattccctggtattgcttgccagtagaaatagtagcaggaagattcagcttcacttccaccttccagatcacacacaaggaaatcttactggcggaacctaatttactagctttgaggaagtatggggaatgtaatttttaagtcggcttctgtgatgcagaaaggcactctagctggtggaaatagtctgattgagccagccaagagaatatatctacccccaacttatccatttaaaatccccaggagttattattctgaaatacttaatgtttataagtaattataacactgtaatataattacactatgaaattatgtttaatatttgtttatttatgtaaaatatataaacttaatataattaataccctgaaaaaacaggccagttgcccacgttcagtttctgaactgagttcttatttttgacgacagcagttgatttgcaattttccagttcagtttaatctcctcctgggagtcataccctaggacagttgtcttgtttacaaaatttcttcacaaacatttattaaacacttactatggacctgtccctgagctggatttggcaatgtggggagagagaagtcaaggattcttccactgggagccaatactgggaaggagaataaatcaggcacacagttagaacagggcaaggaagatgttgatcaatgccctacacagcaggctcagcaaatccagggaagagagattattctgactgggctgagaagtagagagttttatatagtctgtgatccggtgattctcttttgggggtagtaccatctcattatggggcatttaaaaatgtgacggatgccaggcgtggtggctcatgcctgtaatcccagcactctgggcggctaaggcgggcggatcacttgaggtcaggagttcgagaccagcctggccaacgtggcaaaaccccatctctactaaaaatacaaaaattagccaggagtggtggcgcatgcctgtaatcccagctatttgggaggctgaggcaggagagtggcctgaacccaagaagtggaagttgcagtgaggtgagatcataccactgcactccagcctgggtgacagagtgagattccatctcaataagacaaaatagcagcataatggggtgtcttctgttgtcccaacgactggagatcaggctgccattggcatttagtggttggggccagggaagttagacgtcctttaatacatgaagacaccacagataaaaaactgtctttctccaaagggtcatctcattcctgttgaagactacgagtgtgcttgatgatgtgtaggacgtggatatttggtgttgggagtggaaggatagcaggtcaagcagaggggacaaggtgagccaagagtttagtttaaataaagcaaagaatatgtgttgagtggcaatgggagaaagtttatggtggcaatagaagcttcggtcccggttgtggagaaactagagctactagataaagcacttggacttcccctgttgccattgggaagccatttcagatattggagcaggtccttgagagcagaaacgtagcctcgtcttggcaccatgcatcatgtaaacatcagtaatgctttttgaatgaatgaatgcctcaaactgtagtttacaggtgttagactagtgggtacctgagttttgccagatttaggatcctgtggttctgggagggccctggcagccagcatttggacttttagagaatacatggaaagggcacagtggcgtgccacacagatactgtctccacattgtggtcaggcagcagcagtacttgctgacaccgaagagagatgtgaaaaagagagattcttgcatggactcctgtgtgaggcccataagccatgaggcatgtagggagcagactgtgtcgtctgcatcaatgctcttgcatcttgagcttttaaaaaattgccattcaaaccagcaatttgctgacaaggttcacgcgctatgaccatgactgcagttgatcctggggagtggcttgcttgtctgcctggggatggcagccgcgtgcgttccctgtgctgtcctgtagggttgtggtggctttctgatattcaggttggtcccttttccttctttttggatgggctttcgaggttgggagaggaagctcagggatggaactgactaaacatatgtgagatgtttccttgtttgctgctcatggaggtttcatttctgaagtcttttcttgggagggaaaaggatgtgtggatatatgaggtgactctagaaccctcattttatggatgaagaaactgtgattcacagagggagagtgatttgtccagtgtcacgtggggagctggccggggagccagacctcctgtaccttttattgcagggtttattttatatatatttgctggcaaaaagaaggaaagagaaacaatttatatgttttttatttataataaaaatatttattataattatataataattaaattatagtaaaaatatttatttataatataaatataaaatgtatattatattataattatatataattatattgtaattaaattatatataattttatatattatatattatatatattaaattataatacagcatattgtaatacaatatattttatattaatatagtatagtaaaatatataatatataatataatttcattataataaaatataataaaaatatttaaaaatgtattttatatttacatatatatttaaatatatacatatatttatataaatatatattaatatttatatattaatatatatttttataaatatatatataatataaatataaatatatatttatataaatatatataaatatatatatttttaaatatatatatatttttaaatatatataaatatatatatttaaatatatataaatatatatttaaatatatatatatttttaaatatatataaatatatatttaaatatatatatatttaaatatatataaatatatatttaaatatatatacatatcaaatatgtatatatattttttctcttttttgtagagagaagatctcgctatgttgcccaggctggtctcaaactcctaggctcaagcaatccttctgccttggcctcccaaagtgctgggattacaggcatgagcccctggccttatagcagggtttaaattacacccactttgggggaagagagagtggtgtgtgcaggctttggtgccaaaggcttgcacatggttactggctcagccacttactataaaatttgtaaaataggcaccatggacacatctgatattaagcatttaaaaagaggagctgtgtgaaaagttttgttgactacaaagagctacagacatcttcctttttatcttgatgtggatgtttatgcactgggaattggtggggccatctttagagaaggggtgggccagtgaagacactactgaccataccccaatcagaaaacactcccaaggggctcacttccccactgtgcagtaaagaggttttgcactgagatttggaggtacagcacaaggcggggaaagcatgagccaagttttgagtcctgtggaattgagggtgcactcctgcctggggccaggggttcttgtagcaatataaagggagacgtggctaaaaacatagattgggctcatcctggaggccttgagtctggcctgagggtgagtggatgctatcgtttgtgttgtttagagcactggtgaggagtcaactgggaaaatctcaatgaaatgcatctttaggatgtgccgggaatcttggcagtaactcaggagggcaacagggaatcttgcaattggagtagcggggggtgattctcaagttttggacacattctaagtaactttttgcagtgcttcaactttttacttgagtttataataacaatggcaatattttttatagttgtagagctatatgaaatatttttacacctgttggcttcattgttcatacaatatcttagtgagggggaaggtaggattgttttcgttcctgttttacagacaaggaaattgaggctcagagagcagatgggatttctctggccgcttggctggttgatgtggaagtcaggagtgaggatgccaagtttcacacttcttcctgtgccaatgacctggaggagtgtttttctcaaactcacatttctttatcctccacagtcttgggtgtcactcttggaagtgtaagatggtcatgagtttcaaagatttctgagataagctgttaagattttcaaagatgagctatagagaatttgggacataaaatgtgtttcttccagtaactcttgcttgctatcatgttgttggttcaaattgaacatgttgataagtgccagggaggaaagaaaccagtacctgctacttattgggcaccttttttgccctgaactcagtactgcctgcttttccatttgagtatctagaaacatttatggatggagtgattgtaatattgtacaattctgtcaactagtttattagctaattctcataaaagccttaggaggtagataaacaatattattttccattttacagatgagaaaactgaggtttagagagatgaaataacttgcttataacttgcttgagagaacacaggtcctaaatagattataatctttttttttttttttttttttttggcagagtcttgctctgtcatccaggctggagtgcaatggtgcaatcttggctcactgcaacctccgccccaccaggttcaagcgattctcctgcttcagcctcccaagtagctgggattacaggtgcacaccaccacacccagctaatttttgtatttttagtagagacggggtttcaccgtgttggccaggctggtcttgaactcctgacctcaagtgatctgcctgcctcggcctcccaaagtgctgggattacaggcctgagccactgcacccagctgtaagtagagtataatgtaagttttctaatttgagacttctttcttccttgctgcaccccatctacgccatgtgttgcccatcccactggtgaaaatgcagagctgcttgttaaggaggtacatgtcagaccttggaatttactggaatcagacctggaaggtactatgaagagctcagaaggctggtggttttcaagctgttctcttctgagcctgagagactccaggagtcatcttgagggatatagcacggagggaggtgaaaagtggtgggaagtggaggaaggaaggggaccgctagagccaacctgagtcgctctgctttttcctattttgtaagctaaacattgtcaaagcatccatttaaaggaaaagttctgctgctacatataaaagttaaaaaaccactgtgtctacccttccttttgctaacactgagaggcagagtggttcagcacaaggggacacaaagtggcttagcacgagtcacgagatgtgacgggtctgagacctctcagcctagagctcccttacccctgggccactttgttagacacacctcctttaattcaaatccccgtctcagtgggacatggctttttcattttttcaaggaaaggtttaatctgtccagatccctgtgaagatcttggctcttggcgcacctgctggaggttcgaggtcctgcaaccacagagtagctgcaggaccttcaggatgtcccgagccacaaggtctttgacctgcattttgcaacctggttgtgtctcccctttggactctgggaaccttgctgagattggtacaatatctgtgctaaaaaggtttgaaattatagctagtattgtgttaccttcctggtccaaccttcacagacattgtctgactaagtatatataactcttgagtgttcactgtgtacaccggctcacaagaaaggcaaggttcctgatcccaaggatctaatggagagacagaaacaaatataaacttttgtcaactatttcagagacagttatttttgttatacaagattgttatgcatgctagttatgtggagaggatttcatctcttagaaatgagacggggagaatctgggcgatgagaaagaagaccagaactggggagtacagtctagaattgcaaggggttgagtttgctatgtgaagcagttagttttggactgttgcacttactatttctgagatttgagcatctgacttttcctttaagcttttgttttctcatttgtaatatgggagtgagagtgcctagttcacagggtcattgctggggttaaatgagataatgtatgtaacctgcttagtataatacctagcacagagtaaacactcattaaattttcattgttatcgttgttatgatttggcagcgaggagtcaaaagagcctattttcttaaactcatcaatggtataatcagagctttgcatctcgaagtaaaggaacactctgcttttattatttatttatttttcactctgcttttagacatagaattcaattgcctcaggctacaacaaactggcttcaatctacctttctgagttaacttctgtttatttctatccatctgcccacttctctcactagtgacctacacattttcttttttttttttttcttttcttttttttttttttcttgaggtggactcttgccctgttgtccaggcttgagtgcagtggcataatcttagctgactgcaacctcttcctgccgggttcgagccattctcctgcctcagccccctgaatagctgggattacaggcacacaccaccacgcctgtttagtttttgtatttttagtagagatggggtttcaccaggttggccatgctggtcttgaactcctgacctcaggtgatccgcctgcctcggcctcccaaagtgctgggattacaggtgtgagccaccgtgctccacccacattttctaagcttgattttaacttgctggtctttgtcatatcttctcagtcattgctggggttcaaatctttcttttctttttcttcttttttttttttttttttaaagatgggaatctcactatgtttcccaggctggtcttgaactcctgggctcaagtaatactgccttggcctcctgagtagctgggaccatagacatatgccactgtgtctggcttaaatatttccttctgtcggaatgccctttgttccttcatctgtgcccccctgctccatcctcttttaattcctagcccaaaagtctaacccacccattgggagggattctgcagaactcatagagtttacaacatcttgtccttcaattgcagtcagtctctgtcttgaactggatttgtgagctccttgaagttgtttgtatctcacagctctttgctgtaacatccctggggattcaagcacgcacacatagtagatgctcacacatctatgcaataaattactttagtgtctttctcaaatgatcagcacaggaagcaaatgataaaatgcaaaccagaaaacagacctcactgggctctgtgcttgtcagccttgggaatggatttctggcgaagatccggcccctctacaaatgacagagatgacttggctcttttcaggaattgaagagaatcctgacaagtggcatgttgggaaaggcctgaaggaagccagaccagcttgctctcagagctccttgggtcccctgcggcccccaggtgatcttcagcaagacctggtatgtaaatgagcctcatctgctggctcagcctgctgcccactgctagggatgctagaattccagggtaagcttctgtgagccgggctgggaggtttagtgggttggagattactagctttttggtatctgcagcttgaaataccttgtgcccttgattaattcatgcttgggagcatcctcagtgctctctggaaaatagctccttactgtatgtttatttccccacgggcttatttcagagagactggagcctgtgtttctaacagcttctccaaggaaaacatcgcaggccacgtttccggaactgagaatctcagggggtctttgaaacgtccatctctattacctccttttggcccagcatttgcttttagctgaaaagggagattttgtcttgagccttcctgtagacatatgtgacttggagtttgaaaatctgacagctgctgctgagctttgaactgcaagagtgagcagcatatagacataaccccgtagaacatcaaatcattttcctttaattcccagagacttaatgtttctttgtcttgcgaatgacctcactgctttttgtatttgtaatggaatgcacagtcatttgtaagtaatcacacaataatcccttacacttttataatgccttacccttttccatagggctttcactctcattatctcatatgatccttataactgctctgagatataagcagagcgcctattttaatctccaattttcaggtgtagaaactgaggttcagaataaagttagccagagttaaaacagttagtatgtagcagaattggaaagggagtctacagaattggaactggagtctcctaaaccagtgtttcttttgctccttattgctggtgtgaccttgggaatatacttaacctctctgaacctcagtcttcctatcactaaattgggtataatactacctcctgggatagttgttggaagggattcaatgagactgggaaatcatttaataaaaggtagaacacactaataatgggaggcatcattgtacttactacatgggccttgacggcgaacagtgccatcagaactgtgaaagaaaataacattttttctctctttttagaaagacacaggttcagaatggtgttgtcagggatcacaagctcccagccccgtgattagcaaattgaccctgctgccctgtctgctggctgctttcttattctgagaattgtgttgacaagaccctcttttcctacagagctctctcttaatgttgcttggaatagccttgtgtcctggagacagttttaggtctggcaggatctgagaacaggagtggggatcttggaatgggatctgcatccctgagcttcatccacaaagggtgggaatgtggcttgggctgtggggtggaggtagatgaacagctggacttgcaggtctatcttctgttgtttctcaataaagtagacaagtccatctgatgggtgtttagtagggtatgacttgtgagtccacaaggccagcagtatatatgctgaatggactgcttagcagtaacacactggaaaaatccaaaaagaatggatttcaagttggcaaaaaatgcattagaagtcagcagtgtgatgtggtcaggagaacaaccagagtgactgtgggatgaggtcttggatagctttgtttctatatacagtcagccctctgtatccatggtttctgcatccatggattcaaccaaccaaggctcgaaaatattaaaaaaaaaaaaaatccaaccataaaaaaatacaaataaaaaaaccaatataatataacaactgttcacatagcatttgcattctcaggtattataagtaatctagagatgctttaaagtatacaggagatactacctcattttatataaaagacttgagcatctctggatttcggtatctcaggggtcctggaaccaattccccatggatactgagggaacgagtgtacatactcacctacaaaaattccaaaccagtgagacagacataggttgaaatatggtcctgagaggcagaacgtgaagcaagggatggaaggccggggaggaaccagatttcagttccgtgtaaggaagaactttctgatggaaagatggaatttgcagtggcaggagataatgatctttgcttcactggagacctcaggaataccaatggggcaggcactgggcttaatggcctttatggccacttctaattttgagatcacagagctaggaggatgagaggcacacatatattgaaggaactgaagggtctctctctatgtggatgtggaaactgatctccaaatgtttgcaagatggagggtacgtttaaaatatttcattctggttttcatattgatctctgtggctctccccttggtctttggtttttaaagcttaagaccattcccagaagctcttttccatggaataatctcctttctttgctggaatgctcctgttgggatgcaggaagggactctgagctcctgacagaatgaagaccacccctttttgctctccagacctaattttgacgtcccacgcccacccgctgaggagggttgcaatggcgagatctctgtcctgaattctggttctggcatgcagtggaaggccctctgattctgtttccttacctattttaatagtaacttatatttgtgttccttcattaaatgtacaataaataataaatgtttgcttacggcatgcttgttaagtataaaacaaataatcaaaatgaatgtgtaatgaccctttggatagaccaagtagaagctgcttttaggacacatgattggaccatttctagatatctgcctaatttgtaaatgaaaaatatgtaagctacacaaggagcactgactcgtctaaaatcttaacgactgactgatttgggcttggggtttggggcttgggtccttcatgccctgatcagagctgtttatagcttgaagacttcctgggggtgagaacaagcaacctcttggtgcagtccaaagccaggaaatgggtgacgattttgaaaaaggactcatctgacctccagaaagcctttacaaccaacagtagaacgagatcactaagaaacagaaccaccgggaagccaagatgtggtacttggattcccatctcggagcacctcctatatcccgacacaccatttcccctagtgtctgatctctctttctcctcctttaattcagtctggagtcattttagatcagattcattcctgattggcttcactgctccaacttagtcatcacagaaccttagggttggaatccatgttacaagttaaactgagcaattcacccccacttttcctgacaacagtgttctcttgagagtctggttttattctgagtcttccagcccggtgtctgtgcccatgaaggactcatgccaaattacattctcaggaggactcccagaccaagagactctgggcttgggcgtgagagacttggggctgttctttttctttttttttttttgagaagaagtttcactcttattgcccaggctgacatggagtttcactcttattgcccaggctggagtgcaatggcacagtcatggctcactgcaacctccgcctcccgggttcaagtgatactcctgcctcagcctcccaagtagctgggattacaggcacacaccaccatgcctggctaatttttgtatttttagtagagaccagttttcaccatgttggccaggctggtcttgaactcctgacctcaggtgatcctcccgccttggtctcccaaagtgctgggattacaggtgtgagccactgtgcccggccgagaggagttgttttgagactcacctgccatcataggaaccatagcttaaattcttgtgaccttttcaggtgcatctcccaaaatatctcccctccaccaaattaatgatttatttcataaatttagttgcattctggatggtctcattcttaagatgagcttaaagcctttcagaccagtcacttccttgtttggggtggaggaggttttttcctggaataggacagtgtatggaagggttgagaatccacttctttagcggttaataatttactccgagtaaggaattctttgttaaagtggggcatgttcttcaagtgccagagaagagagaagggtgatttttctgacatcctccagcctgcttctccatatttggaaatgtttacccaccaggctgatctattggaagagagggaggtgactcagggtttaggagaagcaggatttgaattcttgtttccagaaacaaagtcgtccccccaccctgcccccacccttcccccttcattcctctgtcccttgttctggaagctgaggcgagaatgtctcagttctgttcccttcaggcttcgagaccaccgccttgctgtgtcccgtagtggactgagggcctgcaagagggagtgagggctagtggagggccagctgcctgtgggggctggacatcgtgtgagtacatcattactgccatttctgctcacagacctggggcttacagcctgtgggctggctcacttgcatggtgatgggacacgttgctgggagtgctggtcacttttatttgggggtgtggacagctgctttcccaggggagtacttcttacagtgggatttcaagacaagatcggcctgaagaaaaattatatttgtatattttttaaaaagtaggtatttcctctcatctgaggcctaacttgagttgggtagaaagacaatttgggagtgctgttgtctgatgattaaggctaaagcaacaagctggaagggatgtcgggatgtctgtggacatgtagggaggggtagttttagcttgaaaacagttatggtgggatttaagagtatgcaaaatgttgatgtgtagcatttgcacagcatccacggtctggaataccttgtgtgcaggtcactgtgtagatttgatgagttgtcagagttggaagagtcctgcagagttttcagcacatctgtctaatttcacagtgtgagataatgggcagcagagacccaggccctgaagacagatggctcattatgtgggattagaacccagatcttctctctcagttcgttctccttcccctagacttaagctgccccctctattgcgagatgaggaaattgggagatgttagaactgtccacacttactaatctagttggtgggaaattgaggactagaacctacttctagttcagacctcttcccgttaggatatatgggctcagatgcctagatttgttgtttttgtatgaggctcttttcttttctttttgttctttgatttttacttacctttcccttcttttgttcatgtgaatgtcgtatgaatgcaaccttctgctctcctttgctccctatatctttctctttcacgaaaggggatgatcacttgtccaaaaggcagaatgaatagtgtggaacttcctttctatccatggaagtgaaaattatgcaattttccctgagagaaattcagcaaggcttcccatctgagcctctaccactattcttgaagctgtaagaattctggaatattatgcccattcaaaggtgagtcctgattctgattagattttaaacacacacacacacacacacacacacacacacacacacactttttaagcctaccaaagcaggatagagacccagaagacaccgacctattacgtcacctcagatgtttcacagccatcaggagtaactctttgtagtcagctcagtttcagatcaacttttttttttttctttctttcttttttagacagagtcttgctctatcgcccaggctggctggagtgcaatggcgcgatctcggctcactgcaacctccgcctcctgggttcaagcgattctcctgcctcagcctcctgagtaactgggattacaggcatgcaccactaggcctggctaatttttgtatttttagtagagacagggtttcaccacgttggccaggctggtctcaaactcctgacctcaggtgatctgcctgccttggcctcccaaagtgctgggattacaggcatgagctgctgcacctggcctcggatcaacttgagggccttattttccagtgcagggaagatggtagaaatatgttttggggaagcattttattaccagtggcattaggtggcagatgtaatagagcagaggaagtgctctgagacctatgtttgttctggccagttttaaagagaggggaagcgactctctaatctgctttgaagcaagtgggaggagggaagttgcacaggactcccaggaacctgtacacaatctgtctccttctgtgaccagctgaggctgggtggtgactgtaagccctgttcatgagacaggaggagagagccttgaagaaggaaagcctggggtgtttttctgtggtgctgagggacagggacagtaagaggttggagtaaataataccagtatgaatactaatactctgaataaggacagctgacaagcattggttgcttaatgggtgccaagcacagggctaaacactttacctaaattattgtggcactatagctgcctttgagtaggaactattttttaaaatattatttttaattttggtgtaatacatataaaatttgccatcttgatggtttttaagagtacagttcaagcctgggcatggtggctcacgcctgtaatcccagcactttgagaggccgaggtgggcagatcacttgagcccaggaattcaagtccagcttggccaacgtgatgaatccccacctctactaaaaatacaaacattagctgggcctggttgcatgcacctgtggtcccagctactcagaaggtggggatgggaggattgcttgaatccagggagtggaggttgcagtgagccaagattgccccactgcactttaacctggatgacagatcgagaccctgtctcagaaaaagaaaaaaaaaaaagagtacagttcagcagtgttaaatacattcatattgctgtgtaatcagtctccaggcctctttcatcttgcaatctgaaactttgtacctataagcaacagctacccattttcctctcctccagcccctggcatcctccattctactttctttctctatgaatgtgactactctaggttctgtatctaagtggaatcataccgtatttgtctttttgtgactggcttatttcactaagcgtagtgtccttaaggttcatccatgttgtagcatgggtcagaatttctcctttttaagggtgaattatattctgtggtaatgaatataccacattttgtctatccatttaggtactattttttaacctccatgttatagaagaacagcaaccagagacttcaaagggttaattaagtaagtggcccaaagtcacatagtcagtagtggagactaattttacctaagaatggcatgtgatcaggagtaagcagatattggattctaattggcaagagtgtgacaaatcagggtgcttctcaactggatggtgacacctccttacaccttgctatggcatttcaataaagcaagtgttccaaagggctgtacgcagctatgcttcctttcttttgtattgggctctaggaagcccatagctaaatttaaagctcacctctagcaaatggtatgagacatccagctcttattttttgtatccctttctcctttctttgctttattttctcctctccttacccactttctcacttaaatcatgaactattagcatcttttgtcaggtacctcagatcatttctggaacaaggcagaatatatagatatgtggcatgatatctaatattttagtaattattaagtctgtggaatagtaggccaaaactggccatgatttttctgacttgactctgctcgtcttcttcttcttccttttttttttttttttttgatggagtctcactctcttgcctagactggagtgcagggcgtgatcttggctcactgcaacctctgcttcatgggttcaagccattctcctgcctcagcctcccgagtagctaggactacaggcacttgccactacaccccactaatttttgtatttttagtagagacggggtttcaccatgttgaccaggctggttttcaactcctgacctcaggtgatctgcctgcttcagcctcccaaagtgatgggattacaggcatgagccaccacaccccacctaactctgctcataatgcaatgtttcatctgggcaatgccctgcccctttctgagtctcacttttctcacctgaaagaggaggttactgttgatgacagtgaacatttaggctgtgctgagttttacactaagcatcctgtctctaactctcccaacactcccacaaggcaggtgctattatccccattttacttttgagaaaattaaggcctaaagaagtgagaaagcttgtccaaaccgctatagctcttgggcaaaggcattagtgaccaatgtgtatttgactccaaagcccaggatgttagccacagtgcagggctactatccttttatacaatctgtcaggcttcttccatccgtggcatgtattcatctaattttattaaatctttattgagtttccacttaggtgccttgcactgttctgggcattatcccagtactcgatttagagcaaagagtaagacacacacaacaacgatctcttggtgcttacacgctgctgcaggtgtgtgaaggaggcagataaaggaacacttaaacaagagggactgataagtaacccaagggaggagtcacaaagggcattctgactgtgagtgagtggggaaggactctgggaggttatgtttaagctgagatctgagtgacaaggaggccaccttgtagaagttgggggaagagcactgcaggcagtggagacggtcaatgcaaaggtcaaggctgtgaagtgggaaggagtttgtgtttgaggaacagaaggagactgatgtgctggcaggatgtgggctgcaggggaagaagcaggagaaaagaatagggtctagcaggtggtggtaagtgagagacctgagcttcttagacctgagtccagatgtgatgggttatgtgttacaggcatctttccagctgctgtggagggaacctgatagtaaaagggagtcaagggtagaagcaagaaggttaggctagacttttaccgtaattcaggtgtgatgtggtggtaactttgactagggcatagaagttgggcaggagaggtaagtttggggcatgtttgggagtgatcgtctataggatctcaagtgtgatttccttcagagaaatgctgagctaaatgggcaggaatctgggatactcagagggaaatgaaaataggtgccctagggggttgcccagataagcagctggcgttccaagaccaaagagtatctgtttctcacccctctcccatttagtttctaaccttgagctttgggccagtgcacagaggatggtggcttcctgcctttggcttcccagctgagagctgttggaacgccccaaaataagccctgcagaacgtgcagcttcctttgctctccctgggtatttttgtaaaacattctttcccaccaagaatgaggaacgttcagagtgatgctgactttatgggctgtatttaacatgttgttttttcatggtgttgtctgttcatgcagagatttctgtctcctgtaaactccctggtaaggaatcttcaatctccatgtgagatgggtctggaaggctcagtgggagcccagaagagctggggtttgaaagcctctccttgtcttgaggactggactgcggtccaagggcacctaccagccctcttttttcatttacatttgaattcacagttgctgccctttggcagttccctgtaattccttttaacaggctgggctttcctgcagatacttcatttttcaggtcttggagaagttaggtagtggctgaatcaggtagagaatccaaaattctgaccaagccccatcctctagccaccaggccaaagcaacttagcttgtgacctcatcctcctgtgtatcccctggcaatcttatactataatcagcctaagcccagagatgctcagaaatcatacactaagtcatctaaaactcatttctgaggctttctcatgcgcccctcttgcagtctgtagttaccaggttttcaaataattagcataatctcttaaaaacagtgttttgttattgctcattcaagtttcttctaaaatttcttttatattacctattcattgagttgacaaacatttattgagttcttactgtatgccaggcattgtgctaggtgctggggattgattcaaagataatttggaggcgtatggaaggggagtggataattacagcacagtgagataagtgctataatagggggatatataaagagccagaaatagcactatgaataacatctttgaacaaattgccttcttttttccttttggattattcccttatgtatattgcccaaagtgggattactgggtcatttaaaagatgaaaacaatttggcacaaaaagatgtaatgacttgcctggggaatacagctcaattttcaacagagaaagaaaaaattgttgacaaatccagatttagatcactttaccaggaagatggggcagtttttatactaccctttcaacatggtggcttttaggggcggggtgggggggatttattctaaacatgttagcctgcgtgtaggaatcacacgtcctcatatttaatctcacaacttgattgttctcacaagaacctagctgtatacatattatcgtttccattttacaaatgaagaaactgcacccttgataaaaggaagtaagttgctcaaaattccatagttaataagtgtagaatccaagggtcaagcacagttccttttattctttgactctatcctgttccccatgctgtgtttaccaattgagggtacctgtgctctagccggggcccggaatttaatatttaatgagtcacggaggctcttaagatgatggtcaggctctatgaaataggtgtagattttcttacctctgaagtcatagccagggaacaatgtctttctgtatattgacctgaaaggacccaagggcgcattattcctgaccctggctcaggtgctgaaaggctatttgcatagccctactgttagagcacagaatcccaagtaaagctgaaaccatgccacagttttgctgtgaaacatttattacttttctagtacttaacagtattaagtaaaaactcctgcccctggtatccaggacctgtcataaatggacaccaacatcggtccactgtgggtccatgtgggtccttgatgctcctgcttacatatctttaaatcaaacacatttcctaccaacccccagatatatcttgcactttctcaccttcatgccttagcacatgcctttcctttagcctgagataacctctccaatcttcattcatagaactcccaatcctcctgtaaacttctgcacagacgccatcttgggaagggaataatccttgatcaccacctgctctcccatccattagaagtgatctctgtgttctctgttctgctaactcaaccacagttagctgtgaggcaatagagtacaaatgtatgctgcatatgagcatgggatatggatttgaatcccggctgtgatacttcctcactgtcagttaacttgcttgagcctgagttttcccatctgccagatgggtgtgatacaataggtgctccccctgaaacccaccatgttgacaggagtagtataaaaatggtctgattctcccggtgaggtcacgtaaatctggaatcgtcaacaattttcctttcctttgttgtcatgacttttttttatgacatcacctcatgtcatgtcaccgtgtggtatgaaaatttgcattgttacctgtgcttcttctgtggcacttgtcctcccttacttgatgtcttatctctccttctagactgggagctcttcaagggcagggagggcattgcatctttgaaggccttgacatatggatactgctacaaagtttcctttaagggaaaggaggattccatacaacctaagtggtgacatcagcacaggctcattactaatctcatgtcacgaggtttcaggcctggctgagaactctgtgagctctgtgatgttgagcttcaggcacatagagtacaagctgggtaggcctctggctcctgcttaagagacagcagaaaggctggatggagcctgtctccagaccagcttcttctgattcaaggagttgggtgggactggcagttcactgaaggcagagtggtagtcctgcttggaacgtgaaactttgtttctttcctgggccttccagtgggtctgttatgttggtgagagtttcagacctagaggaaagggtcactgaaggtatgggttaagagcaactctgaaagccacctgccccccgacttctctgtgagtggggccacagggagaagatcccttcataggtagctcccctacccttgctatgcttggaaactgaccatggaaagggattcatttcttaaagggatagggctaccatttaactttctattgtgtcacttcccgaaacgcaacacctatggcttaagatccaagtgctttagaacatgagatacaaggtcttccaggctctggctgccacatccctttccaggcgtgtgtcccaccacattcctctgcatcctctgtcactggcctcaccagattagtcactttctctgagaacaccctgaactcatccttctcaaggcctttgcacattgtgttccctgagcctatttttctcctcctcatccgtggaaatcctcttgggtgttcaggcatcgtttagaagtcacatcatctgcagagaacttttagaccctcaaaaggacgttgcatgtactcgtgcttttctacacttttcattctgtcttttgtgttccagtgtgtcccccattgaggctcttcgacacccctaggcatgtccaactcagcacctacacctgctaggtccacacactgtgttatccaagacagaaggtgttagcaaacctctctttggtgcgcccctgaatgcagaacatgtgacattctgttaactaacagttgtgccagagtggtttccatagcccatactggggttcccatgatttgtttgatcatgagcccggccattcgaattgtttttgaattggtctgatatcagctagttaattgttaacccttttcaggtttgtttcccacataccagtagatgtctgcttagtgccagggttctgagctttttatttcacttaagaatataatagcaaggtagaattcaggaaagatttacttgctgttaatgtgaacttttaaaaaaatagtttgaaatgtaggctttgtttttatcccaaagctccatgaaatatgaaaatagcaggagttttaaaggtatatttccacctctagaggaagaactgtccatattatagttgtaattataaattaataaagcctgtgtcatgaaacttgattttgaacgcctgtgttcaaatcctggctttaccacttactagcctagagatattggatgagtgtctaacttctccgttcctcagtttcttcagtgttcaattgggaaatttttcttatggttgatggaaagtttaaataaggtcttggatatgaaactgggattttattagtgtgtgtgtttcaaaatgtggatttggaggccatttaaaaatagcatttccaaaaagtttgcttttaaagcaaagtacttagatatataaatttttatgaattttttttcaaatgataaaataaatgagtttacagtcaggagacatacagtatctaacaaacttagggaatatgcttggcttacaagacgtggttttagtccacataaattagaatcacagaactataggctttgagaaattataaaagccttggaaggggtgaacgtgaattagtgcatattgtgtgcaggctttgtgccatacgtgctagatatgggatcccaggaaatggttgcatacaccttgttgggtagatgatattaaccctgttttgcagacagagaaacctgagctttgagaaaatcctttacacaagtccaatatcaaagtctggaacttcaaactgcactcctgatggcttctagaaatcctttccatttacagatatgacaagacttgctttcacattgttgattttttttttatcctctctttctctgtctctgggggcagcactaattcagggccagatagaactgtgaaaatctgcagtgttgatgtcacataacttgtttaatgaatctagattagtgtcttgacttttcctgccaagaatctgctcataaagtgtcttgttttgagctcctttaactgtactcattcatcagcctttacttattttcttctcttttggagagatacttgccattgcccataatgtttgaggtcaggagtatatttgaagagggctttatattttcttaaaaaaaatacaggtggaaaatcaagtttatcagctatttcataccatcttcttctgccatttatgggcaacatgtggaagaggtggcagggagctgggagtttggaataatgtgtctcatcttgaatttgtcgctgaccagggaaaatactcaaggccaactccatcattcccttttgggaattcggtgcttcagctgtaaagagtgagggcactactaggtgattcctaagatttaaaattctgcatgttttgtggtgtcaaaaccatcaatttctggtgagctgcgtgatcctgcagctgtttctctgatacttttcaatctttagatttaatctattcaacaatgtataattttttaaagggaagcttttatagatacttctgaactataaccgggtgggggggataaatggatgttaaaaaatagaaaacaaccaattaaatagtatatagcatgtaattctccttggaaacttaccacgaaattgagaagcactttaacaactggtaatttaaattgcgtttgaactctgctaatggtttgtttgcatgggaacttcaatcatttcacagtggttctttagcaaagctgcttgttctctttatggaaaataagaaaaaattattaaaagagaagttggctatggaaaatggagaccactttcatttgtgcctggagggaagctggagagtgtgagtgagactccctcagggccaagggtggagagctcttcctttcagtgaagtttaaaaatctgggaagtcagatgccctttgctgctgttgtagaaactgttgtgatttgtatctctctctgcaaggagaagctttggttttatgcagcttgcgggtgagggtagggacaacctttttcgtttgttttatgaaattgcattgttcacaggtctaatgttggcttcctaacaacccatttctcagtaagtttgaaattatgcctctctctcctttcagtggaaatggctttcagaattccaatgtccttgaagaccactaggtctcaggaaactccttgcttttctgggctgatagtgattatactccattttgcctacttaatttctgtctgctgttgaggttactgggagagcgttgaaataggtgttcgaggcctggatttgtaagtcctggtttggctctaggtgtgactcatgtgaccaagcacaagtccctctgcccagtgtgttttgttgtcctttgtcaaagcaagcagtcacttgatccagtggatcaagtggctcctgaagaggtcacctccttacccaggccaccgggttctcttgtcagttggaaaagttgaggtgggtcatttaaaaaatccctcccaactttgaacttggaattgttttgtacacaaaacaattgtatgattggctaggtaatgtttacagtgacaacaatgaaatgggcatggtagtttctcgtatgtggatttctcctgcatacatgaaagacaagttttataacagcccttgccttgggatacttgtctgttggcatacatactgtgtaatcattagcaaaacaataatagttgctaatgaaataaaacctgtaataagggctgtattaggctattctagcattgccataaagaaatagctgaggctcggtaatctataagaaagaaggtgtaattgggtcatggttctgcagtctgtataagcatggcactggcatctgcttggcttctgggaagacctcagggagcttttactcatggctgaaggcaaaggaggagcaggtgtctcagatggcaaaagcaggagcaagagagggagtaggcagaggagttgccacacacttttaaatgaccagatatcatgagaacacactcgtgatcgtgaggacagcaccaagaggatggtgctaaaccattcatgagaaatccgcccccatcatccaatcacctctgcaggccccacctccaacagcaggtattacaactcaacatgaaattcagaggggacacatatccaaatgatatcaaggacggcttactgggaaatgtcaagattgtttatccctctgctgctcactgattctcacttttcaggcaaggaaactaaagttcaaagaacattaggtcctatagttagaaatttgtctccaaactcatattccttttctttttttatttggtatagtttaggtttatctgttaatttttttcttccctacaatttgagtatctaactgacttgcctctttcacctccattattaagatgaagctgttttcccaggagaactaggagagctgagatatgaacactgaggcatcagcattctctttccccatcattctgagtcaaattagtgaaataagagtgccaggatctgactaggagtttaggaggtatagaagtaaaccacggcccagtcagagactttataagcctgggaatttctgaagctggttaagaccctagagatacataagcaacacccttctgtttttcataggtgggaactttgaggctcagagacagagcagaagacagaacctggtcttctgattccctgtgttctgcttttttcattgttccactggacgctcatcagagggaagatctttttcctcaattggtgagtcccgcacacaaaaagaacacatttgccttttaaaatcaatgtatatgttttaatgagttttaaacatcagtgttttccacttaaagtatgggcatcagtaactaggatgcattaagaataagagaagaactgaaatgcccttccttctttcttgagttgcttttatggcaatagacaatatataaccatgctaataaaatgtgtggcaaagcaaaggcagagctcagctcttggaaggtggtagcattgaacttggaggaaaatttggagtaacgatgatttcaggttgccagcaattgtattgcctccttctttctcatttggcatggaagaaagtgttcatgaaatggaaagaccaaaatgaaaatgtcactgaacagtgtttgggcatttacaaggaaagaaagcagtattattgagtgtctcttgtttgcccttgtgcaaagtgctgcttcttttgtgatctcatttcattttatgtatttatttttttgagatggagtcttgctctgttgcccattctggggtgcagtggtgccatcttggctcactgcaacctccacctcccaggttcaagcgattctcctgcctcagcctcccgagcagctgggactacaggcacataccaccatgcctggctaatttttgtattttcagtagagatggggtttcaccatgatggccaggctggtcttgaactcctgacctcaggtaatccacccgcctcagcctcccaaattgctgggattataggtgtgagccactgcgcccagcctcattttatttctataacaaccctttggggcagagcaggctaaatttgcttaggcaaagggtgtgagcctttgttttaaagggcctgccagagctccaccaggatgtgaggtgcaaatcctgttatgtgctcagaaaggagaattgtgaccaggtaaggtaaactttcccttgtgttttggtgtacctctgtacttaatgggtagagtagaacattatgttctaaaaaatcggggtggtaaaaagaatcaacagtgtggaataccctgggctctaaggaaagctgaggaaattagtaagggaattctgggtgcgacttccacttaggatcctgattcgatggtccccattggctgaggccaattcatatatgcccccagcattggctttgtactgagtaattaatacaccttgacatatttgtggtgtagttttccaaaacagagatgatgccattgtgattgaaaaaaaactaacttcatttaaaagtgtgactgagtttatagatgtgttttgtctctctgtcttttcttaatcagtgtatcttaaaagtacaactgactgtgtgcctattgatctatattacataaaaggctggaaaccactggtttgatgcttaaaccttagtgtctgttaaaatttcaaacatgatctggaatatattccccctagcatacgtttaagtatcaaatgaaaaatctttgtcacctcctctatgtcttgagttttttcagtgtttataattaaactgtgataagtatgaagctttgcacttggacttaaaaaaatcaagtgtgtaatgatagaaagggagagatttccttaacaagagcagactggaagagacttttatttatttattttatttttattttttatttatttattattatttatactttaagttttagggtacctgtgcacaatgtgcaggttagttacatatgtatacatgtgccatgctggtgtgctgcacccactaactcgtcatctagcattaggtatatctcctaatgctatccctcccccctccccccaccccacaacagtccccaaagtgtgatgttccccttcctgtgtccatgtgttctcattgttcagttcccacctatgagcagactggaagagtcttagaagtttttgttgttcataagctaaatatgagccaacagtggcttttgttgggagtggcttccgaaatgctgatgcagccttcacctgcgtttaatagagtatggcatctagaacaaagtgagtgggtgattctgcaaacctagaacacctggaaactggcaagtgcagaggtcatgtgagcctcaggcacagtttgaacaggactctagctctgtttttctgcagcacttcttgctctgcccttttttgtgcctgggcttcatccttggaatgttttacctcatgggccatgagacggctgcctgctgaaacccaaactatagatatccctgttcccatttaggggaaagagcctggtttgctatattctcataggcttggctgactgtatatttctgaaccagtcattgaagccaagagaatgggattatggtaatatgaaccactattctcctgaaactgaatttggacatagtcccatccaaacctcatggtactcacacagtggagaagaggtggccccgcaaaggaatatctgggtgctgttaggagagggagagaggactggaagctccgtgggcaaccacaggccttctgcagacctctttagcccccctgtcagagaccctctagagagccgggctttagttcctgcctcaccttctgaaaaggcatcagccagctgcactgtctacacgaggatgctgagaggaccaggaatgatggccaaccaagaagtgttacgggaatgagaccatggattctgctgcaagattctgggacacacgtgctcatggccatcaagaacatagaacctgggcaggacagggacagcattgcttgttcatgtgtgtgtctccagagtctgctggggtctctggcatgggataggtgctgcatgaattttcatggatagaataaatctgaaggaagtgagggtccctttcccaaagggtgttctatcgggcattggctgactctctgttagggagtataggaattgtagcacagatgaagccagactacgtgatttaatgagaatgaaacaaatgactggacaagctgggcatcgtggctcacatctgtaatccctgtgctttgggaggccatggcaggaagatcgattgaggccaggattttgagaccagcctgggcaatgtggcaagaccctgtctctacaactaaacaaacaaaatcccaaatgactggacagaaagaggcttttgacttaagaagtttgtgagggcataaaaaggcagtgagtatggtgggatgccctaacagaagtcctgacaagtatgagatgtgcaaccctagaaaaacaacatcccttcacccttatttttttgatctgagaattaggaacaataatcattgccctgcctacctctcatgtttgcttagagcaagtgcattgttaaatgccaacctgttttgtaaactataaagtgtggttcctgtatgatacattattacagttgtcttcttccttaaagactcatcttgaatataaagaaaaagacaatgtaagttcagtgcacagcatcgggaacattagacatgctcagcgtatgcccttcctgccaacattgtacctcttcctcctccgggttggatgggcactaactcgtcctcagtcctgcagctagatctgcaactttgcttaatgatgcaggttaaaattgaaatagaattatgtattattatttttcacattcatttttgcctgagacaggaggtggagggtggtaaattaagaaacccgggaagctcagtgcttgagagaacccatagaagctacagtctagcccatttggcttcttactttgttagattagataatcatacctgctgctccaggcgtgactagcccagtgggagtcaggaaggaaattatttccctctgttgataccggtttacaattgccgactgtcgccaagggctttcagttttaatatttcctctttggtcctcagaagtatcaggtattagtctctgccggaagcaaagcattggtcacttccgtcagaggtgaatgtcttggctgtctataattcctcagtcaggtgctttctgggcatgtgtgagcatttgctcagctagcttttattgcttgtatgttatttgcttcaaaaattacaagaggatttgtcgggtctgagcagtgacctatccagtcccctgaaactctatggttcttcgtgtaacccagggatgtcttgtaggaggtatgtttgctgtccacgaaagtaaaaagtagtgatatctctttctctcttttgcttccttcctcctaattccacattctcctatttcttggcttctggcacagtggagatacctctactctacattaggcatggccttaggggatccgaattctcaggtcttcctcaatgagttgctgtgtggtagacagcatctgaagtttgaatgggtagagagacctttgtagattgtggccaaatatttacacctggttcatagagtatgtgtttgctgccctgatctcagtgttggtctgggtgttagtgaacctcatgatctttaggaaactatgtgaattaggcttagtccctgaccctgagaagcttatagttagggaaaaagacaaacatataaaggagaaatacacattagaaacatattcttttttttttttgagatggagtctcattccgttgccaggccagagtgcggtggtgcgatcttggctcactgcaacctccgcctccaggattcaagagattctcttgcctcagctgcccgagtagctgggactacaggtgcgtgccgccacgcccagctaatttttgtatttttagtagagacggggtttcaccacattggccagaatggtcttgatctcctgacctcatgatccatccaccttggccctccaaagtgctgggattacaagaaacatattatttatggtacacatttattaatcaccagatatgtttcaggccttacgctgagtgcttgggaaattgagataaattatagtctcagatctcatggggcgtggatgaagagttgggagaaagaaaaaaataggccaggcgtagtggcttatgcctgtaatcccagcactttgggaggctgaggcaggcagatcacctgaggtcgggagttcaagaccagactgaccaaaatggagaagcctcatctctactagaaatacaaaattagccgggcatgcctctaatcccagctactcgggaggctgaggcaggagaattgcttgaacccaggaggcggaggttgcggtgagccgagatcgcaccattgcactccagcctgggcaacaacagcaaaactctgtctcaaaaaaaaaaaaaaagaaaaaaagcattgattaatattatctcacagtttctgaaatttgggagcagcttggatgggtgccacaagatctctcaccacatcgcagtccaggtgttgctggacctgcagtctcaccggaaggctgaactccggggaagatctacttgctaccaagcacatcgcatgatggttggcaggatttgtttccccacagattattggactgaggacttcagtttcttgccgtgtagggctctctatagggcagctcacatggcagctgccttccctcaaaatgagtgagcaagagagagtccctgagaggcaaatcacagtctttttataagttaatcctggaggtgacacactgttccctctgcctcattctctttacgagaagcgagtcactaggtccaggccacactgaaggggaggggtgaatatgagcacaaggttattaataccaggaggtggagttacacggaaccatcttaggggctgcttaccacagattccccaggtttacatggatgtgctaaggtggaagtggacgttgcctgaagcagttgaataaacccagcacacctctgtggatcaattttacttgaagacatttttgggggaaaactccatttaaaactcttaagagaagcactggtacataatagcacaggatgtaaagttggcatggcttttaagaagaaaaacacaagttttcaattcatgccgtgttcccttacctctgtatttttgccctcctcagcggtagagcttttttggtagaaatgtcgaaaggttcttgcttgagccccttgctgtatgcgtgagacaccgagacttggaaagggcacatactcttccagggccacagagccagcggtagtcaagggaggaaccatctgcagctcctctctgtgccccgccttccaccgctccacacagtctctgctgcataatgagtctgtgcaacttttaggatgttttctcttcttttctcaaactctctcctgtcccagaaacagattaggaaaaataggtcaaaaattggaatcttgagctttgattttgtccctttagttaaatttcaggggtctgcgtctcctggtgggccatgttgtgtcctgaaaagttgcataaatcaatattacacggctcagacagtgtatctctgcagttatgaataacatttgttttaggaacagagagctgatatacaacgttactttgagactgacaagaccagacataaaacctcagccaataccctctgtctggcagggagtttcttttccagagcatccttctcttcccccgaccaaagcagtccttttcaaaatcaagctccgcagtttattttatagaagatgacaggttcccttagagtccacattcacataactagaaaaattaatggaaattggagccttaaaattatggtcaagcttattagtgactttacagccaaaatgaggaacgcacagctttggtcactgagaatgtggctggccagaacgtgaattctactacctgctccatagtccctttcaactctcagcaattttttttaatactcatcttattcttttttttttgagatggagtctcactgttgcccaggatggagtgcaatggtacagctcactgcagcctctgcctccaaggttcaagcgattctcctgccttagcctcccaagtggctgggattacagatgcatgccatcacacccggctatttttttttttttttttttttttgtatttttagtagaggaggtttcaccatgttggttaggctggtcttgaactcttgacctcaagtgatccaccctccttggcctccaaaagtgctgggattacaggtgtgagctgccatgcctggctaactctgcttgttattaaagtgtttcttaccaattatttcatttttattaaaagtacatagtaggaaatagagttttagttggacaaggacaacatggtaaagaggaatttggagtaggaagactgtcacgttagtcactgaatcctacctagttcacttagttttttttagcctgttttcacttctgcaagccatggagtgaagagtgcctacttcagagtctttggtgctctcaaagcagcgtaatgtctataaagtacctattgagtgtggtacttcttatgtagttggcacacattaaatgttaagtttctgatcaccttaagagtccataactctttgctggagatcacccttagttcttttctttgttaggccattatctcatgtcctgtttacactgtccccttggattggcctagacctgcagcgtttgtgtattggtcaccccagatttcatgtttcctgaataattaatagcctcaacatttctaattttgcataatgactcccaaggcctaactacaaacatcataatgtgctcatgttttctgatacctggaaatatagtggctctaggaacaaaacctttatccactgtgtttcatggggaaggcttattgggcatcactactggaaagtaagtgttgattttaatggcaagactagtccaggggtgaattctactcaggtgccattagcaacctcttcatctgtaaatggaagtgtctctgggacctgctcagctctgacctgctttgggtcctttttggacttcttcaggatgagatcacctcaccgtggttcaatgccaactggtttgagttatatcagttattaaaaatgatctaatgttttccttttaaatctgaggccctggctcattctatgattaagccagtgatttatttataatatagtgtgagatggctgcagccactctatgatgtaatctaagaatgacatgaaaacaaaataggtttttacataatgaaagtattcctgtaatacagtttatagcaaggctttttccccccattgagaatggagatatattctttacttttccttctactcctgtttaaatcttcttttaccatttattacacttaaggcctttaagtcaatttttaaaaatcagcatttacaactccacaaagtctctggttactcttttaatcttgtcattttcttcgctcccaatccccactgccaccctccatggcctctgtgtgtagccgctgctcaccccctgctcagcactccagagtcctcaccattcctctgcttatgctgtttcttctgctggaatgctcaccccaatcctaacttttcttctgctaaaggcatacttcactggttcccacaaatagcatccttctgtagcctgctcaaatgcacatcttcctttaagcctcctgtgttgctccttccccttgttagaaacccgttatctgtactcttatggaacttagtgtaatagcaaacccccacccctgctccaagggctattcacagactgtcagagttagggaggagaaatgacttagaggaatggggtaaggggttttgatagttcccggtctgctcctaatagtgagacccgggcagtcagtcatggctcatctttgtggttcagtttttctcagctgaggaatgagtggtttggattttatttcacatggccaaatgatgtgttggtagtggttccttgaggtgctgtgctgagaaggactctgaggctgcatcctgactcagctaatgatcacttaggaatatcgccatgggagtggagagtgaaagcatatgagaggtatctgagctgcttttggactaggtgatttaaatgtctctttttgttctaccttctggatgctttgatttactgacttgtgaagtgtcttgcccaagatcacgtagcccattaagttttagaagctgattctctgacacagagatggttaaaagctacacatttgactctcacattcatacacgtaggctggctgtgggagatgaaaagctagaataagaagttctagaagatccatgacttattgaaaacacaagactactcaaactctgtatgtctttgaggttgagtgaggtcacttttcacctctttgtcttctttgcttcctaggagttatgatgtccccactattcaaatttatgtcaaagatggcagttcaaggtcaaggtcagaaaggcaggtgatcctgccagggtcttaattggatcagccttaccccatgaatccattagatctcctgttccccttcttccaactccagacaaaatgcttagctctctgcaaaaagcccaattgcatgagcagtaggtcagctcagcaaccaggtgattgaacactgggacaagaataaaggaaggaaaggaagagggcattttaggatggctgaaggtgctggaaacttgaaccctagaggaatgaagaaggaactggaagtgcttagtgtaaagaagaaataaaggggcaggaggaggagagagcagagcaggtggtgctgtcctgggtctctgctgtggaacgggtgcaaactcactttttgggacctctggaagagttctggcagcagtgggttggaagcaagagatagatagtgtgagaatgttgatgttttctcaatgtttatggaaaatgcttaatgttttaatattaagagcaaaccacagatggaatgtgtgtttcaggaggtcgaagttcacaatcactgcagatgtctaggtggggttgatgcagttaggtattttctattttaggtattttgtggtggggataaaatgttatacatgatgacttttaaggtcctccctgtcttaagagtctagagtttttttagacatgtttttgtgtacatttaaataatttccattttaaaatgaaggctctttggagtaaagtgattgttcctttctccataatcttggcacatgtaagtgctgacttaccttgggcaatctcttctccacttagcattattgaaggaaaggagactaactgaggatgtcttagaattttttgtactgaatgtatttttgaagatgatttgtacgtttcttttcagggtagttccagggaagtctcttctttaggcctcctccaaccaccatcccctattgtcaatgattggctgtttttgtactaccagaatgctttgtgtatacatccaataaagcattcatgccacttcagtctgctgtataagcctgttttcacaatctttcttctcctctagattgtagaagctccttgagggcatgaattatgtctttttccataggaagtcccatgtcatctagtataatagtttgcaaatagtaataatgatgactcattaactcgagcgtttactgaacacctactatttgctagacactattccaggtgatgggactagaacaaatgttaaaaaaaagacagaaaaattaatgagtaaatatgtaatatttacattgtgatctattaggttggtgcaaaagtaattgtgatttctgccattacttttaatggcaaaagccgcaattacatttacaccaacctaaatatattaagaagaaaaataattgaggttaaaggcatgaagagtagggaggacacaaatgtaaattcactggcctgagaaggtcttgatggtaagagtatatgtgaatggagacctgaatgaaacgaggtagcaagccagagatgtgtgggtgggatggactggaggaagagtgtgtagaactgactgaaagcaaatgcaaataacctgacctgaagcatgctggggacatgccggaaaagtgaagaggacagtgtggctagagtgaagtgtgtaaaagtggtcatgcatgccaaataaaaatagttgcaacaaccagtaagacatacatgagagatattgtgggttcagttgcagaccaccaccgcaataaaacaaatattgcagtgaagcgagtcacacaaaattattggttcccagtgcatatgaaatttatgtttacactatactgtagtctcttaagtgtgaaatagcattatgtctaaaaatacagtatacataccttaattaaaacttttattgctaaaatatgctagcaattatctgaactttcagtgagtcctgcttttgctgatggagggtcttgccatgatgctaatgactactgactgatcagagtggtggttggtgaaagttggggtggctgtggcaatttctgaaagtgagacaacaataaagtttgccacattgattgactctgcagagaaagagtgatatcaagctgtatcacttctctgtagcatgtgataatgcataatatcattttaccttcaagaaaacttctttcaaaattggagtcaggcctctcaaactttggatctgctttatccattaagtttatgaaatatttgatatacttttttttttgttgtcattcaacgatgctcacagcatcttcaccaggggtaatttccatctcaggaaaccattttctctgttcatccataagaagcccctccttatccattcaagtttaaacaaaggattacagcaacacagttgcatcttcattccacttctaattctagttctcttgctattttcaccacatcctcagttatttcctccactggtcttgaaccactcaaagtcacccatgaggattggaataaatttcttccaatctcctgttaatgctgatattttgaccttctcttatgaatcacaaatgttcttaatggcatctagaatggtgaatcctttttagaaagttttcaatttactttgtccgcattcatctgaggaatcattatctatggcagctagagccatatgaaatgtatttttttaaataatcagacttgaaagttgaaattactccttgatccatgggctgcagaatggatgttgtgttagcagacaagaaaacaacattaatctctttgtatatctccatcagagatcttgtgtgaccaggtatgagaagaaatattttgaaaggaatcttttttttttccctcttttctgagcagtaggtaacagtgggcttaaaatattctgtaaaccatgctggaaacagtgctttcatccaggctttgtcattccatttatagagcacaggcagagtagattcagcataattcttaaggaccctaagattttcagaatggtaaatgagcatttgcttcaacttaaagtcaccagccacattagcctctaacaagagagttaccctgtcctttgaagctttgaagccaggtattgatttcttttctctacttctgaaagtcctggatggcatcttctttcaatataagcctgtttcatctacaatgaaaatctgttgtttagtatttaccttcgtcagtgatcttagcttgatcttctggataacttgctgcagcttctccatcagcacttactgcttttccttgcacttttatgttatggagacctagtttttccttaaacctcaggaaccaatctctgctagcttcagatttttcttctgtagtttcctcacttctttttgccttcatagaattgaacagagttagggccttgctctggattaggctttgacttaaagggaattttgtggctggtttgatcttctatccagatcactccaactttcttcatctcagcaataaggttgtttcactttcttatcattcatgtgttcactggaatagcacttttaatttcctttatgaacttttttttttttggtatgcacatcttggctgtttggcacaagaggcctagcttttggcctctcttggcttttgacatgccttcctcactaaacttaaccatttctagcttttgattaaagtgagagatgtgctactcttcctttcacttgaacacttcgaaaccattgtagggttattaattggcctaatttcagtattagtgtgggagatgggagggtccaaggagagacgtgggaatggctggtcagtggagcagtcagaacacacctatttattgatcaagtttgccatctcatatggccatgatttgtgataccccaaaataattatgatagtcacatcgaatatcactgatcacagatcaccataatacatataataataatgaaaaagtttgaaacattgtgatagttaccaaaaggtgacacagagccatgaaatgagcacatgctgttggaaaaattgtacctaaagacttgcttgatacacagctgcctccacaaatcttctatttgtaaaaaacacagtatttgccaactacaataaagtgaagtgcaataaaacaagatatgcctttattagttaagtacacattgaagatgctcaggaaaaaataaattgcttttgtgattcaaagaatccacataaatctaacaaaagaatgacaaaacatatttctgtttttcagctctaagagatgggggcactggatcaggagcaggatggtagtggtgtgcagctttgaacaagtccagttgccgtggggtttccctccatggcagagggctctccactccgtttctctgcccctgcggcaggcacacctgcagggatgcctgggccctgggtgcagatgggcaatcgtaagcctaatcacccattcaggcacacacttacttgttttccacatgcaaatatggcctttttgcggatgaatttaatacagttgttgcttcctcattttatttaaaacaaaacaaatggccaaccatgtcagttgagggtagcaaatagaaacatgagtattatggtctttgctgtttgtgtcgattacacggctgaaaggaatcccaggcaaatcagtcttttctgtgctcaattttatttttactttatatcaccttttcttactatcgctattggttttaacaaaatttttaaagagggctatcacattcctttctcttaatcattttatcaatatttcaggctccttagttctattttgtggtttctacctttgacatttttagtttctgaacttggggcccattgttcaaagaaaggcattatggagtctccaaaagccattggcaggtggtgtctgtgacttccttagcctggaaataaacaaataaacaagcacaaattagaagtctttgccctattactgcactattagtattgattgcgcaacatcatgcaaaaagtcactttaatttatctggcaggtcctatgtaaacaccaatacagtcaagagggcttggatgggtatttgctttcatttctaatgaaatttcaggcctctagggtaggatatcaaaattggtagatcatttgcaatttattttatcccaaacacctcactttacagtcagagaaactgaggcccagagaagtaaaatgagttgctcaaggtctcagagagcaagaaatagagatgggacttgagcacctagatctctggtattgctgtcctgtagttcatggagctggcagatggatacatctgtgacctgggatgatggagagactgctggacccttcagaggatctcatctcaaggtggggtttatgtgtaaatgatatctgtgtgtttcattttcctttcataaactaatttaaaaatccttttggtatcaaattttaagccaaaaagtagtgagggggaacatgggtaggaatagcttacagcttgcctaacaaggttgttgactgcataagagtcaggagttttgggtaagagtgtgtgtgtgtgtgtgtgtgtgtgtgtgtgtgtgagagagagacagagagagaaagaggtaaagaggaacaaatgaagagggagaggtcagattgtttgacagtagcaacttcataggcacagaatttctgagttggaaggaagtcttatacgtactgaatttgactgctttattttgtagggaaggaaactgatgtgcctagagtagttgagagctttattcaaactcattccactgttattgagtagttaggatattagaccagcaacatatttgggtagaaactttcatataaaaaagcgtaatcataactatccaatcatgtcaactagtaaggctgctcaggtgggataacacatcaaccttctttgggattcttccctcagacatggttttggtgggaggagcatggcaagggaggggcgagctccaaatgcagggctgctctgtcctcggcgacctgagcagacacacgagcagagatcagagacactcttagtgaatgaacctccctattggctatattaaagtaatgctctgaaaaagttccgtgtggagagcaaggccagttagggaacattttgtggatcttttatatgtccttaactatatgattcttttatttttaaatgaaaaatgttaagatgttacggggtatgtatgcatagtctaaagtgatgattttagaggtagcaagacagtgagaatgtccctacatgtgaaatgggcacagttttatcagggaagtgtcaatagagggttaatgttccacgtagtggctgcaagaatgataagtggtcatggggatagcctgacactctaggagcagaaggtggtgggtatggatagaactactgatatagcatgaatccaacctgctgttatctgcgcaggcctctctgcagctgtttgccctgaagtacatgctgtacgtttctccagctgatcctgcatgactgggtataaacgcctgtccgctgtgtgctggacagccccagacaccctcggcagcctgctgtgtttgtgtgagacatgctgtgttagggatttaagcatctccctactcgttcctcatctttttctcttctcttccttctaatctcctttcatctttccctttgggggagaaaaagtcatcagagttgtttgaaggttcatttatgttgatttgtttttattttgaagctaatttgtttcctgcttgtatctgtaactgatgtacttcatgtgagaccgtgttataatatacttgagttctccttggccctctgatttcttttctttttttcttttactgaaaaataaaagatttccttctctcttcagacctacagctttctcatctacatggacaacctatttttaaagaatcttcagagagtcgttgactttgttataactactactatatacgtaatttcagatgatagaattgaaaatttaacttgtttttctagaaagagtttattttccctataacttcaaagagtaatggtggggagtaggacattctgaaaataagaagaaacatgtcaaatgaatttctgacttccagctaggcatatggaataaaggtctttattccagtgacctctgctcattggaaaactttgggctggtagatttcatgattctgacgctgtatgtcctcttgagttacagtgagtgatgaggccaaatcgcagggtggatgatgtgctttttttgggctaataggtgttaaggaggcatgctgtcctttggcgttaagacagatcatttcctcagttgggtaatgtttaaggaatccactaaatccttaaatatatggcacacataaggaatgcagagcttttagacactcagccttaacatgggttattttttagcatggctaatggctaaacttgatttctactgggtttgttcaacctatttctaacttataggtaaaagcctgctttttatcctctccatcctcatcacctttttagttgtgtctctgcttgattcttcttgcattcaggtctatattgtattataaaaagaaagagagagacagagagagagagagagaaggaaaagaagaaggaaaaaaaaaccacacacattgaatgggaaggcaggagagtagagctctgaccccagctctgtcatagccacctgtgtgactatttgcaagcattttcatccattcaacaaatacacaccaggtactggagatacaaaactgtgaaagacacggttcttaccctcaccacttacagtcaggagtagagagttaggtacacaaatagaatgtgaaatcacttctcctttctgggtcttcattttacaaatgcaagagccagaactgggccaggtgatcatcaaggtcccttctgaggctaacatgccatcattcatgcaaaattcattaaacatctgataatcacttacctaagtgaaaattagcaaacatttcccctttctccttagtttgtaggggatgatattgaagacgaatgaggcgatgtctacaaaatgctttaataagcaagttggagaaagagattatgtaagtttgaggcattatgattaatgaaaaatgaaaacaagggctgatgttttcagagagagaacagatggttcctttgttcagaatttgagtataaaaaagagaggaagaaaagatacttgctatattgtttaggccctgaatgtgagtaactttaaaatgccaaaacaatctggttaggaaagtcccatagattcaaaatagctcttacagtgatcaaactataattaatataacaaaaaaaagacagaaaaatactaataagaaatgccacagtgacagctgacacaacctgacaaaaactcctatttttacaacaactctagaaacttgattttttctgttctcaggagttataccacactgtaaaacaaactagtgagaaccgatttaaaactgtttctaccgttccccctacccctcaggttattttagtttcccatgactcataaaggaaatcttcaggattcacaagaaattggcaattcttttccatctttgctgttgagtattgataggaaaacagcatagtttggggcaatttaagtagagaacaaacctccgggggcttggggtggtgtctcagaaggccggatctgggaagggcctttgaaaagcttgcacggaaagctgcgaaataaatcgtttctttttctctttctttacgttctaaaatctcgtgatctgtttctacaatacacaggctaattgatgttatccttttggcatgattcttgctgtcctggggtctatcacttgcaggctatgagaatgaggccatagaccaccacactggcagcactgagcaaaaggtgctagacccttctgagttcaggtgctgtgtaactggtgctgtgattggacagggtgactaacctcagtctctctgggtgtaatttcttcactgtggaaagaggaggctaactagaaagttcactctgacactaatctgagttcaggtccacatctttttttttaattaattattttatttttaaaatttttatttttttgagacagagtctcgctctgtcgcgcaggctggagagtagaggcacaatctctgctcaccacaacctccacttcccgggttcaagcgattctcctgcctcagcctcctgagtagcttacaggtgcccgtcaccacgcccggctaatttttgtatttttagtagaggtggggtttcaccgtgttgtgcaggctggtctcgaactcctggccttaagatatctgcctgcctcggcctgccaaagttctgggattatagaagtgagccactgcgcccagcgcacatacaattgtaggaaggctgagaatggcttttaatttgggagcgtttaaaagcaaacatgcttcctcaagacaacagtaacaaaaaattgacatcgttgaggtgggaacttctttaatgctacctgagcctcttgctgaaatggttctatgcagttttgcatagctaggagtggtaagctcattcacagacatggaagaggcagagtgggcttagggagaggcaccagtctagtggtccaacttgggttctgggttccagtcctgcttctgctactaaccccatgagaccttggaatgcccatctctaaggtttctttcagagctgaatcactgtttggtctgtgattcatcaaagcaattagaagactatgcctctccttcaagaccaagactttggtcagaatactccctagggactttctcactgtgtgtggcactcttctctattagacgctttattcattctccattgtattagagtcaaaagtatgattgtttgttgtagaggtgccttttccgtgtcatctctgataatctacccctctctctctgagtaacctaggcttttaaaacacatctcctttggcttaatcacactgcctggtgtctactcagcattatgtgtttgttgtctgccctgaactgtgaactcagccatgtcctgctcatttctgaagcctcagcatgtacatcggtatctggttcatggtagattttcaatgaatctgagtgaatgaatgatggatgaatgattttgtatctccttactaggcatatgttccttgagggcatggaccgtgtctaatgggtggctacctagtgtctcattcttggtccgttgttagtggtgatttttgtcctcttctttgcactcatcattctaggcttgtattagggtaaattgttagcataattctgccttgtttcccaccctgcccccgccttttttttcttttgaaacagagtcttgctctgtcacccaggctggagtgcagtgacacaatcttggctcactgcaacctctgcctcccgggttcaagcaattctcctgcctcagcctcccaagtagctgggattacaggcacccgccactacgcctgactaatttttgtatttttcatagagacagggtttcatcatgttggtcatgctggtctcgaacttctgacctcgtgatctgcctgcctcggcctcccaaagtgctgggattacaggcttgtttgcttttaaacagtttgtgggcagggatggtattttcttatgattctattcctcacagatcctggcccagagccattagcagagaaaattctcagtagatgtttgctgacctaaacttcattccaccacctttgccttccttttgccttttcacctcctcttagaaggtaccttatatgataatgtcacctatgcaataaagaccacaaagtaaatttaataaaatagaaggcatgcttccctcttttctaaccccacacttttttttttttaagatcaaaataacgttgcatttgtgtgtgccctgcttttatttatttatttcttttgtagacacgaggtctcactatgttgcccaggctctctccaactactgagctcggtgatcctcccacctcggccttccaaagtgctaagattataggtgtgagacaccacacccagcccagccctgctttcacaaaaaacaaaataatgatgaatatattgtactaccctcactgttttcatttgtctgtgaatgctttttattttatcaggaaaaggaaaaatttctgtttcttgactgtaattgttgaaatgtattttcaaagttttttactttatttttggactgataccataaaatcgtgtgaaatgatgtgaggattttctaatggagaaatgacttagaatatcccttggatgtcctatctgctttttaattgttttatcatcccagacatgtttctctattcctgtctattcttttatctgtaaaatgaggttattgaactagatgctgtctacaactttttttttttctttcattaacattaaatctctggtacctgagaacattgggatcaggctgatatgtctaggtgtctatttctttggtctacccttcaagtaggaatgaaaacccatagaatttctgtaattatcagcctcaataactttctaaagcctttaggaagcagataccctgcaatttatctcactaatttgtttgtgattaacactctctgccccttctcatatcccaagctcagtgttttgatatttaattacagggaattctttcctcttcatagatgatatagcaattgtatttcatttctcttatctgaaatctctgctgactttccatgtcttatgaatttaaatagtctaaatagggcatgagatcttaaatattccttccagtttctacattttctattcagcaacaacattttccctggaaaagggtgaaagcctgtgagtcccccacagggcaggagcactgaatacacccacattttcctaccatctgacatagatgagacacaaagtagggactcagatgattatttaactgaatcaactggattccttaattctcacaatattatccttcctaatttgtaaatagggaaatggaggcttagtcacacaaaatatcttgttcgaagttactaatcaattaagtaacttaataatttattgacatctgaggcatttctctctttctacagcctcagaccagaaatgatgggatttcagccttcttttcttagagattggtgagccaagacctggagagagaactctggttgtcttaagtcacccagatgaactattaatagaaaaagaattctactcagtcagtacttaaaagcttgacatgtttgtgtggagacctgtgtgtgactgagttcagatcactctaatttcctgggcctcacttgacccatctgtgaaatggggtaatgagctcttttcggcatgaaggcaaggaactgtccagaagacctctggagaattcttcttaccctgagatcaagggttctgtgagtagtacaactcacacccaaagtcttagttgcagggcactttagtgggaaaaaaaaaaaaacgctgaggctatttttagagccttcatctggttatagactagttggtaggagagcaatacctttgaaaagttaagaaatagttttatacactgtgttaaggatgttgtcaaaactaatacttgtgtatgcaaagactttaacatttattaataattttttctatagattggtgaaattggtttgtaatttttgtcatttcacttttgtggaaattgagcaaaagtgagagataaaatgatgtgatcaggctgggtgcgttggctcatgcctgtaatcccagcattttgggaggccaaggtgggcgcctgaggtctggagttcaagaccagcctggtcaacatggtgaaaccctgtttctactaaaaatacaaaaattagctgggcatggtggcacatgcctgtaatcctagctacttgggaggctgaagcaggagaatcgcttgaacttgggaggtggaggttgcagtgagacgagattgcgccattgcactccaggctgggcgacagagtgagactccatctcagaaaaaaaaaaaaaaaaagatgtgatcaatatcaatctaaggacactgtaaagcagcagaggattgacgattttcctaagacttagtggatgtagaagagtttaaaatattctagcctagtggtttgcaaacttggccacatattaaaatcttcagaggaactttatgctacaatgctcatctcagtcacagtgtctgtgggtgagacccaagctcagttacattttaaagctcccgagagtttagaactattgatctagtcttgatttcgtatcaatttctctgatggtatcttgcttgacatcttacttactgggctgcatttttgtgctgtgtctccctgacacccaagtgaaaactgctggatgaaccgaaaattcacccaaacaacgtgaatgtaatggaaactcttgaaaaggcttacaagccttgaagtaaatgttgggcgaagggagcgaaagggttagcgtttttttgcattgggacctgccttctttttatgcttctaggaacgtttaaaaatgagagcaaggaatatatttcattgctttaattgttcaaggtcttttaaaagcgtgtgcaataaaatgccttttaagataactgacctttgtattttaatgctttttggaagggaacaatacctagtgttcagctgcagtataactttatatatatatatatatatatatatatatacagtcagcagagcttgttttggaatcagagggctgagggttttgctgccttcccagatattttacctgtttctgtttcaacatcaagttccattcagttgatgtttcttgacctcataatgtctaacctttatatctttgttttttccctttccaaacttatccaagaaggagacttcaaggcctgattcattaatttttccttctgctgggaactcaggtgtgtggtggaaggcagcacatgtgacctaatctatattttgacaaagaagaaagctccctgccctcccttgcaccagttcgtttggtaatttttaatcccaaaagccactgctaatacgtttttaaaaattgatgctagctattacgttgttagataaagctcatcttccaactctaaacttgctctttctaaaagtgaaataacactcaggttgcaaacatagtgaactggaatttcagaggcttgaactgacctacaaaacttgtaactgtagctctagttatacatccactgtggtcttggacatgtgaggtgtttgtctaccctcaggagttttagaagaagaaattttatggaattgctttccatattaagaaattaaaatagccaggtgctattttaattttacagattcacaactgtaatcccagcacttgggaggccgagcagggaggatagcttgagtccaggagtttgagtggagtggtcaacacagccgagaccccacatctacaaaaaatttaaacattagctggcatggtgactcatgcctatagtctcagctactcaggaggctgaggtgggaggatcgattgggcctgggacatcaaggctgccgtgagctgagattctgccactgggtgactgggcctgggacgtcaaggctgccgtgagctgagattgtgccactgggcgacagagcaagagtgtctcgaaggaaggaaggaaggaaaggaaggagggagagaaagaaagaaaaaaggaaagaaaatatacaaaaatctttgtgtagctctgaaataaatatatatatatgtatgcagtgtatatattatatgaaataaaattgcttgtgcttaatttattttaaaatcatgtttgaaaatagagctaattctcagttactacattttcccctctcctctttctgatggtttttttcttaactttttattgtaaatgattttaaacttatttaaaaagttgcaaaataagcatagtccaatatagccatatacttttactcagattcgtctattgttaacattttatcccattggatttatcatcctcccccttcctccctcccttcctctctttctctgtctacacacacacacacacacacacacacacacacacacacacagtctcccccaccccatatatatatatatatattttttttttttccagaagtatttcagagtaggtcacttatatcattgcctctacccctaagtacagtgtgtatttcttaataataaaaaaaataaagatagtctcatcatattcacagtatggtaatcagcttctgtacatttgacactgattcaatacttcagtctactgtctgtacttctcctttgtcaggtggctcagttctgtccttgaagaaaactgctttttcccattcagtgtacagtccagcctaaggtcaggtagtgcatttagttgtcaagtctctttagtctcctttgatttggaacatttccacagcctttctttatcttttatggcattgacacttttgttctccccctttacaattatagtattcctcattttgtattagtcactggtttcttcatgttttgattcaattatgcattccctgaaggaatattacaaagataatgtgtccctctcagggatcacatctggagtcttatgtgtccatctctccgtcattggggatgttaattttgagcaactgatcaaggcattgtccagtttctccacagtataggtattctttcctttgcaattattaagctatccatggggagacactttattcttgctccttatcaaaatattaccctacattttttcctaaaccagcatttactatgattggtgcaaaattaggattccatgttactactctcttcacattcatcattcagcatcctgcgttctactgtatgcgggagccccttccttctcctccctccctcccgctctctctctctcttttcctctttcttttctttctttctctctttctttctttctttctttctttctttctttctttctttctttctttctttctttctttctgtctttctctttctttctttctctttctttctttctttttctttctttcttttctttttctctttctctctttcttttctttttctttcactctctctctctttctttcttctgtttcccctcccttccttcctcccttcccttcccttcccttcccttcccttcccttcccttcccttcccttcccttccctcccctcccctgccctccccccctgccctcccccccgccctccccccttccctccccttttctttctctctctttctctctctctgtctttttctttctttctctctctctttctctctctctctttctctctattttcctctttctttctttcttttggttatggtcttcaagatttctgtttcaatctttcataattcattcttgctatataattattttggccctcaaattatcccagatttggtcagtgggagctgcatcaagttggctcctgtgtccttgagacatgtccccatcatctttgttgttagcaattgattaattgctggaataaaaagatgttctagtttggtcttgtatattctctgtcccagccatgaagtcaagcatgtcttcattatgtcctcactctttttatgtggagaaagatgttagagaccaatatctgagtgctaggtgtgctcattgctactctggtgccttaacttatagcctctttcaatgactggagctaggaaattttatatataaaaatatatatgtaaacaaaacctacgtgtatatgtttatctgtaaatatatgggtgcatatacaaatatgtatacacaaatactactactattaatttgctaataccacttactacacaaaacaaatctgtgaaaaagagttgaggatttgcttatggtgctcctccttcaacttaaccctgcccaagactgagggtatattgtcaaacgctcttcagggattacctggattagttctttcttcatgtgtctttcccctatatcccaatggtcattatgttcatttaaaatacagttgggttcaaatgcttcagtttgctttgagttttagtttccctccttcccatcctagtttgtttaattttattttttgaatatgtaaaacattaacatgcttccagaagccaaaactaaaccaaaagaagtgccagtctctcagatatttgctccaccttgttattccccacacctcttggaggttttcttggttatctttctggtatttctttttaatcctgatatatatatatatatatatatatatatatatatatatatatatacacacacacacacacatatatcagattatagcgtcagattatctgtgctttccctcctctcagtaaaacctgtaatgccccttcttccccaaacatatatatatatatatatatatatatatatatatatgtttttatatttcctcttctttcttacacaaaagatagcatgttgtatatcttcttttgcactctgatttcgtaaattttttttctttttttttgcactccctctcttcttttcttcttctctccctccctccctttcccccttcttccgtttttttttcctctctctctctcctgctcaaccaatttcctatgcttggacagttggatagttttctgcaatgaataacattatgcatatgtatttccatatcattggatatatttttgggatatattcttagaaatgggtatgctgggttaagagtaaatattttatgaggtactttagttaccaaatttttctctgatggaatgtcccactagcattcccaactacagatgtctgtgaagcttatgaattgttgccaatttgatggatgagaagtggtatctcagtatagttttgatttgcacatgtcctattaggagtaaagttaagcatcttaatgtatttaatgtccatatgtattcattttgtgagttttttgtgagttacctgttcatgtcttttgcccattttaaaattttattttattttttttgggacagagtctctctctgttgcccaggctggagtgcagtggcacgatctcaactcactgcgatctccgcctcccaggttcaagtgattcccctgcctcaacctcccaagtagctgggattgcaggtgcatgtcaccataccaagctaattttttgtatttttcacggagatggggttttgccatgttggccaggctggtctcaaactcctaacctcaagtgatctgcccaccttggcctcccaaagtgctgtgattacaggcgtgagccactgtgctcagtcctttttttttttttttttaaattgggtttttggtctttttttctcaattagaaaggtcttcggaaattagatatattggcctttcatctatgaagtatattacacatatctctcccaatttgtttatcttttgactttgattacagtgttttattttcttttcagtcatataaaatttttatacttatagagacaaatttaagaatcatttcttttattgcttctggactttgttcgtagttagagagcatttcttaacacccgtgttatctgcatgttatcttccagtacctgtatagtttcatttttcacatttagatctttaattcatctgcagtttgtgtgtaacataatgaatggatctaattttacttttttccaaatggttatctgctgtctcaacaccatttagtatgaaaatatcttctcatacttcccgtgtgatttgagattggtggttactttttaacctacaccatgactaggtgtgaaggagaatgatggtaaacagtggaacagggtagttagaggaaaatgaggtcccaggtagataatgactgaaacccaataagaacatacatatttttgacttcaacacagagctctttaccttttacaagtcatcctctctggtccatttttgtcaaaaattaacgtatttaatagagaaggtgtttaaaacaaaaggagggtttagagattatctgtgctttccctcccctcagtaaaacctgtaatgccccttcttccccaaataaattatgagaatggggctgcataaattttctgtgagcatgtgtgactatgtttcctctggttcctcgccgcatggtaattactctgtgctctctcctgcaaactgcccatgtttcactgcttgtaggtcaaagctgtattgagtaagaagtgaatttgggaagttttgcaagtaaagtgctacctgagtcagtgactgtgtcttaattcacctttttgcttccaggttcttgctcagggccatctgtgcacatggttttcactcaataagtgcctcatgaattttaatgactacacattaaactaaaacaaggtctgcccacctattcttaagaaattaaactctacaaatgatgtattccaaaactgcaaaagagagtgaaagccaaaacagatgaagctgtccttatatgggcaggaaaaactcagtaagattttatcagttcagtaggtgttgcatatggtgatttggaactgtctgccagttccaagatggccttactttattgtatggtcagtacagtttgtatctagtcctcatcaggttaggcctggaactccccaacccctgttaaaaacagcaaatcagggtttctgtggtggaatggggaggaaactggcttgcattaattgatgtataaggtagcccatgataaactcaatgccacttttatacacatctgggagcaagagcttttggttaattggcttgcctatgtttttgctctgccttggatgctacagaaatggaattgtttgttagagtcgttgcatggtgaaggaaaaatcagagccaaggttttgaaggacctaagggagaacattctgtgttctgcaggcatcttcctccttgggacacaaacagctccctgcctaccacacacagtggataggattccttcaatgcctctcctcgggtgaaagatgtggcatgtggaactgaacgatcaaaatcactggggcaactgtatgggcgccctcctgcagtgtaacatcctaacaggacttttgacaggaatggatacctaaatatttacactcctggaggcctcgtctgtctcaaccatacttaccagtcaccacagtgtctcctttctctgtgtagtactggataaatacagataaattctacaccctgacttactcctacctcatgcaaggaagttataaaatgtttgagtagcttacttaagtattactcctgccatggcttcttgacatgccttgatggagctgtggaaagcatcttggttgcttcaacacaaggctgtgagttgtttcatagggcagggtactaactatagtttgctgaccttatccactgtgtggattcatcttgggaaaggagcagagaaggtactgagaataccacatctgctgaagactctgctggatgctttctccagacatctcatacagtcttttcaacacccactcaagatataggagctgttccatttcacagacgaggaaacggaggctcagagactttgcattagtctaccaggtcataaagctagtgttcacagaactgagactcaaaaccaggtctgtatacccatgaaattggtgcttttcctctatgcctgacacatgacacatcatatcaaggcatcaccttttcttgaatcttattcatagattctgggcaagcagcctcagcttggtcctatgaaacctttcctgacctcctccacacaccccctacacacactctgtgaacattgtaatggttagttgtatacacagttgtttccagtgctggactgtgagttcttctggatgtcttcctatagtgtttaattcatagctggcttttgatacgtatgtaatgaaaattctggttttctgcaccatactgtgtttccatgctgacactaaaaatctagacatgctttcttagaattaggcaacccatttacctttaaggatgcactgactttggtttttgccttaatatttggccaaaacctgctctttgagttcgacctctgctttgcctttaggagggtaaagtagccaaatacctacctcattaacattgtaggcaactctgaaattttgcaggataatcattgcattgatgcgaacatcacactggttaccgtcataccgtatcagcataaaaatgttggcaatgaatacgtatatttttcaaatttgttgttaataaccagatatgtacttttaaatatagtgagcattttacttataacttggaatggaaaaccttcttaaactactttgtacgctgagactccaccaactaattgaaatataaaggaatatattatattaagagtaagatgctacaatatttaatgatgactgtgaaagctaataatgtatgggttaaataattaagaactttcaaatagttaaacaagtagggaaattagttggtaattaatataaaaattagattaattaaaccttagttaatgaatattagctaattgaggttattaaatcttagttattacagtttgttagctagataactttgggttgaccaacacatcttttttcagctaacaagcatttataaaaatataaattgtaatctaagtattgttatagaactagattatacaataattataattgttactgggttgtttgtggaatgcatttatgacaccaaacagaatgaccattaagaaccatttttaacttttagttatttaattacacttaaggtcatcagtctttcaagaaaaagcctatttaagattttttttcacattttctgaagataaattaaaagtagagtgtctacactgtctctcaacatttcctgatcaggaaaacctcccaaattacgtatagcaacatcaatgataaatgatttttaacacagagaaatttcatgtgtattcttatatcacaaaaattcagacgatgataatgagagatttcagtctcagctttggcttactattgattttaacattcagtcatttggcacttggcccaagtgggtaatgggtgcatatctatcagtggctcttcatacatttgtgcagggaggtacacatgcatacgtgtgggtgtttcaaagtctaactggaataggcctctcacatttatctcctattaatttgcagattgtttccatggtcaccatccagaaatttcccagtaatccttgaggaagttagggagtgtgataccattagggagagggaatatgtggcatagagacgtgatgggcattagttgtctgaggttatgaggtcgtggtgaagcctgatcatgtgaccccatctccatactctatgtccagtgctccagatcccatagacctgaatcttagttctggtgctagaactgtccctgatgcacatatagtaagactttaatttccattttccctgtcttatgaaaagaagtgttgataagctcattaattagctttctgctcatagcttttttctgactgctaatgacttcttgaggatgggcaggctttgatgagctgtgtggtcctgggaaagccttggtgtcctcttttacctgcacagtgagggtgacggtcgtgttacctcctgaggccacctttcagctttgccattctgtcatttgacaaagactgaatagagaaaagacaagatttaacgacagttaaagtccaagccagtttgtatttgctgaaagacacaactgagggaaaggaactgacatgtagtttaaacagactggttttttgttgacatgggaagtgtgaataatacttcttcctggtttatgagatatgaaattggttgtctaccttatctgtttctcacttttgttctcagttcatagtttggtcatggaatgcaattttgaagacaacttcaagttgtttttttgctcagtaatcatagtagtatttactgttgttcactgggcacccagtctgtgtacacacatcattcctaatcttagaagaaaaacaacgtgcaagacatgtgttttctttcccactttgcaaataaggaactggggctcaaagagattaaaagacttacttaagttcaattagaaagtggcagagccaggattcaaatgttggtttgcctaactgcaaagcctatatccaccttccacccagtgctgctacagcattaaagcctgtaaattgaattccacacactcctactttcacctgtactattacagtgataagtaaaaccagcgctgagccctactaacaaggtgtccttgatttgtgtgctgatgctcatgacacttctgtgtggcatctgctgacaggcccacggggcccagatgttcccactacaaagagctcatcctggactccccaaccagggaaagagacctgaaaaggaactggtttgtgattagggattattgtgatacttgaagtgaatggtcagtcagttcttcccatttatttgagttcttacttcccttccctttgaacatttcagtcaaacttctaacagtgactttcaacactggctgcgcattaaaatcacttggggaggttttgttttgttttgttttgagacagcgtctccctctgtcatccaggctggaatgcagtggcatgattatggttcactgtagctgcaaccttctaggctcaatcaaccctcctacttcagccttgtgagtagctgggaatacagggacacgccactacgcctggctaattcgtatattttgtagagacagggtttcactatgttgcctaggctggtctcgaactcctgggcacaagtgattctcccaccttggcctcccaaagtgctggaatcatggagctttttgtttgtaagcatgtcagccctcaccttccagagatcttgatttgaatgggctaggttggggttctcgctattagcgcaaaaaaaagtaagtactgaagggattctaagattcgtctagagaagacgatcaccgcattagggggcagaaagtccacttttcattattttgttggtacagtatactttttttctgactctatgaaccctcaatcttatgatgttaccattccattgaagggtgggatttattcactgagaacatttatatttttttgagatgtcttaggctgtggagagggtgttacagggatggacacagatgctgaatttagtggccccagagaagaggaattaaccactttggattggattattgggagcaaccaaaagtcagtgctgtggcttttgctgtcttcccttgtaatctcttcccctcaccagattttcaacacagaaggggtgtattttctagttatggggtattcacaatcacatctaataattttactccagaacatactatggcttgtttatactagcttgaatatttgtagtctctttgatttttgtttgctaatttaatttactattgcatataaaagaatggcttccatggagataatcaccgtggctcccagagtgcatccagagacatttgccttgcttctgtggaaatacacccaaattccccagcatgacattgagtgttcaccccacacctgacaccagtctctcttgctctaattaaggccactctttaccattcttgggcaccagccagatgaactataccctggtgtgggatctgcccgatcctgctgagacattaactctgtcctgaagctgtttgtccttccagcagctagaaataatctttcctttcctagaacttccacactgcattgagcaggaacacttgtagaacttctcacattgtacctcaaggtattcttatttatgcatgtatataatttctccccttctactactgtaagcttctgcagggtggggcagcctcttcttaattttgatatctactgctgtgccaagaatattgtaggcatttcctaaattatttttcccccagtgtatgtgttactttgttcaattcagcagttgtccaaagctaatctcttgagctattggtagctttggtgaacatttggagaggactactgtgatggcgtaaaatccggtgacctagttacagaatatcccctgcaggctcactggtaaggaaggctcatgtttaaactcagtgaaaggagagcctggcttatttatggtggtggttgtttacatgtctttaaatgaccttcttttttttttaatataaaggcaatatattctcatagaaaattcagaaactgtaaacagggttaaagaagaaaataaaaatcaacactatcactttcacctatttattattcttattttatttatttatttatttatttttaaggcagagtctctttctgtcacccaggcagtggcacgatctcggctgactgcaacccctgcctcccaggttcaagcgattctcctgccttagcctcccaagtagctaggattacaggcatgcaccaccaccaagtccggctaatttttgtatttttggtagagacagggtttcaccatgttggccagactggtcttgaactcttgacctcaagtgatccgcctgccttggcctcacaaagtgctgggattagaggcgtgagccactgtgcctggccacttccacctattattaatgaaacctgtcctatttaacaaaaacgataatgtggggtgtcttgtgcttggagcttggagaaaggaatttgcctctgtttttttaatgacttatggcaaggccagtatgaccagtaagtgggctgtttattattattattattattaatcaccattgtcactgatagaaattgtcactattgtcactgatagaaaccaagatagaaattgtcactattgctatagccccaagaaggacctcatggctgcataacgattgagcaccttatatttacacaatgcttggttgttgttttttaaggcaactgtgactcaacaacagctgtttgagaacagctccatcccagatgaaatcagaggaaccgaagtttaaaaagaaagtgtttctgggctgggcgcggtggttcacgcctgtaatcccagcactttgggaggctgaggcgggcagatggtttgaggtcaggagtttgagagcagcctgaccaacttggtgaaaccctgtctctactaaaaatacaaaaaaattagcagggcgtggtggtgcatgcctgtagtcccagctactcaggaggctgagtcaggagaatcccgtagtcccagctactcaggaggctgtcaggagaatcccttgaacccgggaggcggaggttgcagtgagctgagatagtgtcactgcactccagcctgggccacagagcgagactccatgttaaaaaaagaaatgtttctgagcactaaagacaatttgaacaaggcagaaaagtacaaataggaaaacaataatcttactagattgtttgtttttgagacagcatctccctttgtcatccaggctggaatgcagcagcacgattatggctcactgtagctgcgaacttctgggctcaatcaaccctcccacctcagccttctaagtagctgggactattctgtagtgataatccttgttaaagttttggaaaataccttttttagagtctctctttctctctacacagacacacacacacacatacacacatgcaacttttatgtgaatgacggcatttacaatttacgtaaattactgcaggtgctatcatttatttttttcactcagcaatatgccttgaaaaaattttaagtcaatcaacatacagatatttgtcatcttttaaatagctatagattttcgctcagactcaaagtctaatttttaaagaagtgactgttatatttaaatcatatatagcttcatgatgaaaaaaggaaaaacaattcttgggaccggacatggtggctcatgcctgtaattccagcagtttgggagaccaaggtaggagaattgcttgaggtcaaaggtttgagaccagcctgggcaacacagtgagaccctgtctctccaaaaaaaaaaaaaatatatattagctagatgtggtggcacatatctgtagtcctacccactcaggaggctgaggaggtgggaggatcgcttgaacccaggagtttaaggctgcagtgagctagaacggtgccattgcacttcagcttgggtcacagagtgcaactctgtctataaaacaaagacaaaagcaccacagttcgttagatataactgaatattatcttcatttcctactgtagtggttcttagaaaggttgtttcttaagttagaaactgttgcctaagtatttaggatgtggcaggcactgtgctacatgctggggttgacgaatgcatgggattcggctctctcccaggctggtgggaagaggacacatctagaagccagggtatataccccgaaggggtttgaggcagtgcagagttgatgatgatggtctccagcctgcctttcctttacaaaaatgaggagactgcatctcacattgccaacgagctgcttgactctaccgatattccctaccaagcacgattatgggtagtcttaaaattcttaataataaaatagatattgaaaatagtgtttttttttttaacagtgaaagtaatatgtactcatgtataggttttcaatatacaggaaactataaaatgaaaaggattgtacctgtaatcccaccccttacagctaactactgtgacattttatttgtagaagtccattttgctatcagacctcaagttttaaaatcttaactcaccctctgtaacctagttctcagctctattttatgtaacgtttttaaaggattcaagatttaaaataaacttatctcaccccaaatgcacttgtatatttttgacaccccctcatctctctctctctcttgtctctctctcttctctgtctctcactctatctcagttctctttctcctcttctttctctctctcctctctcctctctctgtctttctctctctgtctcacacacacacacggggaaaaaaaatcactcgagttaagaatcagtctctcattttacagataggaaaactgaaatctagaacttgtctgaaatcatgttaaaaaaaaaaaagtggtaatctgtgctcgaacccaggtctcctgaattttcgttcagtgctttttccattctacagtgatgcctccttactaggtcatagaaacagtggcagagggagaaaaggaaaaatacgtcagctccaaagagtgcagtttttttttttctgtgtcctttagctgagctatttttgtgactattcagtacatgtacaatgctgcctcttggagtgttccggctagactaagaggccattcactgctgactgcagccatgccatccctccatggaatcctcggcccggaaatcagatgggaacaaactattccaatatacaaatcaaatttcagagtctgagtgtacacagaaaaattactggatatcctgttggactatgtacataacaatgacacagtgatttatgagggtatgatggggcagagggtagcgggtgatgttggagttgattcatcacttaagcgctaatccattcaccagctccagtcagacttcaacacaaatgccaaattattcatcttccctaaatccaaccctattattttctctctcaaaaccttcagttgcttccttttgcatatggaagagagcgtggactcctccatctggcatttaaggctttctatgatctgtcctcccagacattgataggctgtggagatacagtaaggtagttgttatgagccacaccttgcagccaggctgctccagcaccaagcaacactttccccgggaggttgctgcacctccctgctcctcactttcctcatttgtggaataggaatagggtcattgtgagaattaaataagttaatatttgtaaagggtttaacagtgactagctcataatccgtcacgtagaaagttttttcttagctcatttaataagtacctttctaacccatcactgatagcatttttcttttgcaccagacttctttctagtcattgctgggagcgtcctctcattttcctgcctccctgtagctgtcactctcactcctaaactgttggcgttctcattttggcttgcccaaatcttacgcattcttttaagtccatgttcaagtgaatcctcactgattttgttcttcattcatccccttaacagacttttatggagggtctactgtgtgcaaggtgtattatgtaggaagccttccacagttcccagagctaggtgagctctgtcatgtaggcctgtcttgtacatatcaccttcgacattgctgagcagtttgtgttggacatgtttgatctcctcccctagaatataaacagctggagagtaggatgcttattagtaggtgcttattaagctttctttaaaatgagtaagtgcacatgctaccttttatagatctgttaccttctaatgaaggcaagaacaataggaacaaacattagttttgtgtgtgtgtgtgagagagagagagacagagagggagagagaaagagagagagagattttgaatgggaataattatgaggccacatctgagggcaaataaccacttccaagttgaagaaaggcaaggagaagacaggaatgagaggagagctgtagcagtcaaaggaaacgggatgagaatatgttattctctgaatcataaagcatttgctctgagaaatgtttttccttaagtggtataaaatgtaaaatgaattgggtcttagtttttcttttcctctttaggaggttggagctgatttttaaaatgaggtaggggagggaggtggggtttggagaaagaaagtgaaaattgttttctgaaactctgtttgtcaaataactctctggagagaaagttcagagggtgagggcctgccaaagctgaccagcagcacacaggccaaatcgttctttcgtcattgtcctggtcacttccccacccctgttcgccacccccaaacaccttttttcttctctctctctctctctgtgtgtgtctctctctctttcttttctttccttttttttctttttataacatatgaatattataagtaagtagctggagaaaataaaaaagcaaaacaaaacacaaagtaagcagatgatttcaacctgcaattatttgtcaggtcataaaaatgatgtgtcttagatttatttacctgatctcctcatctgttttccactggaagccttctgctcgcgtcacccttcttcatttagttccccaaacttccacccactttctgactcaaagcaggagagaagcattgaacaaaaccactggatttggagaagagagaaaagcagcttttaagaactgactttagaggtttagcacgaattaaattcctggtcttttctttctgcagatttttcagctattgttgttgtttgttttgttttgttttgttttatgtttcttgagtttatcgctaaagatgcttttccgtggatggcacaaaagttcagctatggccatgtgcttactgaaggcctgtatatggaggcatcacagtggctggccttgaagaaattaagatagtgaaagaggacccctgtctgcgaagaaagagctcatgtttgtgtgtgtgctcatgctttgggtgctacaaggagactggtgtctggggaagggaggaagggtgatggttacaggtataggtaaataagttttccaacagttaacaatacttggagacaagctacagagtgatcaatgctagagttaggaacgctgtgagaaggcaaggtgttctgtttgtgccattggggagggctttgctgtggggattgggggaaggatattgttttaggctttgctagatggctaggactttaacaaataagaaagaaagagctgagtctttaagacagagggaatagcagagacatgaaaatatctagagagattgggagtgggaggctgagtctggaggtgagatatctgtatccaatcagagaagtttcctatgccttcctgtaatgttggaggcttcttttttttttggtaatcagtaaggagctgtcatgggctttgtaaaagggctgtgataggattactctggtgtgtgtgtgtgtgtgtgtgtgtgtgtgtgtgtatgtgttttgcttttactttatacatttcagagtctttttaggaactcttaggcaaccttaactctggggagtgtgcattgcctgtctttatatgtctttacttctctgttgctgcctggttctgctccttctcatgcttctgtaacaaagtgcggcaatgcaggcttctagaaggtgatgtgagatctctgagcagaccatgtgtgtgttcttcccatccttttttcccctccctttctcttcctcctcctctttctatatcaccaccctcaccagcagcagcagcagcactcccctccctaaaataaataaaccagtcactccaaaggttccaagcacattagtcacatatcccagaagtttaatacagaattattttgacagcgagaacaagaagtgttttctagttgaacgcacagaacttgcttattccaactgggctttctgccgcacagacagatgatacgttttttagatggattggccgcacagcgcaggagactgtcgcttcccttggatacacagcaaactgctcactaccaaaagtggctggggagaagatgtgaaaggagagagagagagcgcgagagagacagaagagaagaggagaggggaggggaggggaggagaggagagacggggaagacagagagagagagagagagagaaaggaaatcaagttcttattatgtacataactttctcattaatggcttccataagtcactgagagatttctttgtgtttatttatttatttggctgctttggagccatgagtccttttttaaacccgggtttatgtctgttctaaaaaatgaggacagatcgagttattgccatgcgggtggctctccaagcattccagttgcatagctcttccagaaatatttcttgacgcacttatttagcactttctattgccgttactgagcagattacagaatcctcccggccctttcaccaaacccgtctagagctggtatggatctacttgtgcctatctggcagatagaaagatagaggaatgggaaggtgaagtccattgttactcatgaaggattttgaccagtaacctcagaagagtcagaagaagagaaaaagcatgtgctctcctctttcctgctttgcttttctgcttccaagtccctcctccaagcaggaagatctttcctgagcagcagcgtacctgggtgtgagaacccagagggagtgtggtggagagacgtgaaggggtcagttcctggaacattctgttccctctagctcccatgatcattgacttcttgcctctcaagtccttctagggatctccaggcttttgagaggctcagctgacctcgctcactgctgtgcatgctctctggagctttcttgtcctcttttggttgtttcttactagcccctcattcccaggactttttctgaggaatctctgttagttcaggtaataactggctgtgaaacctacaatagtaagttctttggatgtcggtgttttcagatgtttcttcttcatggaaactctttataaatccctcacaaaatgggatgtcaaatctcaatatgtaaaataatcaaagtgcagttaaatggtggtgctgttgttaaaaggtggaagatctcataggcttctagccagggccgagttatctccccagaagagctctgtgcctctgtggacccacttagtaagccattgtactggagttgctttaaggctccctacagccctgatgacctgtgctcagcattctttcagctttctgcctctttgtatatctttcaagcttgagaaagatcctctatagatcaggaagatgtgtccagtaagagatttgacctttgctggtttcttgacatgggctttgatgaaacccttttagcatgctcactttagatgattcttctcaagggggatgtcagccccaggaccccccagacctccatccctaaacccgggcttgcgtgtctggcaacccagggccagcacttcgttcttacactcagctgagtggtagtcctgccaccattgctgtggctctgggactatagcctctgccttaggaacacttatgagaggaatcgatggaattccaactatttttaaggatttttttttttttttttttttttgctgagtttgcattgcaaaaggaaggtagagcacgggccatctctccctcctccacttatatttattctgcacctacctgcacgtgacactctgctattcttcagagaaggttctgacctttgtgaccacgctttacattttcacattgcaaggcaatttctaaagagcttttcccagctaagatctcatttgagcctcacaacaactctggggcaaaggagactgtaaaacaaacaaaaacaaaaacaaaaaaaacaaaaacacaaaaccaaaacaaaaaacaacccccaaaaaccttagacaaatctaattccacagtttaattaagcaaagaacaattcgtgaattgggcaggccccaaaccagataatctggcactgccatttggttgaagaacatttgtggacagaacaaagaaggtgacggacagaaaacacaagtgaggtacagaaacagctggactggttacagcttggtgttttccttatttgaataggtttgaacagttggctgtctttgattggctgaaactctgtgaatggtacaagagtaggttgcatcctgtttacacatcctgttaggacggaggaggcagctttaggctaaacgtaatttaacaagattcaatgagattatacctgtacgcccaagttcacagttaggtagagaaggattgtggggatttgaagcttaggcttactgacttacgccattgtgccatatcattcattctcctcgtggcaggaataatgaatgaatattctattaacaggtactacctattaaccgcttacatatatttcaaatgttactaggtagatactttttacaggcctatttcatcttctcaacaaccctataaggtagaaattattatgtccagtttgttgatgaatggctagaaatatagagaagataaataacttgctcaaggttatacttcacagaattgatggacctcgaattctaattaagattgctgcctccaggggtctatcagtataggatgtgatctttacccatcctgagtcctaggagatataaaacatgctgttgaaataacaaagctggtttgtgggtgatcatatactatagtaaatacgacatactgttaagggttaataggtggctgttttctgtgtttgttcctggagatcgtaatatctttatgctgttccttctacttcctttttcaattttatgagctccatgttgaaattatgagtccttaaccctattgaactgtgtgccattgggcaagttgtttctatttctggggtattgatttccccgtctcaaaataaatatcttttcctgctccgatcattctttccttttaagtattacctggctggtgaatgtttatattgaattctctttgtacaattcctttcaacaatattgcttggaattataaaaacttaataattgttttaaattgaaatgacaattgcaggttatccttgctttcaaaaagattttgtttctgaaatgtagcttgttaaaagtttggaaataaagcatcacatgaagaaataaagttatatcaagaaagatgcctaacacatgttctgattggctagctggttgtgcctttttttttatgtgtgtgtgtgtgtgtgtgtgtgtgtgtgtgtgtcactctgtctcccaggctggagtgcagtggtgcgatctcggctcactgcaacctccgcctcctgggttcaagcgattttcctgcctcaggcttcccagtagctggtactacaggcgcgtgccaccacgccctaatttttgtatttttagtagagacgaggtttcaccatgttggccaggctggtcttgaattcctgacctcaagtgatccacccaccttggcctcccaaagtgctgggattacaggtgggagccactacacctggccgtgccttgttttttagtatcagttttttcttttcttttcttttcttatcgtttcttttcttttcttttctttagggtatgattctatttatttgaagttccagaaaaagcaaaactaatctgtggtaatagaaaatcagagtatagtggttgttcgcaggaaagaggtggtatgagattgcctgagaataggcaaaagagaacttttcagagtgacaaaagtattctgcatctttgataggagcacggattacttagatgctttcctttttctcaactggcctaagtttctttttctttctaatgcttgtataagaacaaccttcgttcccaaacacacagacgtgtgtgtgtggacacacacacacacacaaacaattcttcagaaagaaagcctcttacgtgtgttaaacttgccacttttttctcaaaatgtgctttgtatttctttgggtgagcaaaagaagaatcttcctcttctcaagttcagagtttgaatcaattcttcctgtcttttgcatttcagtaaatgtttcctagatggattcatcggttttccagtaaagacaaacagctcagaagccagattacattcatacccaaggcctgagttctgtgacccaggcatcagagctcagtgccatatatggcgaaaagaggaacaggagcaggagtggagggagaatgccagacatgcaatgcattcctcagaaatgtgcattcataactggcaaaacaggacccttgctggtttccatcttatgcagaacatgaactgtgaagttttgagaaagaagctaatgttccaagcatctgccacagggaacagtttattttcccttttctttttggtcacatgtcggtttaatttggagtcagtgtttaagtcaatgctggcatggggtgaagactaagaaattgttcttgcagtcagcagacatgggttctcagcccaactccactgccacccagctgcaaaactctccttggcttgtttttaatcaatggcaaagtagcagggttgaatttgatgatcttcgagatttctactatttctgttttctttggttctaattttgcccgagattttccagttcctgtggaattccccagtgaaagcattttctaattcttccaaatactttttgtggcttgaacttaaaaagacaaaaacaaaaatcccagtcttgaatttttctttgtgatttcctgaagtatgttttggatgcattatgaatcttcaattgacagattatttcttgctcggggtagagaagaatgcatttcctgcatcttcatggtcttctttcacttgcccctcttattgttggagaagaaatgtaggtatgttcaacacatagttgcagggacagctgtgcactaagcaaatgcagacttttaatgaccttgatagttgtctgcttctctcatgcattgaagccttttctgtggaagaagtgggagcagcagaaggcagattccacagcttcctcacacctcaagagacggaattagggatgtgagactgaggtgttggtttcccagtcagtaatcggatgagacactttgctgtcacagatgttaagaaggttaacaagaaatagaattgtaaaactctggccctaaggtggactacggtcactttcactttgagataaggcatgattttaaatgctcctattggtctttatgggttctgtagtctattttcaacagactaaaattgtcttgttgcaaaagtttgcaattttctgcttctttgggagagggttcaaaccaaagttgtcctcttccctttctcttctgaaaggatgacgttagtttctcagctgaaataaaggaaggaggaagtttccattgggtcttaggaaaatattccagcattgggctttaatggcagctgatgtcccaaacttgtgcacaatggctccgagaaggccatagtggtttaagaggcacccataatagtcccttttattcatgctgagaatgaagaaccaggggcaacactaaagaaacctgcacttggcttttccttgctgcttgtggtccctttcctggaagctgctataacacagccaccaagtcctgggaggaagagaaggaggggattaattcttatgatgcagggggatggctccagagagagtggaagcaaagacatctgtgttctgatgacagctgtgccacgagtttgctctgtgacttggtcaagatgctttgcaatttgaggccttcatttctccgtctggcaagtggacatgctagtggaccttgaaggcctcttctagctcttaaaagcatgaatttaatatatttccagattgtctgtttatgtttcctattgcatgtacttggtatgcccggtgacactgagctcatcaacttgtaaaaagaccgtgccattatcttctttaacggcaaacagaacaaaaacagaatcctctttgtgggtgcctgctcaccgtaatattaggaccaaattcttttgtgtaacattcacctcctttcccagtctagttccacctaacggttctagtttttgggaagcgtttgcttccatgtgtgacattcatctttactttgagctctctgtgagccttttgctactgcagaggtatgtgtctgttgaaagagaggaagctgtacacgatgacacggcagagtcattgggtcaggagtggtgttgagaagaatgaatcaggatgctggggttctgtgatagactctacaaatagtttacaagaagatttagggacagtaagcacaatacatcttttgcttcagtcaaaagcataaattttaatggttacaaatgcctggtgctattatgagaaaaccacaggaaagaccattatataaacagtaataatttgttgactatgactaatcctttggggagtatgatatgtgacataggcgtataagggctttatgtagactaacccctttaacacctattaacttgttagaccctgctaatgggtccacgagggtggcaggctaaggaatgctaccctctatttactaacgagcaaagcgatgctgaaatacagtgaagaagctgtccagtgtcacatggtgaagagatggcataacagagactcgttcagtgcttttatgcctgcgtcgtgttttctgcctttccaggcttcagcctacccagtaaagcaggataaaaacacacaataactgcccccaccacccacagccagaagatggtagaggatgggattgaattagtcatgaatcatgtgaaccatagtatttggtgaatcagtcttggtaattggtggggtgatatgtcagtcagtttactttcacaactgaattatcaactagggcaccacgatggaaaacagaattgaggatttctactttcttattattcatttgtacgtgtgtactttcacttatttaaggcaatgaagaactaataatacctaatatggtgccaggctttgtagtagatgctgacctgtagaagtgaaccataaaccctaagccaagggctataaaatactttaaaattcatgtagaatcctctctcaatcttacccccctttcatttttcagtgtgttctctgatacttttgtacttttgccaggtgataagtccaccttgacttggctattttatatctttttttttttttttttttttttgagacggagtttcactcttgttgcccaggctggagttcaatggcacgatctcggcttactgcaacctccacctcctgggttcaagcgattctcgtgcctcagcctccctagtagctggggttacaggtgcacgccaccacacccagttattttttgtatttttagtagagatggggtttcaccatgttggccagactggtctcaaactcttgacctcaggtgatccacctgcctcggcctcccaaagtgctggattacaagtgtgagccaccatgtctggccgtctattttatatcttatagtaaaggatggttgcctcaaaggctgtaaacgtcaatgtttagagatatatatgaaattatttgtaacttccttcaatagtaactttcaaatgccacccttacatggctttatgaaaagtaaacccttctcttaaatgtctgcttttttcttagagtaagtttcttgtgttggctttcttttctctcttctctttatcagtgaattcatttattctaaatttttttctgatgtagtttgggacttcctaacttaacaatggaaattgaaaattggagaagctcattctgtattctttcctttttattccatttttgatactggattatgtctgtataattgctcaaattgtgagtcatgtaggaacatgctctgtgtttctgcacatgatatttaaaacctatttatgctttcttaaccacaaaggggaccataaaagtcctgtcaaatagtcccagactgtaaattccttgaggtcaagagctgtgtcaaatttatttttgtacctctttctgctacagctcccagcccctagcccagtgccaggtagctctggcaaatgagagtgggattgaattggatttctcgttctgaccactctcttggtgcctttatcaacttgtccaccccattgggaggaggggcatggacctgtcaagtgtgatgaattggtagatcatggagttttccatcctccactagaactttagctgtgtttagacttcagaatgctgagtaactaataaaaaacgattccaaagcactctgcagatagaaagtgcttcatgtgtaataaataataatagcctcttaagattaggcacagccacacaaagaagtgccagtcttgcaggccgcaagaattcctgatagaccttatggttagagtggattggttgagactgacccttgtcactgttttgtaataagcagtttcacctccaagttaccacgtattttccattatgggaaaagggtagtttctgaactatctaggaattaatccttccaattatcgttaggagtctgactgaaggaacaccatgaaaattgacagtcaagctttctaggtaagcctaattcagtgcttaaatttagttctaaatcctgtccccttctccaactgttatttctttaaaggaatcagcagtcacctctattttagttctacagcatgtggtggtcttaagaggtggaaactggcaccttttcccaaaggagagactggaatggccagagcccatcctgactttgggtcatcactttcagattaaaacataactgtacagagtacatttcccttgattctctgtttccacagagaggcttttctgctttagggtttcattgatgggatgacttcttttcctttgtcctagagtgcgggtcaatctaattcaagtttggtgaataaatggagccataaactgtgttacccactttatttatttatttatttacaaatgaggtctcccctccctctgttgcccagcctggagtacagtggtgtgatcatagctcatctcagcctggaactcctgggctcaagcaattctgccgtatcagtcccctgagtagctgggacggtgggtgtgcaccactgtgcctggctctccaccttattaaagtgagttaagagaagcataaacagtgttttgctattcttcttggtaactttaaatgatgctttcttctcagcaatgatggtccagtctaactgggcatcattcatttagctattatttattgagcacctgctgtattccaggaactttttttttctttgaaacggagtctctgttgcccagactggagtgcaatggcaccatctcggctcactgcaacctccacttcccaggttcaagcgattctcctgcctcagcctcctgagtagctgggattacaggcacgtgccaccacacctggctaatttttttgtttttagtagacatggggtttcaccatattgtccaggctgatctcgaactcctgaccccgtgatcctcctgcctcagcctcccaaagtgctgggattacaggcatgaggtaccgcgcccagcctccaggaacttttctaggtgctgctggtcagtgaagaaaacaaagcctgctgtagttaccatttgaaagactgaacagaagtgtgactttaaaaaatgatttggcaaaagtatgctttaaataaataaacacagcaaacaaaaaacacaacagctctttcattctgtcctttcctctattctttctcttgtctcccatttttgtcctgtgtgtaacctgactccacaccttttattctctcactctgcttatcaacacagccatacttgcttctcaggctcttctgtgtctctttgttgtgtctgctgtgcttcatcatgtggcgatgaagtagatgaaggttgttggtggccggaccccaacttcgtattccttcttagctagttccttgattgatctccagacatggagtggcaggtaggtgctcttgttgtaagtcacagaacctggaggaaagagtggttcgtggccctggggcctctgggggctgatgcttggatatttgtttagatatttgtttggatatttgtccccgtccaaatctcatgttgaattctaatcctcagtgctggaggtggagtctggtgggaggtgttggggcggatccctcatgacttggtgatgtctttgtgatagtgaattcttgtgaaatcttgtcatttaaaagtgtgtggcaccccccaccctccaactctgtctctctctctctctctctctctctttctctctctctctctctctctctctctctgtctgtcctcctctcctgctgttgccatgtgaagtgcctgctcccttttgacttctgccacgttgggaagcttcctgagcctccacagaaggagatgctgctatgtttcctctatagcctgtagaactgtgagccaataattcaacaactcaaccacttcttttcttttctttttttttttttttttttttttttggagagacaggtcttactctgatgcccaggctggagtatagtggcatgatcttagctgactgcaacctctgcttcctgggttcaagtgattctcctgcctcaggctcctgagtggctggacttataggcacgtaccaccatgctcagctaatttttgcatttttagtagagatggggttttgcccctttggccaggctggtctcgaactcctgacctcaagtgatccacccgcctccacctcacaacgtgctgggattacaggcatgagccacctcacctggccaacctcttttcttttaaattacccaatctcgggtatttctttatagcagggcaagaatggtttaatacaggggcccatccagcagcactgcattaccaggattctgctgaagaaatggacgtggccccaaaagccatagcctggctgccaggtgccccagagtattgtcaactcagaggaacatctctcaggaaatattccttgattctctcttctctattagttttttaaatgcttctatcccagaggaggtgctcagtaaattttagtttctttccttttccggaaagtctcatgactctttatctgagtttgacttaagagaacttacttaataataattaataataaagaataaaacctgctaataataagatttaatagaactttctgtttaattccatggttattatacccatttcttaatctctctaagagacatggactgtgttaaagtgtgtttatgaactggtggtcgagggtgcatttccctcctaagaaaactcattccttgttatgggataaggttcttggagctacatttaacactcagtcctagacttcagtggctcaaatgccgagacatgacctccatattgaccacacggttgatcatgctgaccacagatttctgctaaagcttgaggtgcctgaccatccctggctattgtcattcgccctaaactagctgtttgggaatggggccagtgatgaccctttagtagagataaggcagagcttgtggaggaaaaatcatttattctccattcccatgatttagccctctaacttcatgcatttctttttgccctttttcttgtgctggattttagcccccagcctctctttcgatcatgataatttgcatttattacacacgtactatgttccaggcactgggtaaattgctttctattgttcatttcatttaatcctcaaagccagcctatgcagtagatactagtgatccatattggatggatgaggtatggatggattagaaaggtttatgtagcttacccaatgtggcacaacttgtaatggcagggtcagacttagaaactaaatctctccaatactagcttttgattttatttttaccctactcacccctgatattcgtcccctggccttttctgcttacctggcttggagcaagtcctcatctgccaaagactatgtaggtggttggaaggagtgctctgtcctcacctcttcctcccatggcacctgcagccagagacctgctgtgtgtgctatatactcttctgacctctctgattctgaatcgactctcaaggctgaattggctgacatgcatcttctagtggattcattgtttttcatggtttacttggtttatgacaagctagggacagcttgacatttgctttcccgtcagtggtctggggacgtgcacagagctgcttgtttcagatctcctctcggtgtttctctacacttagtgaagactatataaccatggctctattataatacaatacgttataataagatctaggggcattctcgagaacttgggagcaatctaagaaaggagagtgaggttggagagaggcgtgtcctttgcatcttctggtagatgatggtggaggctgtgtaataacacgccaaagcctagcccacttgaaagcatcacgctctccagggaactgcctcagcctggggcacttatattatccatgcttagcatttttgtattactttacatttgtgaactgctttcccatgatttattagctgttcttgtttttaatagcccctggaggtacattgatattcaggcttctgagaatgtaaatgcacagggaacgttcatctcatcagatatttttggatctgggttcaggactctgacctcctgggatgaggccatttggggtcactgcctcccatggattagtaggagatcaagtggacttaacttcagctcctaaagtctccaaggcacagccatggaatgactgcagctatttaaggaaatggcgtagaagccattatccaaagagctggattccagtcctgactctgctgctgaccagcttcactggccttgagtagttgctttgcctacctatgcctcagactcaccctctataaaacaaaggtaacctctcaagtccctttagaccccccattgtattaaatataattctgtgactttggactccttctctggaaccccttgggtagccaatgaattatatgacagggaacatgggtatagatataacccattaggggacttgaattgagaaggtgctcaccttcctttctctaggattcaaggaccaactgacaatgatatgctttcagattcattttaagaagcacacaatcctcattcactataaaagtaagatagcgagtggagctgttagaggaaagtcagactggagccaagaccatcatttctgtatcttctgggtgttgtagaaagtaattagcaggcttgattatctcactggttcaacacacattttagggatgtgatgtaatgtgaggaaacatttagttgtcagattttagggctgtatcaaatttattcttgcaggaaaagtctagttgtcctggcaacctaaaattgatttctttttgctcttgtcagctgaaactggtcccctttgaatcattcctctaatttaatatagagagctgtgtgtctccacctggtgaccgaatcatttttaatgacaggtaactccagcaaatggctcctctttcctacctgagccagaagctatagtttattactaccttcaccctgtgttgttctctttgtgtttatttatttgtctgtggagtgaggtgtgtaagtaaagtggcattcaattaattaagagtttaatcaggcctgtagagcagtgatgtaattggcagccaatcactgcctttcgttttcagtgacctcctagacatgagtgggattcgaatgggctctggaagagggagtccttttgtgtggatgtctagcatttttgtaacccgaagagggtgatgtaatggcccagatgaaaggagaaagcggagctgcatggctgctttctgcctctgtcagtcatctctatcaagggggtgggtcatctatgaagggtggaatcgacatcattaggaagaaattgatgcctatgacaattgaagaggttgtgagagagcaatttgctttccttaaatggttgcaaatttcatggaccacgaatgccgcatctcaggatacagaagagaacttctgatggggaacggctaccagtaattttgaggaaacccagaaatcagcagaaatgccagaaagtgaggagacgaggaaataggtattatcaaaaaagtccagtgcccatcccccaccccgcccccaaacgaaacaggtatccagagtctagaatctgctgatttcattgtgattccagttgtcgacggtcctatgtagacaggtgatttgtgagtctttgaaaggaagtagtgttcaccaagagccagaacagggtcttaaccagttcccgttttgtctgggttaaccaactggtggattaacacgatgacacagacatagtggggagaatgtgggctttggagttggattgtctggatttaaatccagagtccaggtcattgtatacaaatgaccttaggccagttgtttaatttttgtgactcagcttcttcttcatgtcagttctatcctggggctaatgataggacgacaaaggaatttttttttttttttttttaagagggaatcttgctgtgttgcccaggctggagtgcaatggtgcaatatctgctcactgcaacctctgcctcctgggctcaagcgattctcctgcctcagcctcccaagtagctgagattacaggcgacaaaggaatttttgaagacaaaatgaaataatgcatgtgaagagcttaaaacaatttgcacatatgaattatttaataaatgtggttcttactactgtttgtaggaagacatttgaatttagtaaagcacataaaagccttttacatatgtatggataagtccgtaaacaaatacacacttattagtgatgcgggtttagaaagagtatatttcttggtggcagaagttccaaagtcaggccaggcatagtggctcacacctgtaatcccagcattttgggaggctgaggcagatggatcacttgaggtcaggagtttgagaacagcctggccaacatagcgaaaccccgtctctactaaaaatacagaaatattagccaagcatgatggttcgtgcctgtaatcccagctacttgggaggctgaggcaggagaatcgcttgaacccaggaggcggaggtttcagtgaactgagatcaccccactgcactccagtctgggcaacagaggaagactctaccaaaaaaaaaaaaaaaaaaaaagctccaaagtcatattgcaaggatgaggacataggtagggaaggggaaaatttgtgaccatttttgcaactttccaaactcctttctcctcccccatctttctttcttccaagaagttaccgtcattagcaatttgccatgtgtctagtttttgtctcacatttatatacctgtaaatatatgtttattttttgctttaaaaacctcaacagttatttgtataaaatttaaattctttgttctttcatgaaatatcatgactacaaacattgaaatagttactccgaattgcagtcacatgttttacttgtatataatcattcttataggcagagggataactgtaaccttttcccttctccttctcaccttgccctttgggagacgtttcttccctttttttgtgtctttctaccttgtccttctcctcccctcctctcttttcccttcccttatattctgttttcttaccgttcgtctccttttctctctccttccctccctccctcccttgcaatactttcctacctttcatactttctttattatatttttagtctcttgtctttagcttaatatggggctcagtggccaggcgtttacataatattgtgggtccttgaaacatcaggtcttggacacctagtctcagctctgaattgtcaggttcctgctgatatactttctgggtccactgttgctttgtatttaatactggaggttgtgataacattgtccagcttcaggaggccatggtagcgcaggagggatgcatgtgttgtgtagttccttgtctggaatgcagggtgacaggaggttggcttgtgtacacatgttcatctccttgggctactggagagggagtctttattttggtggggtgctcctaagagcagtgagctcagagcctctgtcttgagacttgctgtgtgttttcttggcctcccaatgctcctggcataagtgacatccctgcttaggaccctacactcatgatttcaggcaacctttctgccttccttttggcccctgcctctccaccccatgttcatattcttcatcccaggtgcagtgccaccctgctggctacctctgccaggcagcatccttcatgcttagctcaaattccaccttctcagaaacatctgacttcacatttggtgtcagtctctctcctcctccatttcccatcacacagtttgtactttcagagatactttcatacaccaccttgtattcaatgggtggtatctgtttctgagttctgatcagagggcagacatctctgatcctttggaggctagctcagtagctggcatttataggcactctgtaactgttaaattgaattactgaggaggcctgaggggttggaaggtcaaatgcagttaacccagggaactagaagggcccctgggaacttggttttggagcatggcttttatgagcagctatcagcttttccccaggctccttcttaatcctgtctctctagaggcacaaggagaggtggtgtttgcttaagatgctggtggcattcctagtgaagttaggtcagaatgtgccatctcttctttagctctcaacttcttagagtgtcaaccctcctcatattggaaaagcttagcttttaaaaaggagaaagtggtttacatgatgacctctgaatttttgactttgattattaatcttcttgaagaagactttgcagttgcccctgttacaaggaaagcagacatgccaagttgctgcatttgtgaaattgaatgaaattctggctgcgttttatggctctgacctttgggaacagtccagggtcagactgctcacatgatgtgcttgataaatccgcctcccaacagcactgttgagatcttaactagaattgctacttgcgaaacacctttttctgacttgcagttcagattctgcatgtactgctgactactgcttctagtggctcattcagataagtatgctatatattaggtagaaagaggatgcgtgatactaaggaaagagaaaaagagccagcccaggacacttgggttccagtgctaagtctgcaagagacatgtttgacatggggccttagttttcagatctataaaatggagacactaatcattattaggaagggttgtcaggagttcgagactagcctgaccaacacggtgaaagcccatctctactaaaatacaaaaattagccaggcgtggtggtacatgcctgtaatcccagctactcaggaggctgaggcaggagaatcgcttgaacccaggaggtggaggttgcagtgagccgagattgcgccacggcactccagcctgggtgacagagcgagactccatctcaaaaaaaataataaaaataaattaataaaacaaaaagagctcctcctatgaaagctctggaaacatcctccaccaaactggttgcacttctctaggcacaatatggtttatatccttctaaaatcagcatctcggccggacgcagtggctcacgcctgtaatcccagcactttgagaggccaaggtgggcaaatcacctgacctcaggtgatccgcctgcctcggcctcccaaagttgttgagattataggtgtgagccactgtgtctggccaggaggagctcttacagagctggaagtatttactcagagaaagatggagttagaagggaaggttgagaatgagagacaagttagtgtttattcaaggtggaggtgcacaggcctaatgtaggacaacggcaagtgggttggagaagaggggcttacgggaaggatgggcaggagaaatgggatgggacccaggaggcccaagggggaggtggaggattcaagtcagagcttcagatgctgggtctggagacactttctgaatgcctaggaggtagctgtggtgttttgcaggataagaaagacagaggctttctgtagctaccatcctgctaggtgaaatgaagggatggtctgggatgtgtgtgtatgtgtgtatgtgtacccacatacgtgcatgtgtgcatgagtgtgtattggtaacagaaccaaggagatcagggacttacccaaggccatacagctgggaaacagctttcatttgattacggtgctaagtttagtaatgactgcgagagacaaaaacgggcagggggagcatgtagggaaagggcctcggccccatttcctgccctctcaggcaggtagtgagtaggagttttaggtttcactgtttgatagcatcacctcctctgctttcccagaaattattcctcgaagtatgactcgaatcattcctctgttgggagatgtatcggttcagagctgactttctgctctggttgtttactgaaaaatggtagcactggcaattcagagggggcataagcaagtgaagaaaaaaaaaatgaacaaacagggcatgtgaggtcaggggccctggttgtgagtcccggccctgcttttagagacccatgtgaattgggcagatcaatcaacttcttagtgcctcagctttttcctctgtaaattagaagatagtgatttctgcttgataaatttattgtgatagtgctttgcaagttgtattgttggtcgtaggataataaagataaaggggtatacagacttggattctgtttctatatatgtgaagcgttagagagaggtggtaaattgtttctctcccgtgggttgtgcacatctctgatattatggtaatccccatatcttctccttttgcagggtggggtgtcttggatagtatggttactgaatgtagaatctactaactcctcttttttatttcctgagactgggtctcactgtgctgtccagggtggagtgcagtggtgtgatcatggctcactgcagtcttgaactcctgggctcaatcctgagtagctgggattacaggtatgtgccatcatgccagctaattagaaaagtttttctttgttgagatggggtctcactatgttgcctaggctggctttgaattcctaagctcaagtggtcagcctgactcgacctcccaaagtgctgggattacaggcatgagccactgtttctggcctcctttttaatattctgccctgtgcaaagcaccagcaccaacagcctccctcccacaacccccaacagctgtgcattaagtatcactttggtttgaggatttcctagcttgctgtttatcctgggagaatttctgagtttcttggtctttgtttctttacccaaaagttggggatagttcagctttgtctgcattgtggacactacctccagaaagcaatgggaagaccctttgtaagctgtaccgaactctttgtatttttggagcacattttgtcttttttctcccttcttctggtggctgaggtacctctttggtcttgaaaagacccacttatatggaggcggaaatgggcttatagagggaagtgactttccaagggccctggaatgaattggattctgagatctgtgcccgtccttgtcacaacgtgtcagattccattatttagtgtgggcctgatttgtccatgcctgggactttcccagaggaagtcatactttctggaaactctctgaggtcttgaaggggtgggagaagtctctgacacaagtgctgctgtggtcatggaggcttccattcctctctccttgtgttgagcagggaattgctccttggatattttaggtttgagtgactcaacatgcttatgacccagaggatgctgtggtgtgtttggcagcatgctggaattagtcagaaggcaaaactgcttgtcctgaccccagaacccacttactctaggtggatgagaaagtcctctcggatcctctatttcctaattcatggcaacttctggagaacagtattttctctgttactgctttatggggtttagtgtggaaattaaagaagagaacttcttattttttgtaaataataatacaatattcagatactgttagtttctgaaatttaaaatgggcatctcacttctgtgttccctccccaaataaatgtattgatactaaaaaggaaagccagctaactttatgaggatggctggtaaatgagccattctgtttttgcttgctgtccaaggcctctaatattaagcctggaccatttcaagcatatatggaggatatatatttcaaatatacattaggggtatatatttcaaaatcgaggacacattaatagtaagaggagaccatgtaagacaaagcacaggtttatttttatttttatttacctgtttattttttatatttttgagatgggatttctctcttgttgcccaggctggagtgcgatggtgctgtcttggctcactgcaacctcctcctcccagcttcaagcaattctcctgtctcagcctcccaagtagctgggattacaggcacccatcaccacacctggctaatttttgtatttttcttagagatggggtttcaccatgttggccagcctggtctcaaactcctgacctcaagtgatccccccacctcggcttcccgaagtgctgggattacaggcgtgagccactgcgcctggccaaagcacaagtttaaaaattacaagtttccaccagcctcatatctcccttggcttataatattcaagtgttcatggatactggggcttgccatcccccgccccgtgtgttaatgcagcccatggaggcttctcatagagacataaacagtgggctccagaaggtctctatttaagaaactgaggtctggcaaggtcacacatcgaggaaatggcaaaatcaagactaaaagccagctctttggattctcaattccctgctctttctgacacttcactcttccctcctgtcaggtgaagagagaagccagatggtttgacaaatggttctcgttgctgtcaaatctgccttctttctttgctcagacagacagttcttaccttccctttttcgggggactggcggaggtggggtgaggagagaggtaggaaggtggatgaaggaaaaaaagaagcattttattgcttcattctttatgtagtagtgatggccaataagttctttttttctctggcaagaagctaagtaaaggcaaggagtaatcgtcaccttgaatttagagcacatagaggcctagaaatggcaggctgtattaggagacaacattgatttcatatatattcatctctgaaaaaacatgtttaagatgccatattcataaatactaataaggctgtctgattccaattttcaggtgagattagcattttattgagtattttatctgtcagattcaatgctggatgtaccatcctcccaggcttattagcataattgctgtgcttaagcaacaataaaaaaatcagcagtaaaatagcatttagtgcaggcaatttgttatcaaaagcttttacttaaggacagctccagcctgcatttattagcaagttagggttataatttatttttattttgaaaaacaaaagtgggagaaagatttggcttttttgttttggaaataatagagaaattagaaagcattgcctctttggaaaattgtccacatcccttcttcctttgccgaaagcaggctgtgatgggaatagattccacttgtgagcgacattggctcagacaaaaagttgctctccttggcattggaacaaacgggtagtaacgtccctttatgcttgtacacacatttccaaaacactttcagatctcgtttgttgctcaaacctcacaccagtcccgtgaggtctccattcttagaaatagaaaaccaagttgaaatgacttgttccagatgaggcagttgagtggcaaagtggaggtgtaaaaactagtcttccagcctccagtcctgtctcagcattgctccccttcacgtcgttgtccagagctcctggtggagccttggccttttccatatgtacacgtgcacacacacacacatacacacagatctgtgtatctacacctgtctatacacatacgtgcacacctatgcacacacatctatgcatacatacatactttttcttttcctaaaagttaattatgtactcttgcatttgtttttcatttgatgtccgggttgaaatacttctgccacatgaacttctcttgatgccaaatagcctcttaaaatcaatctctctctctctctccaccccccaccccccacccccacccccccgcccctctagctagcaactgtatcaggaaagcacttgtgattaccatctgttaaggacctggaacaaaataaatgatgttataagtttttgtagggaagatagagataagattttaaaatatggagattgggaaatcatttttcttccttatttcttaggaaatgtatcagaaataaataacattaaattgatgccttttagtgggttttaggcttcaattatgggtaataattttcaaattgagaataaagttttgagtgaaaatggacaactgaagcttctaagctttgagaggagttattttagcattttagattttcttttctcagtaaattcaaacaaagatcatacaatcattgaatcatagcacgtctaaaatccaaggctctgtgctggccactgtgtgttttacagactagctcagacgtggctatgagccccaagacatgtttaaactattagagaggatactaacgatacattaataatgttcttggttttgacagaatattctagaacaggaactctagtaggatttttgcttatgttacatcattgaaatttaaattcactcaattatttattgactaaatattgagcacttatgtgatgttcactcttgtattttacatacatcatctcatgtaattttttaacaatcatatgaaatatgatctgagataatagtcagtactgttattattgttctcatcattagatgaggaaattgagactaagtaacttgtccaagtcattcagctggtaagtggtagaactgctgtggtctccctgtaaacacatgtttttttcatggtaccacttggcaaaaaacgaataagcaggtacatacgtagacagatagtgctaatgatgattagagaacctcagaactcatgcagaacctggatgtttagagagaaaatggaacttgaaatcagacaggtgttcaaaccctactatgcttcttagtgtttgtaaaatcctcaatttaaggacctcttaggatttcggtgtcttcctgtgaataaaggattataaaatctttctctcaatatcataatgagaataaattacaaaatgtatgtgagtgtctgcaaaggtacctagttcatggtgggagttcaccctatcttggaagtgctcataaacatgcagggttttttttttgagacggagtcttaccctatcgcccaggatggagtgcagtggcgcaaccttggcctcccgggttcaagtgattctccttcctcagcctcccgagtagctgggactataggcgcatgccaccatgcccgactaatttattttgtatttttaatagagacgaggtttcaccatgttggccaagctggtctcgatctcctgacttcaagtggtctgactgccttagcctcccaaagtgctgggattacagacgtgagccaccatgcccggttcaacatgcagttttgtgtactgtttagggacagatgccgaagccacattgcttgggtttggatccatcctaccacataatatcatgtgaccttggacaaacaacttcacttctagtgctgtactttcttcatctataaaatgggcttacatcatagggtccttgtgaggattaacaaagttagaatgcgtagagcatgtagaacaatgcttggcacacagcatgccgtgcttcagtggtagcacttactattccattatactacagccaccgagaaggacaggtacacagtgaatagtttaggactgttcatgttcccggcctcttcactccaagagcatcagcaagtttagtttagaacataggagttgtatttacacagctactaatgaccttggaaaagttcttggcttctctgtccttgacctttgtttatctgaacgagtaaacttcagatgacagagtgtgtggggaatggaatgcatccgcatccttgataagctgccctagtggaatgttgccatgtggctactgagggtcaattcactggtcaaaggtggcctgctggttggtattttttctgtgtcttccgggcaagttctgtctttcctcagtctgcacatgcctgggtctgtcctcagagctctctcccatttccctcttctctagaaagcattgatataatggggccacctcttccttggactgtttctgtagcatcagaaggaggtgggtgggaatttggcataccactttttgaaaggtaatacattctaacatatgtatttcacccaccttcaaagagtaagaatacactgaatgatacttaattttaaagatgtgttgctgaggtgaactctaagacgaacaattcttcagaatcttttactttcttgggcttcttgtcccaaacaacaattatctttataaagcctgtgtgtgtatgtgtgcgtgtgtgtttgtgaaacttcctggaattggtagtgttgattttgagatgtttctttggcttattcaaaatataaacagaaaggctaaagtgtttttcatgtcattaagaatgtctttataagaaaggacattggccgggcgtggtggctctcgcctgtaatcccagcactttggcaggcccaggcgggtggatcacgaggtcaggagatcgagaccatcctggctaacacggtgaaaccccatctctactaaaaatagaaagaaaaaaaaattagccgggcatggtggtgggcgcctgtagtcccagctactcgggaggctgaggcaggataatggtgtgaacccaggaggcggagcttgcagtgagctgagatcatgccactgcactccagcctgggcgacagagcgagactctgtctcaaaaaaaaaaaaaaaaaaagagaaaggacattaagatgataccttaccttgtgtggggggcttgtagctttcaaaacacttaagtacccattttcttatgtgtgctttatgacatctctatgatgtaggcaaggcagggtttatcattatttcccttttagaaatggtggatctgtggttcagagaagtgaaataagttttcttaaagcagttctggatgcaaacccagaacatttgactctagggtgctttctgctccaccaccctgatttgattgtaaggaggtaattcttaccaagtactgtcagattatatagagttgtaatatatcttaaaaatgcccattttaattttctttaaacagatcagttaaaaagttaactgtgatttgataccatcttgtttctccccaagtttaaacagcaatgagtctctaggaccttcggttaaaccagcatgtgtttttcaaaaatcaaatgtcaaagcatttcgtgaaccttgctttaatgaacaagagaagtgaaggtacaattccttttttgcatgaggtaattaggaaacaggatgtgcaaacttgctatatgaatttaaagaggagcacttctactgatgtacaaactggatgggcatattacagagggtttcatgctggtagaaattttaagtgaaataagttctcattaagcatatcaattatttttggactgtgtgaaaacttaatctgtttcatgagttggatctaaggtggtcaatacctctacactccaaaaaacagaagcatgactcaaacatctagttctgattgcagagtgcctttatctggaagactggacatgtcgtcagaatatagagcaagagggatggaatatgctcttaagtttcctgatgacttaagggtctgcactatacttgcttgggaggtgggaaggattgaattctctttggaaaatgcctttgaatctcttacacacatggtacccaataagcctagtgctgtattattagcatcatgtactagagtatggtttacctgacataggttttggaaatctatttcttttatttacactacatggtttcttaggtggcaattctcagtgaattaccagcttcctgatagtgtcttgaaaagcatgctttataaggaggcagaaagtgtttctcttttgacagatgacctccttgaccccttgactttccatttttgatggtttcttttgaggtctacgtcatctggtaattttattggtgtgatttatgcccccagtaaggatcaacttgtatagattctacattctcatggaagtctatgtactgtctctactgtgtaataattagctccaactctacaaacaaggttagaaatgaaatcaccagcattacaagtgagacataacaaatggaagattcccttctctgagtttctctcataccgttaattttatttgagctggcattgactcattctatatgtctcttctgctagattttgaactctggaggactggtctcatatcttattaattataatggtggcgcacagcacattataggtatttattactaagtggttgggtttaatatcttaagaagcagaaaatgtggtttttcttgagagagagatggttttggatgttgttcctctagtatattctaagcctgcccgcctggggctctgtaactatggctcctaacgtggggagcccacaatctagctatatcatgttagcgagagctctttgtatactgaaacaataaacttaccatcttgatgagttttacatgtagaatggcttaggttataaggtactgccacctcattccactgttgagaattgtctaatgcaaagctcactttttaaacatggataattggacagtcatgagtggatcatcgaagggataagcaaaatatatgtcaaactgagaattaatatctatcaaaacacttgctattatttggtagatgggaggttattttatttttaagaagtagattggctgaatggaaaagcaaaatgtggcataaaataaaatgggatattgttcagcagtgaaaggaataaagtactgatatggactacaacatggatgaaccttgaaaacattatggcaaagtgaaagaagccagttacaaggccgggcaccatggctcatgcttgtaatctcagcactttgggagaccgaggtgggtgaatcacttgaggtcaggagttcgagaccagtctggacaacatggtgaaacccccgtctctactaaaaatacaaaaatcagttgggcgtagtagtgtgtgcctgtaatcccagctactcaggatggtgaggcaggagaatggcttgaacccgggaggtggaggttgcagtgagccgagatctgccctccagcctgggtgacagagccaaactctgtcaaaaaaaaaaaaaaaaaaaaaaaaaaagccagttatgaaagaccacatattatatgattccatttatgtgaaaagcccacaataggcaaatctatagagtctgtagcgatagaaagtagtggttgccggcagggttggggtagaggataggtagtgattgctaataactgtgagtttctttttgggatgctgaaaatgctctttatatggtggtgatgattgcacaacactgtgaaatactaaaaacagaaccgtaaactttaaatgggtgaattgtatgtaaattatatctcaataaacctgttttaaaaagtggatttccctttaatctattctctgaggattgcttcagggattcaaaatagtgcatagtgccaagttttaaactcatattgatttgtttttggtaaataagtcatgcatgcttaacaatggtgaacacacttaaggaaaaagtggtaacacaactagagccaccaaaccgaagcaagtatatttccacctaacttcatgcacgtttttttctcagaagctttaaaaatttatactttctcaaatgttgattaatgagatatctgataagaaataacagggtactgacagtcctgattgtataaataggcattagggattgtgttcatggtttgcttgtcagcacaagagaaatgtgtgattatgttgaatgatagttaattttcttatccacccattttaaaaataaagatgtacagctagaaaacaggtgcccagggaatagaggagacctgcagctttgataatgagccccagaaagaaactagaaggaacaagctcccgcttaggaggtgccgttcgagtcctggccagtgtctgactgtagctgatgggtttagagaactgtggctggcttctcacaaaggattttttcatttactcttgttttgtgtttgagtatagacagcttttcccatcctccatcagggtcattgtcccaccttctctgactcacttattgtgtcaacagaattaaaagagcagccggtggacgtgtgtagaggctgaaggagagctgtgttgctagctttgtatttgaacggttcgtacacaaacagttctctttgattaagtatccggtgaaaccaattcacatgaactccaattaaactttaatgaacaagtgggtgtattaatatcagctgagtaatgcaggcagcacagattccagtaagtgactcacttctctgagcagctcattccccatgcacggttagagttactagaaagcttccagctatatttgagtggatctggtctgggccttgtaattctaacaatcctcagggctcgctattcatctagtgacaaaaccacagtcatccagacctctgttttcagagcaaagattggggatgaagagttttgttcacattgagcaattaggcccttcgttgagcagtgaccatttggacttttattttcctcatcttcccatttttgtttttttgttattttattttttagagacagggtctcactctgtagcccaggctggagtgcagtggtgtgatcacagctcactgcagcctcagcctcttgggctcaagcaatcctcccgcctcagcctcccgagtaacctggaacaacaggcatgcaccactgtgcccacctacaaaatttctgtagagatggggtcttgctatgtcgcccagcttggtgttgaactcctgagctgaagtgagcctcagcctcccaaagcgcttggattatagatatgagccccgtgcccagcctttattttgtttttaagtgagaattatttttttcttaaacccaggggcagtgtaggtgaaggttaaggcagtgaagatagaacagtcagttttgaaatgcacatagccttcctgagcctcactttcaccacatctgccagtctgcctcaagtctttaagtttccctacaccagaggcagcaaggtgtgcctggaatgatgaattcctttgagcacagaccctgttccatctagagactgatgactgtacctatttcctaggaaaggttaagcaagatcgtgaatataatgctcttcgtttcatgccggcacataataagttcccactaaatgtttaacttggtccactgggggaaggatgagaaggaggatttggagataaatgagacttggcccttgacaattcaggagcttggagtcttatagagatttgacttaaaaatgtctgtgtaactccagagtgataaagacaaaaatgcttgaaaaagataagtgaggattcgggggatggaggaatcccagaggttggccccgtctgagaaggctggaggttagggtaggaagaggtaagggtttgggaaggtagttctaggctgactgaagagtgtgagcaaaagcagaggcagggatgtatccaggtatcagatagtgcacatttagtgtggttacagtaggtgataatttaggaggctgattgaaactgaatttagcctctgccttagtcaccaagtcctttcccagctccacttgctgttctctctctcattctctcctacctatattgaaaccagttgaaaataatggagtcacacagaggcagatggcaataatgtccaggttgtggaacattagctcattgggcttgctaatgcagcacccatgaatgaaatttaccctcttcctctcagatagctcctgcactcaataactcccatttagggcacactgtgcataaagctcccaaccatgaagagcagggaggatctgcctctaacagtcaggtaactcacaaagactggaaggaagtgactgggttacacatggccagtttcttctccaaactcaataattgggtaactctctgcctcctcatctgagaacaagggagtgggagggaggcaaacaagaaaagagaagaagcagtggagaaaggagacgttctgcagtgccaggcttcttgccccacactcttcccaaatgtcaacatagttcctttaggggaaaaaagtgggaggctagaatggtaggacagggccacaatatggaagtgaaaaaccaggggcagtttcctgagcagggaatgatgtcattcgatctataattcagtctggttaatctacttatgcaacaccaattgaaggacacacttagataactcagccttgagtcaacaaatcttgtgtaacactgccaaggtccatagtgcaagaatcagcccccacttcggaaataacaaccacccctcagtgccaaattttggacattgcttgtaaatttcagactccttccctccaagatactgttttagagaatgtcgtagggtaaaaaattccaaggggtaaagacataaattccgtaatactacaatagatgggaggctctaatcaagtagataaattctatttttggaattgtgaataaagcagaaaagattcttggaaatcaggaattgaatagattgatggtacaaatgagagactatatgttgcttaaagaaaacaaaagattgcctatcaggttttaaaatgtgagtcagtagtttatatagtgattcaagctgaacagctatcttggttattaactaaaatcttttctttccccttccattttatatatgaagaaactattaatacaaaagtcattatcaaaggacactggggctaggtttcattacccagcttaatccttaatttcatattgagcatttcatattgaagtgaaacaataaggatatgtttctagagactgatgagacaactgaattggacttggttttgacattcaaagggatcaggtagaggtacttagttgagctcactacttcattttggcaaaagacatatgtcatagaaatgtagtagccatgatggattatgtatctttgaattgggagcctatgacaaattttctccaatgggaagtttcttcagagcctatcattgtttcaacaataattaaagtaatttacagagaatgtgctcatctacttttacctactgttatcttttttccaagttaataaactgaatatattgtatagattggttgatagccttcctgaaatgaacatcctttgcaaacctatctctccaaacccaaatcctgcccaaatttcccaattgtggtagcaagcccaatgagctcctgatacgatcctaataggatcctcttctctggaaatcctcgacagatcacacttctcttttcttgggaacagctttctgtttccttgtccagaatggatgccgttctgttatcctggtcactctctgggccccctccctttgtccaccatgagcacaggctactggccactgatcctcctgggggcactagcctggctaccccattgcttattttacctttgcttctcttaaataccattgttggtgattgctccacacagcaattgttctcacctaagtctgtggataagactcacttagggaggttttaccagaattcagctcatctccctaaatgtttgggtctggactagggcacacacttctcgtgaggcgcttctcatgagtaccccttctcaaactttacgggtatcaatttacttatggcctgcagtgcataaagtgaaagctttctgaaaagacatttaatccatcggtatgaggatgaaaaagacacactcagggcatgaaaagagtgagaaggtcacaaaaagggtgtggtctcagctggagaggaagctgaacaatcctataaaggaacaaaagctcagcgtcctgaccatctgtttctttctaccccaggcccattcccatcatgagtatttattctgcccagtgtgggatgggttctgttctagaagtttgcatgagcagagggaagcttagccccatgaggccagtcatgaggctccatcttattctataggcttcagcctttttatgaagacctagcttctactcttgccccaggccctaagcaggcccagacttttcccatatacacacactctctctctaacttatgtgtcttacatcttaataaggcagcagattgtatcagaatcagttaactctttatcaaaaaacccagagcagacagacgggtgaacttgctcatgggctgagctagaagggaggccacttttccttcacacagcctcggactctccctgggcttttttgtgtgtgctgcgtggagactgtgttctaacatttcagtcatatcttccttattttaaaactacagaattgatcttaccaacttactggggagcacgtcgtcagtaaattctaatggaaaaacctgtctgatcaatgggacaggaaagcgtcacagcaataccggtgagtcattccaagaccaggcacatttgagctgtgttgcttcttcgatgctgactataattctccctcagcattacgtcgtcttaagcagcttttgaatcttcgtctctgattccctttctaggtcagactgtgtctttttttaaaattgtgcctggatatccccttaataggttggacaagtcccgttaggataattggctgtatgaatatgcgaaaatagcaacagtgaattttaaagttcttgaatagtctccccgtcccactgtgaggtgaggcatctggggtgggctatctgttttttgattcttggttcttgtttttaaaaaaataggatgttggaccttgggatgagagggaagtaaaacagttttggaacccttttagaaagcaaactaagacaaaactcctttcttgagaaaaatggatggacattgtaaagaagacagtagggcaccaggaagccttgagccaggtctgcctgtgtcacatttcgagttatgagcttcaccgctctgctgtctgtctctggagatcatcatcaaacccctttctctgagttgttgaatggctcagatgagttaatgcctatgaaagtactctgtaaacagaaaaataccttcctatttgtaatctcaacaaagggacttttatcatccctaaaacagaacagacatttctttttcaattatgaaagttacatagactctttttaaaaagttaaatgcacaaaagtatgatgaaaattaaaataaccctaatgagtccatcatccagggacatcattgttctaatttaaacatttgggtaatctgttctctttttttaagaagggttgtgtgtgtttattttttttctttttttgtgtgtgtttgtgtatatctatgtgtatttttattctgttttctttacataacactgtattgtaaacattcccaaaatgtaaattttaatcattgcataatattgcattatctgatatatgcacatgcattttgagattttgtgacgaacgattgtgactattgtttccataattaagggttagctgcttaccaagaaaggaacttactttaaaacatggcaggcacacttggccatttttttttttttttttttttggcagtaaaggaatttgaagtatccagttttttaaataaattaatatgtattgaattggagtttagcagtacttttagttaagatctcagttaaggtaaaaaggtcagacctgtagagttattaatttgtagaaaattctgactacagcaaaacatattagcccaagttctctttattaataaaacattagttacagaaatactaaaaaatagattggttggtctcctgaatgtcctgcgttaggtaagttgccttatgccatctggaagactttttattttctcttcatagaaggatacaatagatttgttttgctcaaagagttcattttctgttgctgggcacatatataatactgtaaacacatttctggatatgacgacataatgatgaagagagacctttgaatattttcttaaatgaagattgaaggagtagtaagctgtgagaggagatttttctactatttcagtcctaagattgatcttttttgtcatggatttatccctttgtctctatgcatttctatgtgtctgctcagcatcttatcttctacatttgccctagttccatccttccttttttccatgcttgtttttccatacacctgcccatccaccctcctgcctctctatccagtcgtccgtctaaccatttctggcaattcttacctccctgtttcatgtatatctctccatttttacctgtcatttatatttatctatttgcctatccatatctacacctgcttgtctgctcactgtctatctataaagttaatggagatgattttgatgaaaacttatgaatttctttattgcattttacactgtgggttacaggggccaaaggccatggggaccagaaagtggaaataaccagagctcggccatttttgtttcatttcaaaatcaggagggaaggtcagaactaacctgattatcctttctgtgatgctaatcaggatgttcttagtataatgccttttggagactgttattttaaggaatgttttgctaagaatcagttgccaggacatagaatgaagagctattgtatagcttcagagtagttctcttttaagaaggatataataaattaaaaataattttcttgaggtcagactaaggaaaagtcaaagatatacaattgccatctctccaaatttattgattttatttatttattatttattattattattatttgagacagagtctcactttgttacccaggctggagtgcagtggcacgatcataattcactgcaacctcaatgtcctggagtcactgaagcctctcaagtaccttggactacagttgtgtgccacaatgcccagctaattttttttgtactttttttaaagacagtattttgccatgttgcccaggctggtgttgaactcccgggctcaaactatctgcttgccttggcctcccaaagtgctgggattataagtgttagccactgtacccagcccaatttactgacttaaaaaaaaagaaaaaaaaaacaacaacccagaacatattgtaacattctcagggagtttagagacaacataatgaaggtattttcaaggtttggggagctgcttggaacttgattttggacaaaatggaaggaaaacaaccatcctttactgaaaaccatttttcttctgattctgagaaagctgctttgcatttactctctcgtttaattctcccatccttccttcaatgtaatttctattatcccaatttataactaagaaacagagactcaaagaggctaaatgatttgcctaagtttacatgattaatgagtgccacagtttttgtggaacagagacttgtttgaatctaaaactgttactctttgcagtaaaccacaatgaaaccttagctatatatcagttctccactttaaattttatggtaactcaacctctgaaaaggatcctgcaaatagcacagttttcagttcttttcttgagagaaggcagggctttcatatggacatgataaagaagacagctcttaggatgtggatataagattgcatttatgaactttactttagtatttgacagaatggggttttcctcacatgctgctgtgtgtttttgtttaacctaatctgagtctcattaggcagcttgatccagaagacagaaaggtctcctccacaagatgcaccttatgaagcaaacaaaccaatgaaatgcagtaactcccttcaaacttttgtaagctctggaaagccagaaaagacagctattgtaatatattttgccaggccagctgttatcatcacaaacaagcctgaaatagcaatgacttttgaaatcacagcacatttatttacttcttaacttttccataggtttgaaagcttgctccctccctttttatcatgctaaactgtagttgctaacaacattctattctgggtgggaattagctttggcataattaagaatggagatgggggtggataaaagaggttctgccaaaggacttgtcttatatgattttattcttacttttaatctgttttattctttaagcatgtattaactgcctactacgtactcaacactgtgctatgtgggaaaaatatactagaacaagggatggtcaactttttctgtaaagggacagatggtacacagcttagatttgtggtccataaggtgtctgttgtagctactcactctgctcttagataatacacgaaacactcaagactccaccataaacaatacataaataattgcgtgtgaatatgttccaataaacttttattcacaaaaacatgcagtaggctggatttggtctgcgtgccacaggttgccagcacctgtactaaaatgtccctgaaaatagagaactttgttttgttcattggctgtgtcaccagtgcctagagtagtacctggcatgggataggtgaccagtaaatatttgttgaatgaatgaacttataaatgaatgaatgactcagactccttctctgatctcttctatacttaaagagagtacaaagaactgtgggaggtaaaaggtactttcctggaagagagagtgtggagggtcatggaatcagttggtatttgagctggaccctgaagaataggtaagtatatgtcaccagcggtggtaggagaagcacactgcaggtaggagaaacatgcaaataggataagaagcagggcacttgtggtgaataatgaggagatcagatgttttataacaggagtttcctgacttgcttgatcttcaaaatcacctgttattaaaaataggttcccagtaccctccctggagattctgattttgtaagacagggttggccaatgataatttacaaaataaatatttgaaaaggtgtatggctttggaaagttatactggaaccatttctaatgggaaataaagttctcacttttcttagtaaaaggactagtatcaactagtaattgctggacctataattaccctataccttctgtgccatagaatggaggaagtgccctggcggaaatctaccctacttaactgcctgtcttcatacgtcccctgttgatgttgtaggagtaccccagcctttatgatggaacagtgtgtaatttagtcagtaaattgtagtcatataaattataataaatgtatcaaatttgtagctactagctttgttgcttttgaatttctgggttggcaaacctctcagagggcaaatagatttaaatggcgtaatagaaaatttgcattctcttgctgtacctccaattcagagtgtagtgtaatgcccagatttgtttgtagactaagatcactggaagggctgtatagtttaagcctcttttttaataatggggggaaatctgaagcctaaaaggtgggcagggacttgctcaagttctgtcaccaaattattttggcagaaccaggagtataatgcgaatgttaagttactaaatttagttttcttttcatggtgccatgccacatgtatcaataaagttcctaatttacatactttctctcccctttaaatctcacagctttttgctcatatacctcttgtgtactgcttaccataaagttatatcttaatatcttatcctgaacgagtagcccactgttatcccaaataaaggctgagctctgtttccctggagagcttaacatatttcctggcacttagcatgtgttcagcaaataattgtagacttgaaatatcttgagcatcttttcttttcccatgtgttttgactcaagttcctttgcagttatattgtcagaaaagtcaagctcttccagaattgctgaaatacaaagataatttctcttaagcttccttaaaaaagttgaattccctattatggctgagacctttcttaacagctcttctgatagttaaatgtcagttgcttcaaaaaagaaatgtcattaaattatcagggaaataaattacatatttatttgggctgaaatattttaattgaccacttaaaataaagataatagcaaaagactgatacatttcctagcttgcacatttctctcaattgccaggacttttttgtttatatctcttaggagatttcatttttatttcttctgcattatggttatatatgtgcttttgactctcccagtgggtgataagttctttgaagtcaatgtacttaaaaaaattaatctctatatacccacaaagcctagctctgtaggagctaaatactaaatatatttactttaaaaaaattgttaggaaaaggtcagtgttaccttgatttcagtgttattttgcagccctcaagtcaacaaccattttactgaacatccagctttgtgcctttctgtgagcttaacattggtagcaggtgtggattgggacataaaaaagtaaataaaacatagttaagttgacataacccataagtataatgtgatgtggaaatctgagataggtacaaataacctgtactagaatctggaggcaggttaattctgacaaggtgagtccagagaggctcacaaagtgtcaatatttgagatgagttttactgggtcttggtcttctatttcagttgctggttttgatttttctcaacgcaacacacacacaaacacacagatacacacacacacgcaaagtgatttgttttctttttataatctctttgactatagacttaagagaactgcctttatgtaagattaaaggaaaagaggagcaggttttattgtgttatttgaaggtttttcagagtctgaaacacacagcgaccgaaagtatttgggatggatgatgccagtagtgtcatgaaacaaagtacgttggccagagagagacatatactattgtaaattaacggtgttcttttccaaggattttctcgtttacctgttgttgtcttcaatagtttaattacactaaatattctcgttggtgcggggagcatagtatggtggaggaagtttcaactttgaagtcagacagttctgtttctgtacctaacttttcacttattgtatatgtgactgaaggctgttgcttatcctctctagggttgtttcttcatccttgaaaaatgttgtgttttctttttcttttcttttattttttttgagacgtagtctcactctttcacctaggttggagtgcagtggcgtgatctcggtttactgcaacctgtgcctcctgagttcaagcgattctcctgcctcagcctcccaagtagctgggattgcaggtgtgcaccaccatgtccagctaatttttttttttttgtatttttagtagagacggggtttcaccatgttggtcaggctgggcttgaactcctgacctcaaatgatccacccaccatgccctcccaaagtgttgggattacaggtgtgagccaccgtgcctggcctgaaaattgtgatcatggaaagtacctcacagaattgtgggatgaatggagctaatgtttgcaaagctcctatttcagtgtccaggatatgttaggccatatgcctacagagtcaggcacattttcttgaaacacaaagccctttatctagcttaacctcttcccactttagagtcgtgggtgcaggaaatattttgttttcctctttaccgtaaggaaagtaacagtgctagtgtgttgttgaaatgccatgctctgggcatgtgtttggggagagagatgcagtgcgtggtggggaatgggaggtgctcaagagggcatcctctctgaaaggggtgacagccgcttggcgctagctaattattgccacgtggagatgcatcattgccagatttttatgtaaactctttggtttttaaaatgttggcagctcattcaagtatttttaaagcactatgagagatacttcctcatggaagaagaaaaatgcaacttacaatcttactcagtagcatcaactttggctcaaaacaacaacaaagcacgttgtaagtccacactgcaaatggcaaacagaacccgtctaaggaccagatttggcctgcagccctcaatttgcatcttctgtgcatatttttaactggtagagataacagtaaatgatggcaaaacttactgagtcctttgcatgtgctagaaactttgctatactttgcatatatcattcaattctcacaataacccaaagaggtgtctattactattattatcccattttacagacgtgagcattgaggctcaaggaaatgaagtatctttcctgaggtcacacagatgaaatgtgacaggtagctttgaaaccaaagcctgttctcttttaaaatcatacataccagtggatctcagtcctggtggtatgttagaatgattggcgtgcccttaaaaacagtgttgtccaaagtccacccccaagctcattaaatcagaatatctgtgggtgggactcagacgtggctgttttttcgaaagcctcaaatcaatgattagaaatagctgtaagatagataaaatttgtgcctccacatctggcactacctatctcctgtactctattttatttttgagtatttattgttctctgaaaattatgtgcatctttacctgtttatgaattttctacttttaccacactgggatgtaagctccgtgagcgccaggatttagtctttttaagttgtttgttgtatccccacctaggtcagtgcctggcacataatagatgctcagtaagtatttacttgaatgaataactggttcttcatcacagggagcttacactctagtgagggagatagataatacattcttagtcctatgagataagctcataactgggatgttcaatatgactttattaacacagggaatacagctgattatctcttagacattgttaggataaattgtttctatacgtattgaatggactgtggggcatttttggtcacctgcactactacactggatccattctgtgctctggggtgtaagtgtgtgtgtgtgtctgtgcgtgtgtgtaatttcgggaacgggtaacacattcgtattacctctgtttggacacgatttttagtgacagagctaggaataacaggtggaaccttctaagttttgttgcttaaatatcaggccccctcagaattcaggactgatggtagaggatttaccagtttacagggaattcagatattctcttctctttctaggaaagccaaattgttggtcattctgcccccaacatttacagaagcagtttctcggttttatttatccaagattcttatgatgaatagtgttaatatcgcagcacactatgggctgtgatatgcctatatcacagagaaggcaagctgtggtgaagtggaataaatgaaaaactgtctataactctgcttctagatgccccacttaagcaagtaaatgggaatgtgagtgacaatatcatagggataaccttgaaagagtgctagtttttaaacaaaaacaaatcatttggaacgttaggatttaaacagttactgataataaattgcttgtgacccatctgaaaattgatggatcatagtgatagtgaaaatatttaacaactgctatggcccaggcaccgaacaatcgaaaccaactccagtgtaaacagtggtgccatcaagtatgcgctggttgtcagccttgctggtggagtcattgtgtcacgatgaagcaactaagagccagtgctgcacaaagtgttgagagaaacaaacaaaatccagggtgctccccttatgcggagtagagagtagatagagccttgtttcagaacgataaaacttcggtcaaggacttgatcttcccacttattgctgggggctccagggcaaatcatttgttctttctgagcctgagttgttgtttcttcttgttcttcttgttcttgttcttgttctcgttctcgttctccttctcctactccttctccttcttcttcgtcttcttcttcttctctcctcctcctcctccttctcccttctcccttctcctttctccttctcctcctccctcctctccttctccttcttctttttcttcttcttctttttttttttttttttgatatggagtctcactctgttgcccaggctggagtgtagtggtgcaatccctgctcctgcatcctctgcctcccaggttcaagcgattctcctgccttagcctcctcagtatctgggattatagacgtgcatgaccatgctcagctaatttttgtatttttagcagagatggggtttcaccatattggccaggctggtcttgaactcctgacctcaggtgatccacctgccttgccctcccaaagtgctgggattacagtcatgagccaccgcacctgtccggagcctgcgtttcttctaatatacagtggaggagagtaatttttgcattacctactttgcaggctctggagttagattgagcgcacctgaagctaaggttaaagatgatggctatgggcatgatgacagtaattgttcttctctggttggggactgattgatgatccctgatttctctgtttaaacgttgcccaaaacaaaggttgagaggtccttaggggagaggcgagataagcagaggtaggacttgcctttcttctgtgcttctccagaattagttgtgtcctgtggcatccacagacaaaaattgagcaatctccttcatagttgagattgtataattcgataaaataggtttaaatagccttatgcctgtataatattcatgaaaagtgtcatgagtgaggtggcttgcttgttttgaaaatgggctgattttgacaaaggggaaaaatcgggattcatttactgtaagttgaaagtaagaaacaacaaagttgaatattagaagaacttggctatcgcaaaaaccacatactttcacatcagtaaaacatggagttctgatctgagtgaaatgtgaaacttcttgcagaccacagagagtaaaaaggagtacttttgtttcattattaataccattgtccttatttctttaaatgagaattgataatacccataacagaatctttcacacaggccaaaaacagaaagataaattaaacaaaacaaacaaacacccaaaacctcaccaccaccaccatgactgccaacaaaacccagtgctgtgaggatgcatcagctttaagatctctttaagtcattgtgttctagagaaaggggttctttatttgtttctatcaggatagagtgagtttttgttaaagttgtctttcttttttttttttttttcttcttctggaagactgacgaagttggccttttgggatattacaagaaagataactttgtcttctaatgtctgcagtgatatgaggcaggtgactgtgtgtattctgtggtgatccatgttcacaaggagagacaggccaaggatgcccggttgatgagtgcgctataggtgcttgggagtgagaaggcaagaaagcaaagtgaacttaaaaaatagctagccagtggaattgagggagaaatgctcattctttgctgacacatgaaataattgttgagggagagttgctcaatctttgcctacacattgaaataattgtgttgaagagtctatgaaaagggggtcaatagatttgagttttcatcactttggccaccacctaattatagatggcctccactgtgaaatatgtgagttgaaatagatttttttaaaattcattttctggactggcatttagaatttgagtttattcaatccttgcttcttgggcagttagggtgtcaatggcaataggaagggtagctgaggccagagtggtgggggtagatgttgggtggaatgtgtgtggttgagcagagcattattattattgctattattattttttaaaagaatccttatagtaaagagagccaacattgattgaatatatgttccttgccagaacttgggctaagtgctttattataagttatcttatttaattttcacagagacctgttgaagtgtaagttttagctttctgtttcacagctgtggaaactgaggtgctgaaaggatgaagaacttccaaaaagtcgaagatattaagcagctgtattagtcttcagatcctgatatctttctcatagttattctgatatgccgtattaagttgcagaattgaggccgggtgcagtggccccaattttttttttttagttattcttattttctaattattttatatgctctctctctctctctctgtctactgtcaaatcccggcactatgggagtctgcagtgggaggatctcttgatgccaggagtttgagaccagactgggcaacatagtgagaccccatttctacaaaaaaatgaaataaaacaattagttggtcatgatggtgtacacctgtagtcctagctactcaggaggctgaggcaggaacattgcttgagagttcaaggctgcagtgagctatgattgtgctgctatactccagcttggataatggagcgagaccctatctctaaactaaactaaactaaactaaactaaactaaactaaactaaactaaactaaactaaaagtaagataaaataaacttacggagttggaacattgcaggctatctatctggcttccctgccctgaattcatcgttctctttgatgtgctattgtccaacatttcttttttttttctgttttttttctgttttctgtcttgctgtcacccaggcttgagtgcagtggcctgatgttggctcactgcaacctccatgtcccgaattcaagcgattctcctgcctcagccttctgagtagctgggattacaggcacccgctgctatgcccggctaatttttgtatttttagtagagacagagtttcaccatattggccaggctggtctcgaactcctgagctcagatgattctcctgcctcgacttcccaaagtgctgggattacaggtgtgagccaccgcaccaggcctttccaacatttctttaaagaaactaaaaattaatttgaataagtaacacaaaaatatagtttaaactatagtataaaattcaaaactatgcaatgacaagtacatctttattttatctctttacttctcccacccagaggaaagtataagttctttatatatccttttagaaataaactgggtataaataagcatgtgtatacacacacacacagaaacacacacacaaacacacacagatatgtatttatattccagtgtatataaatacatttatatacatgccatttatatacacatttgcatttctgttattagcgactctaaacaccatttgaaatgagccgtacccatttgtaattccgttttctgaactgtccttcacttccttttccattggattgctgaatttttgcttattgatttattacagttaagaaaattaacttgtagtctgtgacaggaattgtaatgctttaccattttgcatttcttttttaacttgcagattaaaataaaaagttttatatagttaatccttttttgattttatgtttctttgattttgtgtgatgcctagaaatgccttccccactttgtgatatttaaaaagaaatttccaatttttcttctagttatttcttctgctctttctcaaatctttgaaccattgaaattttattttggtaaaaaatgtgaggttaggatttattttgatatttttctggatctgcatttctaaacactgtttattgaggagtccatctctttcacactgatttgaaaagctacctttattgtatattaaatttcttaatacttaagtatttaatacttaagaacaccgtggaatactatgcagccataataaaggatgagttcatgtcctttgtagggacatggatgaacctggaaaccatcattctcagcaaactatcgcaaggacagaaaaccaaagaccgcatgttcttactcacaggtgggaattgaacaatgagaatgcttggacacaggaaagggaacatcacacactggggcctgtcatggggttgggggacgggggagggatagcattaggagatatacctaatgtaaatgacgagttaatgggtgcagcaaaccaacatggcacatgtatacatatgtaacaaatctgcacgttgtgcacatgtaccccagaacttaaaatattaaaaaaaagaaaaaaaaaagaatttgcatctatttttagactttctgttctattcatctgtcacttcatgtgtcattattatgctttcaattattgtagctttataatatgttttattatctgacaaagattccccattcctattagtttctctttttcagaaaatttctggcttttaatgcctgtttatttttcattgacctttataatgaacctatctagttctggctgggcgtggtggctcacgcctgtaatcccagcacttcgggtggctgaggtgggcagatcacttgaggtcagaagttcaagaccagcctggccaacatggtgaaaccctatctactaagaatacaaaaattagccaagtgtggtggcgggcacctgtagtcccagctactcgggaggctgaggcaggagaatcgcttgaactgggaggtggaggttgcagtgagccaagatcccgccactgcactccagcctgggtgacagagtgagactccgtctcaaaaaaaaaaaaaaataaaataaaataatgtaaaaaagttctgttgatatacttatgaggtttgctgggtttatttgttagcattacatgctatacattgtaaaaatgttgattctttttcttggaatactaatgcctttccatttgttgaaaccttctttgatgttcccaggagcactgagatttttcttcatgtagaccgtgcctgtttctaataagttaattttgtagatattttctacttgctctagttaatgtaattattttctatttcatttaattatatgtgtgtgtgcctctgtgtttggggtctggatttcagtacattgattttctgctcagccactttactgaattgtctcattatttgaataattttagataaattttttttgagtttctagttaagtaagtatattatctgccaataatttatcctttctttccaatttttacaacacttatagctttcttctaactgtactaatacctctagaatagtaaatattaaataactgtggttgagtaaatgtccttcttttgtgtctgagtttaatgggaatgctcataatgttccctgttactagtgacattggctttcgatttgagaaatgtattgtgttgaaaagtatccacacttattttgatagtgttgttattgttgttgttttaattgagactggttgttaaaaggttatctagcttttttttttaaagaaactttgaaagtaatcatatattctaaaaaaattttatgtttttctcttttgtcctgtaaatttgctgtaatatatgaataaaattttcaaacatgaaatcttgttagtattcttgctaaaataattatcaacttgttcattgtttctgtattatatatttttagtgttgctagatcctagagatcattaatatattaatgatctgtgcttcaattttcataagtgagattatttgaaaattctgtgtgtgtgtgtgtgtgatcgagaccatcctgaccaaaatagtgaaatctcgtctctaatgaaaatacaaaaattagctgggcatggtgtcatgcgcctgtaatcccagctactcgggaggctgaggcaggaggatcgcttgaacccgggaggcagagtttgcagtgagtgagattgcgcccctgactccagcctggcgacagagagagactccatctcaaaataaacaaacaaacaaacaaggaagcttttcttttttctttattttgaaatagtttgataacatttacatgggttatttctttaaaatatggtagaattcccttgtgaaaataccttcacttattgccttttttggagtgaagaacggagtgaagaaagttatttctttaaaatatggtagaattcccttgtgaaaataccttcacttattgccttttttggagtgaagaatgtgtttgctctttaaaattttttacattttttttctgtagtaattggactaattagcttttatatctattctgtgattacctttgttaaattatagtttttttagggaagtcacctatttcaaattcatttgcatggtgtaaaataatttctcatgattgttttcatttcctctgtatttatggttatatttcacattattatttaaagttttatggatttctgctatgtgtatccatctttctggctaaagcatcagagtttaatttattatttatttaaaaaatagcttttgcatttatgtgttggctctaccactttgtaattctttattttctctttaaaatcttcaataataccttctactttttctaggtttattttgttgtttttctcattgtttgaacttggctcttaatttccatatttttatttctgcttttttattcatataaataagatataaattttcctgtaagagatgcttatttgtatgccttaagttttgctaaatagtgtttttaatcttattttttagttatttgactatgcacaggttcttaaaatcccagacccattagaatgtaagctttgtagggacaggaaccttgtctgtttatttattttgggtctaccgttgtgcctgtcatatatttcttaagcacttgctaatgtgcttaagaaatgcttttgtgtgaataaataaatctccagggaattatggaatttgtggctgattcagtcctgtaactctagttcgtttctgcctcatttggatattctctctaggtatctactaatgtgtaggaataagaacatattagacatgcttcaaattacctttttaggtcatgatattaatagatttattttaaaagtctacatagtttttctcaaatcaagtatacctgggtaaaaatgtctttctaaagattagcctgtctgggcgcggtggcttacgcctataatcccagcactttgggaggccgaggcaggcagatcacctgaggtcaggagtttaagaccagcttggccaacatggtgaaacctgatctctactaaaaaaatacaaaaaaaccagccaggcatggtggcaggcacctgtaatcccagctactccggaggctgaggtaggagaaccatttgaactcaggaggcggaggttgcagtgagccaggatcgtgccattgcactccagcctggacgaaaagagtgaaactctgtctcaaaaaaacaaaacaaaacaaaaaaaagattagcccaatctatttctagctacttgggaggttgaggcaggaggatcacttgagcctagaagtttgaggttacagtgtgctatgatcatgctacttcactccagcctgggtgactgaccaagaccctactggaagaaaaaaaaaataagaattgctcaagaaaaaatacagttgagtagaattagaatgctagcagtgttgcaatagcagagatcacatgatgcccatgatgtttgtgaccttggacactttaggctaaattttgcacagaagcccaagtccaggatagaaatgataacgatgaacctgctgtagtgcagggaaagatgcagagctggggggaagcccaaacccctactgatggccactttttcttctgacctcttcctatgtctcatttaaaaaccagtagctttacttcgaaaactcaattttcagatgagaatcaaaacaaaaatgcaaagaaggcaaatgattcataaaagttgctgagtgaattagaactataatgtgggacaaacactccgcctttctgtctctgcagctagtggtatttccaggttcccagggaacctcctgtcccttgctccactgtgcatttttagatggacctgatatttggttacctcccttgtcaggcccaacaatccttgctaaggcacagacttgtgtatttgctgatccctgaggggaaagctgtgattcaggctctgaagtctaagaattgcagacttagtttcttgtctcccgatgaaactgctaatctgggtgccaatggtgtttctgctacatggacacctgcccacacagcatgattagaaattataatgatgacgacgatgagtcttccaggacacccacgttctttgcaagatatttctgctaatcgtttctaccagaatcagttggaaaacttttttttttaagttttttttttttctctgtatctaagtcaaccaaaaatgctggtctaattcaggtatagattaaaggtttgtcctcaccattaatggtgtgttattattcatgcagggcatcctagaaccttgggcacatagtgtaatggaaagcacgctgggccagggagatgtggattcaggcttgagcagtgccaaaaattttcgttatggccttggtaaaggtgatttcccatctctgtgactttgtgtctccttctgttaaatgggcattcaaatcttttgtacctaacttattagggccctgataatcaaattagccaataagtaagaaaatgttttcttaaccacactgtaaattaagaggattcatattgaaatcacttttccattattgctgtcttagcctgctaaagttatatttagtgtagtgcaactaagcagggttgtgagagctgggaaggtagactgttgtattgggcagggtcagggcagataaaggaccaaaataatgcctgaaatgctgtattaacctgctctaccttgaactgctgtcttgaattggggggaaaaatgaagctctgaggggatggtgcacagggagaaaagagagaatctcaggaattgaaagtctcaatggagaagaggtgggagaagaataggaggctagagtgagggcatgtgatcgtggagtaccgatctggagacaagagaagaaagtagaaaaatgccagcactgtctttggaccctgtgtatctggagtgtgggaggacaggcagacacaaatagagaggctctagggaaaacagcattctcatagaagatccttctccacaaaaagccctccaaatgtcctccaggagggtagaagctggttttaaagctcctcagggtcaggaagatccttctcttatttttctttgcatcgtgcagtttaatttagcacagtactttgctcacagcacttaaaaaattattctgggccttgctttttaattttaggcccaaatacctgaaaaaatgttcaggaggaattctgataagaaagagctaacttaggcaattccatttctttttttggttcactgtttcctcatctgaaaagtgttgggctccatgacgtggtttctatgacactcagtacctttgttgaagagaaaacatttttctaaaactaggatttccaaaaaaacaaaaaaaaaaaagaaaaacaaaactcatgaatatgtggatatttttgtgatagtgatgaaggtttgggaatggagtagaatgtttcctaaagtccttttcttttagcagaagacttgagtttgtaaactcggctcatataatttcagcttgcctgtctaccttccttccatctacctacctacctacttacataagtacctacttatatatggagaacacggtggaatttaatttttcttattcttttcgactttggttggcttggtgaatcaagtaaactgtgttgaagaaaaactaacttttgagggaaaaaattgaaaaaaaattatgattctttttttttttttttttttttttgagacggagtctcgctctgtcgcccaggctggagtgcagtggcgcgatctcggctcactgcaagctccgcctcccgggttcacgccattctcctgcctcagcctcccaagtagctgggactacaggcgcgcgccactacgcccggctaattttttgtatttttagtagagacggggtttcaccgttttagccgggatggtctcgatctcctgacctcgtgatccgcccgcctcggcctcccaaagtgctgggattacaggcgtgagccaccgcgcccggccaaaaattatgattctttgaaaaggatttttctcaggttagtttatatagtttcacagatgcttgagataaggattagaaagttcagacactgaatctccacagacccctgtgaatgtgttggctaagcaccttgtcttctcaggaacacacactggaacagactttctttcagtaaaacagggccagaatagtctttgaaacatccaacggtggtttgggaagaggattctctatataatgcctgtccaaatacagaataaaaattttcaacaattagcaaaaatgtggatttttcagttaccaattccttatttggcacagttggtctttctcatcttattcattcattcatttatttcattttatttatttacttttaaaatacttgtttaattcacctttcttgctcccattgagccttttaactaatcaaatgcatttgaaatgctattaatttatgataacagtaagacccaagacatcactttatgtaatatcttgtattgtagttcattgttgtcagctctttttctgatggggttttgatttagctggaggcagtttaagggtgttcattccccaataatgtttgtctgttgaagctggtgagctagactaacagtacaaagagttcctgtgtacccttcacccagctttccctgatgttaacatcttatataaccaaagtatgtttaagcaaagaaattatcattggtgtaacatgactaaagaagtgattatatcttttattggcagttttccagtttttccactaatgcctttcgtttttttcctagatctagtttaggatgctgctgtgcatttagtcatcctgtcttctttgtctcctcctgactgtggctatttctcagcctttccctgtttttaggaccttgacacttttttagtgtaacggtcaggtattttgaagaatgagtgtcttgcaacttgagtctgactgatgctttctcatgattaaattggggttttagatttctgggaagaccaccacagaggtgaagtacgcttctcattgcttcatatcacagcgtacatgatgttaatgtgagttattactggtgatgttaattgtgatagtggccagttttgttttattttattttttaatagaagaccagttgtctgggactatacacactccaacacatttgcaaattggtggcaatgattattgactagtcctcaaactactaacttcatgataatggaaagccgaaactcccaaatcacatggacctcaaagttcaattagaaaatttggttaggacctgacgacaatgttgcgatttgctacagcctgccctgcagtctcaactctggggtcccctcagtggtgagctcagtcacagtgctgcttctgtgtatacttacccagtaaacaacccaggcattggggcctgtctcagaaaccacatctccaatagaaaggagaacacttgggaaagcaggaaggagtaagaaacggaactcgcccattcctgacaactaatccttttcctttctaagtatggcttagtggatgtcagccattcactgttcaggacaggatagggatgaggagagaattctttttcatttgacaaggacattgaattttccttatccatggatcaagactagaaggtatggagaggaaaagggcttctcatctctttctttcagtagcttcatgcactgatgcatcgtacttactgaatgttttaccttctctgtgctcttctcagaggatgcacagaggattgggaagaggaagtattggtgacttgatctagaaaaaagagattgtttcaagccacaaaaagtttgagggtaaaatctcaagtcctgtgtgtgatgaatcagtagaaaaggtatcccagtggccagtgtgagtaagctgtcatattttcggtagtaatccttggtcctgtttgattttcctcatcctcacatataagatggagccatttctccctctggcgtttgccatcacagtgtcctgcagtctcttggtcttgagatagaaggttgagagaaacactttgcagtattgggagaactgggtctgcctgtgggagtacttgtatctcaatcaatattacagaacttggctccttgtttccaacaaatgttttgctctgttctcatcctgggagttgaaggttgaggcgaggtgggagatgtgctgtataatatggcagccactaaccacatgtggctgttgagcacttgaaaggtggctagtgccacatgttgaaaaataatattttggatatatttgtaaaataatttttttcaatgagccttttgaaatgtggctactagaaaattttaaatggtgtatgtggctcctatgataattctattggatggtgctggcttagagcctgggaagaacatggatcagagtcaattgaccttgtgttctcccctgagttctaataatattgtcattaaaaggagaagcttcaacagccataattttcattttaaaaagtctaattcagaagaattggctcattttatattattgcttggactggagaaaaatctgacatttggtattttcataattgagaacataacttgctgacttaaaaaaaaaatcacaacattttgtgcttggccttaggtaccagcctttgagctctttgaaaatagggattgggtctttttctctttctaccatcctttttcccccaaaaccacacactaacacgtagaagatggttaactggcatttgttgaaaaccaaaataactttaaatagagaaaactttgtgaagctaccttgtatttatggttggaagagtgaaatacctttataaggcatcccattttcttaagatagccagcaaaaatgaagaacattgatccaagtgtttatttacttattgatttaattaccattctcatcaggtgtccctgtcatctcagcttatgataaggaatcttttcaagatgcttcacctcatcactctctaggtaaagggggacagaaaaggatgctgcttacatatacgaatccccatctttgctcagatattatgtctaagggcctaaggactggataatcttattttttctgtggcttgatcctttccaacatttaatctatggaggttgtgaggataacaatgaaaaggcaagtttaagcttggactgtagatacttttcactgggtggttttattttattatgcttcattgtgaaccagagcctctgtgaacatatgacttataggccctcaggcttccactgtgtccctttccctgattcgtccttcttcactgcatgccctggtgttgggtgagggagcaggctttatgtgatgtcattttctcagagccctgagctgggaaattcaagagtctccatgattcctagttaggcatggaagagaccctaactggtccctcaggaacatgtttggttggtcagaggtaactcttatagaatctatgatggcttagtcgttcactcttcctagaaaagacctctttaaaaaggccttttggttatatacggcctgagttttaagtaatatttgcaatgttgattctctggtagaagagaatgaaaagttgtgagtgctcttggaagagtgccggacagctgtagtgatgggaaaagtattggccttggagtcagacctgtgtttacttcctggctctgctattttctagttgtatgactctatgcaagtaacttctcatctctgagcattaatttcttcacctgtttgacatagacaatgtctgcctcacaaagttgtgatatgttaatgtatgtgggatacctatctcaggacccaatacttagtctttataaaacactaaatgaattggttttctcatgtatgtcttatggttttgctggtgatggaccaatagtcatcttccatcttcactttagaggtgggggaaaagggcattagagtgattgtgtggtaaaatccactctaattctagctgtgagaaaaagagcggtgaaaatgtggtaagcaattgcttctaaaaagcttggactaaaagcgcttgatggatttgtgctggcttcccggtagactcatctctgtactgcccgcacagcacaattaattgttgttactagagaaggaacaaataaagaaaagagagagagcagacataaaaacatcctttcatctttctgaagacagtcccctttgtcagatcagtggagctgtacctgtgaatcaccttgggaaagcacagtgtgggtaactagaaggaaggtcttgtggctcattttgtacccacttcctgggctggggaaatatctaaactaacctttcttacttgtcaatatctactaccgttcaccatgcatcttcacagatgagggcctctttctcacatcttcactccaaacacattactgtgtagacagccacttattttctgggaagaaaactttgcaaagcagtagcagaataaagtcgagggtaaacagaggccatggaaaagcactagagtttgagtgcagagacatgagtctgagcatgagcagtgaatagctcatgaaacactcaagttgcattctccttatgtggaaataaaataagtcatggttgttctatgcacgtggcacctgaccttgggtccttattgctatgctgctagagtctatgaatcaagatttgccagttgtgatcttgaaatttagtcagattaaaagggaactctgactttgagggtgaatgccccaagtgggcatcttattctcctatggattcagcttgttaggcagaatggaagtggaggtcatagattttagggttttctcctgggattgaatccagctgaagcaggaatgattctgggtgagctatataacgtctctgagcattagtttgtcattttcttacataggaatagagttattgccagatttggagatagtacatgttgcaatgtggttgacacagaataagctttcaataaatgattggtattgttgttgttgtcgttattatctataactacaataatttccctagccttattttatagggataggttgtggcaacatgaaatgtgacttggaaaactgatttgcactagatagatagaaaccatgtttttctatctatataatgaacaatgtcatttaagaaagcttagaggcaattccaccagcaccatcttcttttttatttccattcctagattatttgccctcaagtctttggtaatttctttttgccacatctcttgaatgtttcttctttactatattccatctattattaccataagtccaacgttcatcacctcctgctccactgttgttcctgtctcctggctctcctagagccttggttctcaaagtgtcattcacagagcagcagcatcacccgaaatgcgtcatctcaagatctaccaagacctcctgaagcatgaggcatgttcacccccgtgttgtaggacctccatataactcatttaactacttctcctgctcagagtacatgcttggccagtgcgtgtttgttctgcctccagaatgttttctgactctgattgctatcattacttcttttgaatctacctaaattcaagttaccatccattgccatgactatggcaatagtctctgaaattgtcttctacttttatggtttccccttgtggcctttttccacaccatctggagagatctaaaattgttggtcagatcatatcacacccctccccttaagccatacggtggctgctgtagtatctgcagaaggtccctgacttatgatggtttgacttacaatttgtccacttcacactgagtttatctgggtgtaaccaaccccatagaaatcaaggagcatctgtagaaatgtttgaaaggccctttcatggcctgcaaagccctgtgagatgactctatgttctctcctttttttttctttctttattttttttgagatggagtctcgctcttgtctcccaggctggagtgcgatggtgcgatctcggctcactgcagcctccaccttctgggttcaagcaattctcctgcctcagcctcccgagtagctgggattacaggcaccagccatcacgctcggctaatttttgtatttttagtagagatgggttttcaccatgttggccaggctggtctcgaactcctgacctcaggtgatccacccgcctcggcctcccaaagtgctggaattacaggtgtgagccactgcgcctggcctctctgcttttttcataccactcatcactttacacagtaatctgtagacacactgaccttcctttagccctctgtataagccaagctttttcccacttgatctttctctgattctgtgcaaaactggcttggaagtatctttcaaggcttagctcaaatgttaaagccttacctagctcttccccattctttagctaaagtagcacacatacccccctccccatcattcttctgtcattatcttgctttatagtctacaaagcatgtatggttctctaaaagagtgattaccatgcttttgttttctttatgtacattgcaaactgttttggtgagaaatattttagtaataataataatggtgaagatttagtgagtgtttgctataggctaggcacactgtatggtaaattaaataatttaatagatcatttatttggattatttcattctatttagctgattatatatttatattttttgtgttcctcttgttttaggatatcagcttcttgagagcagggtccatgtttgttgcatctgtatctccgcctgtagaagattctctggcatagggatttttgtgcaggaagtgtttattcaggaactgaatggatctcagaagattatcatttgggaatagatctacatgacaagaaagaacaaagagtctctctcattctttttcccagatatatcccgggagaaaataccctcgactttttcttatctttaatctgagaaggaagcagttgttggaatctgatttaggattggctctagtggccctgtgtgcagacacagatcttgggattcatctgaccatttggggagagaggttcttgaggggcaccttgatgataacgagtctttctaaagctttaagtttggcgtttgaggtggttggaaataccaggtcttccgacttttacgttctttgtgcgcacgctggtgatgtgcgtatgtgaacctttattattatggactcagccagcagtaaccatggtgagtagacctatcacacagcatttttctgagtcagtttaaaatgctgacaattaaatataccgtactcttttaagcaatccatcagtctctcttgttgtcatggtgaccggagtatatttagaaatgtgacaagtacactgagttcaattgcacttttgccaaaacatagttttgcagctaaaattgaatttcctgattgaagatccaagtgctgttaagggggcatgatcgtttctatacattattctggaagtataacttaacgttattctgttaaatccacagttacgagtcttatcaggtattgatagttaaagtggttgtacttaaagttgatgaaataaagtgaaataaaagtgacatgatgctttttctattgaaaatgaaactgggccttactaatataactagtttaatgattagtttctttatatatttataaagacattgtaggtatgtacctgtctgttcttcagaattatatttctaatttaaaattatatatcatggagatcctcccctgtttcctgcttgtattctattcttagtattgtgagggcattcttttttctttgggtctgacctctgtttgataagcattcttatttttcctcaatctcaattcttctggattttaaatgaagtaaagagacacaatgaacgtgactttttgcccaaacaaaggaaaaacgaaactcttctctttattcaagaatgtagattaaattcttactttcttatcatcctctgtcctgtcaacatagtgctgagaatgatgttgtgtatcaactcatttgaccacataaagtttaggaattaatgtagtggctgggtcatgattacaacactgatttcattcctggccaaagactgattcttctgctcttgaggtgagaaaagccagtactcctggatactttcgcttctctatttttatctaactgaatgagtctgcaactgggatagtttatgagcctctaataatatacggttagactaccattatctctttcgtgaacattgccaaaagtgtttttttggtaagagatatcttagttataataacagtttgtaggatttatggagtgtttactacatgctaggcactgtatatagtaagctccttaatggatccttatattggatctacacagaaatcttatgaggtagttcccattgtattcttattttacgttaaagaaacaggtttggagagatactgtcttttgaagaagcatataagtggagcagtagtggagtctgaattctgatacaggtcctagtaaccactgcctgttccatggaaggcacacagtgagtattttttttactgaccagtggcctcttgtatggtgacatcatacagatgtttcagtgtttccagaggctcaagaaagtagcagctatataaagatagacaggtagcagcgtctgaaagtagagatgagctactctttatctttcctagtggtttagagccaaagtagattagtgctagggagagagggaacataagtcctgtctagttcagtggtttcatctctgaactcctttatgttcttaaaaatgagcttttgtttgcatgcattatgtataatgatatttaccatattcaaaaaagtaagaaatgaaactacaattttaatgaaaaatatttgtataaaaaataaatatatttgtgaaaaaatagtgacaaaagtgggagctggattctgcatttaatttgttgtgaaatattgttttgattgatgtttatgaagaaaatccagtctctcacagctatgtatttgaaaaaggaaggataaaaagtaattgtggattttcttctttgatactataccaaaacttgacagttttcacattacctaaagttagtagtttcttataggttagtttcaatgtggaatgtgaaatcatattaatggactttttataccctattatattaaaatccattggtcaaattttcactttgattgagtctcctatgattttgtaaaatcatgcattggtcatttagaaagtcgttggtcactcacttattcagttcttgcaaacactgatcatttcattctataatataaaaagtcatcttcattaatatcactgctcattcatcaaaaaagcatttgaaatattagaaaggtgtcaagtgcacagtagtagatgtaaggttttcaaaattctgatttttacttgaaaacatgaattttatttttggctacaaatactgttgttttccttgaaacgataagctctcttgctttatttttgagaaaatctccggcaaaacccacatttaaagaaccatagttcgtcagtcattgtttcaaataaaaatgatgttccatgaaaaaagcgattggttagcagctgtcaatttaaacagttacacaaagtgcatttcttagagacaatcatcgtagtttgatcttcagcaggtgtttcatggtacttcccagaggtcacacagaatgtaaaaaagatgtgtactcaagaatattaaaaatatgtctactttttgattatgctaacattttatgtgatcaggtttctttagtaaaacctagtcagacagtactcaaggactgagatttaataagattgatacgtttcaatgcattaaagagagtcttaagtgaaactggctccctgtcccgcttattgtatgtgtcttacagtgaaatcactcccttgattcactttaagactgcaacagtttttttacccactgttatttttgtagcattaatgtaaatttcaacacagggaaacggcttcttagtatgattatgaaaataattttgaacttgtggactcttgaaaggtctaagggactcctacacatgtatgggtcacacattaacagccactcattgagtccagtcccttcatttgacaggagaggagagtggtggaaagatgtgtctaagatggcagcacaagttagtggcggagctgggacaagaacctattgttacttaactcttctttcttttcttttgatttcctgctccactttcaggaatttaaaggtaactcaaggaattccaaacttctttgtcagagatggtgatgacaaatatatatagtttgtatatcttttatctgaaatgcttgggatcaaaagtgtttcagacatcagatttttcctaattttggaatattttcattaaacttactggtttacattcctgatcaaaaaacatgaaacccaaaatgccccagtgagctttcagcgtcctgtctgtccttgaaacttctggattttggagcattttgaatttcagattttgggttagggatacaaaacctgtataattattgaactttttgggaataattccgttttttaaaaaatgttaaaccttttgcatattttccctactctccgctcaccactactatctcttctgcttttcaatggtaaccactcatgcctttttaaacaaaacatgtgttgtatttgccaagacacaggggaagcgaagttaaaggtacagttgactgttcattttctgaataagatggaattctagctttgtggggaaggaagaatcagtgagttttcgttgaaggacccatgccattctttacctaaattaaagttgttaaaagtcacaggaaagaaaattgtgcaagcaattatcatcctttatatcactataacccatcttactaggcaaactgtgccctttgctccccaattattctctattaaagtttcttgctctccctccccatccttctctttctctctccctgtctcctcccctttccttctagaaagaggttgcccaataaaacttgctcttaactttgcttttggttatgttgatattttatgtgacttgttttcttcactaaacagtagtcagtctatgagactgtattgaagaatgctgagaaagtcaatagaagtggacttagaatactacatgttcttttaaatatgtctcttatgttatagagtaactttttggggagctaaggtttgcagacaatgctgcgtgtgaacatatgtgagtaaatctgataagctgtggaaggaggcttgcaaactttcaaatgtattgtgctttcattttcaacttaattggatgttcttttgcaaggtcttgtttttttcctagttctcattcaccgttcagttgccttcccccacctgtgagctttttgagtcaaactttgtttattagcttttttcctgattcttctttcatgtctttctttcctatcccaaagtatgatttgattagacctcaggttacccttctgaatgagctcttcctcaatcctaggcctggccaggcatggtgcctcatgcttataatcccagcaacatggtaaaaccttgtctctacaaaaaacacaaaaatgagctgggcatggtggcccatgcctgtagccccaactactcaggaggctgaggtgggaatatcacttgagcctgagaggcagagattgcagtgagccgagatcgtgctattacattacagcctgggcaacagagggagatactgcctcagaataagtcagtcagtcagtcagtaagtaagtaagtaagtaagtaaataaataaataaataaataaataaataaatacgtaagaatcctaggccttggtgacttactctttttaattttttttcccacaaaactgatgtgttttgcccttactttcaccagaagaccatttagtcttcttattttttcttcctgagacttctacatttgtttttttctagccatttatattaggctcgcaaattgcatagtgatagctgattgaccccttcaaaatgcctgttttctgcctccttgtctcagcttcttgaggatggtgctatctcatgcttggtgtatcataggagccccatggatatgttgaatagattttgctcaggggtctcctctttagagagcgttcttcacatttttatctggagatctgagcttttatgtatctcccactattgggctgctaaatctcccaaacccagaattgcaatgtccatcttttaatgcagactcccagccactgccaggatatcacatgtcttctctgacagatggctatgtagcctccacttgaacttttgcagctctttgcaaggcaatttgttctactgctggacagcttcatgtttaatgttttcccttgtattacactaaaactgattttcccattattttaatccccatatttctagcattgcatagtttgaaaaagtataatattgcttacacatgacatgtccccagatactcaaagatagctctaattcccccatctgcctcctttcctcctttagaccttctcttgctacttacatcccatagaaggctttggatgctcatcctcttggtgctttccccatttctacatcactttctagattttggtcctgatgtccaactctaagggactccctcaaggccacattttatctctgatggtactaggagcagtatgagtaaatggtatgtgtatgagtctgaaagctgagatatgaattctggtgcttattagatgtgtgaacttgattaggttacttaatctttctaaacctcagtttcccaagatgcaaaatgaatataatattaaattccaagactatttttaaggattaaagatataaaatgcttagcttagttactaaaatatattatgtttagcttgatcaattatttcatcttttatctatccaacaactccttttctttttcacacatgtgcacttggttttaaaaattatttcaagagttcttccctcctcctttccttctctcttttcttctctctttaaattttataacgtatatactcttataaaagttaccatcatgtttagatttccttctaaacttttatatctagaatttaacatgattttcttgacaaatatgttttcttctatgtgaattttcgcagctgctgcctacatttctgctcatgtgtttagcctctgttaatcttcctgtgaaaattgtgacttcatcctgccaatgggttaatgatgactggctcattgcatgtcacttaactcctcgctaaatgcttcacttgatcactcagtaactttacaatcatttagttgtacaatacatttaaaaaaattaaaagttcaattaatttcaatttcacaaacacttactaatcccatcttatatcacatgcattaaactaggtgtgtgttatagtagttgcatagaacattttgttcatttgctcattcattcattcattgaatgttcttttgagtacatactaaagaccagatgctggatagactttgggttcggattcaagaagctgtgttagacaaagagcctctattcaagatgcatgatcaactaaaagtgataaaacaatatggtaattttagtgatccagatataaaactaggcattatggtagttttaagaaaggctgcttcatcgaacatttttgcattaagaagcttcttatcggggagacactaaatgttgagtagggcctcagactctactagaaaggtaagacccatattagggcttggttttgtttgattataaagccattttgtgagaatcaacctccaggctccatgtgttatctttggctcctcaccttcacccccaccctcccaccccagttgcatgcatgccatatttttccttcttcttttcaataaggaagcatcagaatcaacagaataacataaagataggtgtggtgacattataggctcacttctggggcgtcattattacattaatttttctatatttccaagtaagaataacaatgtaagtacataaaaataatctcatgatagtagaacatattgcatagtatttctctattcatcattccctttacttcttgtagaaaagcttagtgcttgtggatttccttaaataagtgtcttaagcactgtatctgatctgatagatattagcacaacaattggcactgagtaattatatttggagaatttggaaggaattttttctctattgcaaagtggtcatgctgtgttgtctgcttttatttatatcacaagaccagatctgccgttaactagatgtctaggaaagagttcctttactactctgtgccttagctttgtcacttgtcaaacgagaatatactaggaacagtatcagttttgcctcactgagctgcagtgaagaataaaatcatttatctgtgtgaaaggacaatgcatacagatggtaacaattataaatattaaactaagcttttgagtgaccggattggctacttctcttaaagtgagttctgcttaattagttaattcttacttattgccccaaactttctgagatagcttcatgtttttttcctctctaccctgaagtgcctgcttgcaagcactatatgctcaatgagcatttgttgaatgaattttttaaaagtatttaccttttttgcttttattattattttaaattaacacataattgtacatgtttacggggtacagtgtgatattttgatacatgtatacaatgtgtaaagatcaaatgaaggtatttagcatattcatcacctcaaacgtttattatttctttgtgtttggaacattcaaaagccactcttctagctacttgaaaatatacaataaattgttggtaattatagtgattctatagtgctgtagaacactagaactgactcctcctttgtacttttgtatccatttaccaacctttggctatcctccccctcctgctacttttctccacctctggtgatcagtattttactctctatgtgatcgatttctttcagcttccacatatgagaaaggacatgtgacaaataactttctgcttctggcttatttcacttaacatgatgtcctccaggcttatccatgttactgtgaatgacaagatttcattcatttttttatggctgaatagtattacattgtaaatatataacacattttctttgcctgtttatctgttgatggatacttagattgattccttatcttggctgttataattagtgctgcaataaacatgggaatgcagatatcttattgaaaatgttttttttttttcctttggatatatgaccagcagtgggattgctggatcttacgatatttctttcttttttttttttttttttttgagacggagttttgctgtgtcaccaggctggagtgcagtggtgctatctggctcactgcaagctccgcctcctggcctcctgggttcaagcgtttctcctgcctcagcctcccgagtagctgggactacagacgcgcgctaccacgcccggctaatttttgtgtttttagtacagacggggtttcatcatattggccaggatggtctccttctcttgacctcgtgatccgcccaccttggcctcccaaagtgctgggattataggcctgagccaccatgcccagccaatatttctaattttagtgttttgaagaacctctatactattttctataatggctgtactaacttacattcccaccaacagtgtatgaattcccttttctttgcatctttgccagcgtttcttattttttttgtctctgataatagctattctaacttgggttagatgatatctcatggtggctccattttctgtatatggatgtccagttttcccagcaccatttattaaagagattcttcttgtttcctttgttgaaaatcagttggctgtaaatacgtggatttatttttgggttctctgttctgtcccattggtgtatacgcctgttcaagaactatcttgaataaaagtggtaaaagtgagcatctttgtcttgttccagagcttaaaagaaacctttcaatttgaacgtgtccagtatgttgatgactgtgggtttatcatgtgaagtgtttattatgctgaggtaaggtatgtttcttttatacctgacttgagatattatatcatgaaggaatgttgaactttatgaagtgctttttctgcatctaatgagataatcatggtttttgtactttgttttgttgaggtaatgtatcacgtttattggtttacctgtgttaaactatccttgtatccctcggataaataccacttgatcatagtaaatgctcctttaaatgtattggtggattcagtttgctagtattttgttgaggatttttgcatctatgttcatcagagatcctggcctataattttctttttacatgtttgtccttgtctggttttggtatgagggtaagaatgcattcatgaaattctttatttttgagatttattcttttttattatgtctatctttgttgaatttcttcttcatattgtgaattattttcttgatttagtaaaattgtctatctgtattttcttgtatctcactgaggttccttaagatcattattttgaattccttttctggcattttattgatttcttttttactggagtctgaaactaaagagctacattcctttggtggtgtcatattttattgctttttcatatttcttgtgtcagtgagttgatgtctttgcatccggtggaacaattacctcttctatacaaactttctggagtggttttcataaaaaaagacttccgcttgcaattagggttggtgttacagttgggaggggtgtgatgactttgtttctgaatagatgcagtgatagggtctccatgcagcttctaaagctacgttcaatgtcagcaataactgtgggcacctcagtagcttaagttgtagaaatttgtggcagtggtggtggtggcatagattattaatgtcctcagtgtcaagggcttttgaggtcctcctattcttatttttttcataatggggagatttagccaaggggactgctcttcatgtcagatatcacatgacctacaagcaagtgcagtggtgctgagttctaggtgcaggtgcttgaagtggctgtgggactagagtcttatgcccaggatcttgccaacctattgtgacacctgggtcttgggttacaggttcactctctgtgctagggttggatgtaggcttcccacagagccaggatttgtgactctgagacattactctacaaactcagtcccagctgtgagtggctcaactccaggaaagaaggagtgcagggaagtttggacccagagagcaggatatgccctgatttggcaacatgagccagtagggttcagtggcaacttggatctcaggggatgaggcaccatgtagtagtgattcttgacccctggatgttgggactcagcagtaccttagactctgtaagaccacatgcggtagcagtaccccagaatggcaacatacagctgttacttgtgccctgagtgggggcagagtacagcacagtggtggctgtatgccacagggagaggggtatcttagcagctctgacactaagcaggtagaccagctccagggaaacagcgtattagagttgttttccctttaggctggagtgtctcagatcagcccagccactgctcagttttccaaggatgtgggttatcacatcagctcagctttgggatttacagctgctcagctgagcgatggcaccaattcaccaagggacaatatgccacttcagctcaggcctgggggacatgacttttctaggcagcccaggtaccatttccctgggatgaagggtgctacttcagattaagtactggggtgcgtgaccgctctgagtggccaatgtactgttttcccaggaggcagggtactgcttcagcactggcctgaaggggagggtgaaaggtagattaagtgactctaccttcacctgggcccatggggaagagtggaacagttgctggcagctcggcttggggatgtcgggccactgggttcgggtggttcaacggtagcttagccttagtgatggagtgtcatagctatgcactcccagagcaagagacactccagccaaagctccatttccaagacggcatagcgcagtagctgcgcaggccacagagggcaggtcacactggttgctctttttcttggggaagcacggctatgtggacttcaggcaggtccctcagctgggacttggctcctgtgaggactacatgagactccatgggtgaggtctgtagctgttcaaggtgttgatggggcttgctgggatccttttgtgtaccattctaccctagagagaagttcctccctgtttccagcagatcccaagtgggtgatgggtggtaaagaccaggtgttttgtttctattctctatgtggtcattctgagtttcttgctatccagggtttctgttacttctctgatgcagtctggtacactgccttagttattattttttcttcttctgtttttagttcatctttttgtttttttctatatagcaatggggtttccctatgttgcccaggctgctctcaaactccagagctcaacagatccactcaccttggcctcccagagtgccgggactacaggcacgaaccatcgtgcctggcccagttatttttgttaaagtttagttgttgattgttgttgtggctgtctttgtgaaagagacgagagctaggggcctctggttggccatgctactgatgtcactcttaaagtacttatctttaaaagtccagtgctggagatttgtaagctacttatatttctgctcagaattcctaaagtctctcattttatttctagattatacattccattgatagagcccttataaatataacattaagaagttgagcattacctttaggccaaagcaatttacttttaaaaaatctgattaatttcaacacaatcaaccagatgtcagaagatttcagtgcctctgatagatgctgacaggtgtggaaattaaaatcagagagggaagcaattaaatcctggcaaacattactttaatgagacaaccaaatcataagctatggaataccttgtattcttgataagtatcttagggtggcatgagagtgcactttaaattgtatgtggtatttgatgactggaatgcagggcagtccatatttgtcatctaattcctttggcctgatttaacatttcagttgcttctggggacagacttctatgtttaaaacattgttttattttaataaatgttaggttaagtaatccttttactactacctctgttgccacatgaaacttatgaaaatgaccaaattattattggccttttcgcagtggttttgggataactgtgaaaagagaaacacagaatgtgtattttatgcaacttctaatcaaaagatttgataattacagcactaaaaccagaacccagttcctccatccccatttcattattcttttcaatatgattccccctattcggaatgaatatcttggacaccagggtgaaagaggtaccagtttattgacttagtgggagtttttataagatactcttatattgcttattgaggtactaaagcacttacaaaatatcaagtattttgagttagctttacactggttcaataacacttagaatttttgttcataatactaagataatcatcttagggatggttacattttgttgtgaggtgtggtggaaaattcaaaggacaccatggtttgtgaaaaacccattgcagctgatctctgcacttttcatttccatgtcattccattttcttctgctttttctttaccccctgttattttcttgcttctctctctttattatcttaccttcatttactccatcctgtttttctccaaaatatagttgcttctgtaaaattgcttctgagggtgagcatatttttgaggggagagaggatggatggtttgacaaaggatgcagacatgtcaggttctgggtcagcagttagttataaaatacacagaggcagccaaggataactggcttcattaccaaaaggctagagtgggatttgtcagttgtcccagatgtctgtatggaattatggaaaactccattgcattatgaaacactcaggagctactcaggacacatgccactcaatccacgtgaagagggctggtgaacttcttagctagaaagacttcagctttcctattgcttaaaatgagactgattggtgaaggatttgtattagtccattctcacgctgctataaagaactgccagagaccacgtaatttataaagaaagaggtttaattgactcacagttccacattgctggggaggcctcaggaaacttataatcatggtgaaaggcaaaggaggaacaggcaccttcttcacagggcggcaggaaagagtgactgccagcaggagaaatgccagatgcttataaaactatcagatctcgtgagactcactcactatcatgagaacagcatgggggaaattgcccccatgatcggattacttctacctggtatcacccttgactcatggggtttacaattcaagatgacattttcggtgtggacacagtcaaactgtatcacactcttcacaaaacttcactggtacagacttgcgtatatggcttgtgcttcgacactttgcccagggatgttgcatcttgaaactttcctggtgagatctgagaaagtgtttatggtaacactgcatcaaacactccttttgccttagcttagtaatgtgtcaccttctggttagaccacagatgtgaagtctactctttctcctttcacttgctaataaagcagaacttagaactaagtgtgtgttagtgcttcgacaattgaattttctgtgctatacactcggtttccctttcctgaagttgtttagttaccctcttcaaatagcaattgggaggctacgtcatgtagtaggagggtgcttactgattttggtatcaagatacagtgttacatttttatctgctccatgttaaccatgtgatctttgaagtttggtttttgtatttgtaaaatttgggtaataaggtctcattggagttataaagggaatggtttgagacataatggtcattgtgatttttcaagctataaaataaagcatgatgttaaaagatgattaatgttttcatttggtggtagatgacaagtttcttgcagggcatctgatcaatcatgctcttttttttttttttttttttgaaacttttattttaagttcaggggtatagttgcaggatccatgttcttttcttaacctgttttgagtcctttatgtaaacgggacattttatcaaaacttcctagaagtcttatatttctcaataaatccatccattctattaaaacaaatttgctttgttcttagagtctggtggaaactccaactctctgaacctagggcatgattatgggcacaaagttgaaaatgatgtgcgattcatcagcaggtctttcaactaaagcagtatctgttttgctttttaggggtcaaggaaacttttgattttaaaatcttaaaagtttttgggctgtctcttgttagatgaggtcatgtgagagtgacatagattaatatttcggtgttttaaaactaggaaacataagtcaaagagatattctcttgcctaatgtgcttataatgttatcttttgatcatataaatgtggatttatgggaagaaatgttatcactgctctctataaccatatatatggaataatggagagaaatcttatttaaaaagtttaactaagggcaactttggctatggagtatatatcataatcttcacatacatatgaagaaattgacactcatggagtttaaataacttgcctaaggccattgattaaaggaaatctgactggctcgaaatcctatgtacttttcccatttcctcatttcaatcaaatagctggttttattttattttctctctccaccaagccttgtgaattaagacaatgagttgctgtttgtctttgtctttccctagcctaataacctaggaaaaactgaagtagaaaggaaggattactggactagcaggcacaaactttggctccaaattcatgccctgccagatactaaactgtgtaatcttgggcaaattactttccttttgtgaacttcagtttctacttctgtaaaatgtggacaataatattcattttatatggtttctgtaaagttaatcatgaggatggtgttagttcctttctcatcctttctgtccctctttgagcttctgtttcctcacctatgaagccagtagaatcatctcttcctgcttcttcatcgggttcctgtggggtgcaatgaatgtgaaaatgttttgtaaaacaagaaaccattatgtagatataagaggttatgactattaatgaataaatatgggtttggtgtctggaagtaatttttacttatttcatttgtaaacactagcattgcagttggctgaaccttgtgtcaaccatccattccaggagccagctatctgaggtaagagaggaggcgtgtcttcttgtttatgaaatactaataggcatctgagccagtaatgttgattttagaagaaatacaaagaatagaagaaatacaaagtactttatgaggaaaagaactgaaaaatggccaagacagtgagctgacctctctttttatttttgtttttttgatttatttttttcccttttaattcatagcccttaaggtttaataccaaaaccaaaaatctgggccacacagacgattcagatttaatgtgtatgtatttaagtgtccataaaatgcaatggagtagaatgtgcttaaccattattttattgtatcctcaactagtatgtggcaggagggctttttacctggtttcctaacccttgattgagcgcatttttgactacactatactgccagtgttacctggctctgaaggggccaaatatttatggctgggtcagtcactctctcttagctgccaaacaaaatcatctcaaaaagctagaatccaaagccacaacagaaaaatcctaagaacacagaaaattgagttagtcttttgaaaccttgcatccattgtatctgaatgccactctcctgggggactgttgggaatgacaccaatccttggcagaagaatacatttgtcttgagtttgccaagaaaatggaggccaatggagaaaaaacatttaaaggaagcatcatagttgtaaaatttaccagatgcgatttttctcctaaagtcaacctgctgaatctgtaccttctaatgagctctactgtgttttatgtaatgtaacttaaccaaaaagaggtgaagtagtcaatatgtagaatagtaactttgtagaagatttgatatcattatttagagtactatacacatgtattctgctgaatattttgttaattcctttggtatgttatatctatgacctcgaactgcaaccatgacttcagttgcacagacctttgagaagaataaaattggttggtattgccccaaatttgtaggacttagaaaatttagaattgagaggaaattaaggtgtcaggtttacatgattttcaaagctaatatcatatatatataataagaacacgtgcagacaaggtaggttatgtatggactatgaaatttctgtaattaaaccagacataacagccacttaagttatttagattttcttctcattcctacaaaaaaagaacattgtttttatttttattattatttatttatttttcaagtggaatataagctagtttacccaggaagttttttatttatttatttacttattattttactttaagttcttggatacatgtgcagaacatgcaggatttttacgtaggtatacatgtgccatggtggttgctgcaccctatccacccatcatccaggttttaagcaccgcatgcattaggtatttgtccttgccttgccctccacccatcaacgggccccgatgtgtgatgttcccctccctgtgtccatgtgttctcgttcaactcccacttctgagtgagaacatgcggtgtttggaagccatcattctcagcaaactaacacagaaaaagagaacattgtttttaaaaaaggtagtagcaaaaaatgtaagaatggctcctgtccaccttttatttcttttctagtccacaaaataaccctgcaaaaacttatttctaatgttttatttttacggataaatatatcagaaaagaatgtactgtagatacctactatcatagtttttgacagctctgtgaggcagagatctaacttgttcatttagaaactgcagttatcacactaaccttccctccgatgccaattgttaaatattaatagaataagctttgaaaagtaattaactgtatcccctgtccccacagaaacccatcttgaaactatcaagaggagttttaagcaagccctgaaaggttacaaaaattactctcaagaaagaggaattttctctctttctcttttcgttatattttggaggtggggaatggtagagagggaatgatagaaacctctcaagtaacctttgggaggtggagaagtaaatagtctgggagcatgctgtagaaatttaaaataatcctgtggcaataattggtatcagtggcagtaatgaagaaagaataacagtttcaataaataattagacttgacagtaaatgtgtcaacaggtacccacttaatgagtgtaatcattgtttttctctgctctcaacgttgatccactgactgcggtgtgttctctgtcccatttccaaaccaaatctatttaaagctgcactccacggaatctgcaacagtataccctgtttactatttagagctgatacctaatgttctttaataggcaagatctgtacttgaacgagaacaggcttctggcctcttgtagacggttgattatccctgttttccacagggtgattcattagcaaggatgaataatacccaattaaatctcatggacttgtctatattgccagagtgaattgtttattataatttggtggaaacagtcctagtctgctttaaataaaattaatcagttaccgttttttgaagtggaggtagaggcagtagttataagtgaaattacctctgtaataacctgaatagaatcacattgtttttgggagcaaagcagtatgttgtatgttatgtgcaccagaagccatgagaatccttttctaatcccagctgtaatgtcacctggctgtgtcacctaggcaagtcaccttccctctatgaggtctgtttcatcatctaatgacaaagttggaccagttgatcatggcattacttccggttaaatgttctcttatatatgattttatttcctagctagtcccttctctctcctggtgccatgtttccaaaatcataggacagtcctatgactctactgcacagccactgtggaaaattagttatttttctgcttagcttttgcttcttttacataccagacatgcagttaatgacttttattatatatactgtaagaatgggcatttatacaccggtagcggtagtcccttaccccagcaacttgcaattccttgttaggaaagaaaagctgttttcctccacatttctttactctgtgacattgttccctgatctgggtcttatgagaggatctggtaaacttcccccctattaagaccgttaggaagaggtggatgcttcttccattatttgatttttccagagcaaatcactggatctgtaaaggagatcagaatgtcaaagccagaggggacttcacgaagtaatctaaacaaattatttcatgtcacagatggagattttagtgtctgggagggaatctgatttgtctaaagtgtttttgactgatcttggactagaattcttctgactacatagttgtatctttaagtagagaaatctttttctataaactatcctttcacttcctagttcttaaaaggccattatcttccaggcaaaaccaatttcattttcagcatggggatgtgagatgtccttaaacataaatggactccaggtatcttcattaatttcatgaagacatggcacagagggttccggctaccttctgctttccgtgtttattaaaagactgtggattcccttgcagttcttcctgtaagaggttgtttgacgctgacatcatcactctcctccacccgcctcctgcccttttctgaatcagtgaattataggaatctgagaatgagctcctgtttcctgcacattgttggggaacattaaaaaaaagaagacagatgagggatttataagcaagaggacagaagaataatagccaacacaatgaagtctagttcaaggcctgcgattcccaattgctgggctacacagcattaatagcagtgtctctcaccctttcagacccttctctcttatttcagacccttctgccttattcttgtggggatgggctgggactgagaaacagctagtataatcattgccaaaatgaaactcacatgtacatgggggcttccaggtctggagaagagtgtagtaattgttacccatccgatagaaggtgcttagagaccactggacctaagcacttacctggaacctcacagtacagaggttcaaagagtagaaatcagttgactgagtctgaggttcaaatcctggctctaattaatttgctatgagtttagtgaatgcctaactttcctctgagctgcactttctccatctgtgagatgggaggaggagggtggcatagatgatgtcaaaggaaccctctgattttcatgagtctcagatttgcccaaggacctgcagcgaatgtgcagccaagccagatcttgaattcagagcccctttttctggtttgagatggtcatcattataagttccactacccatactttccaaacagtatgtttgcagctttcagccttgttttattaaatctactttttctcttttatttgacagtccctttctgtccagggacctgcctaaagtagcaaatcttttttttttttttttttttttttttgagacggagtctcgctctgtcacccaggctggagtgcagtggcacgatcttggtttactgcagcctccgcctcccaggttcaagcaattctcctgtctcagcctcccaagtagctgggactacaggtgcacacccccacgcccagctaatttttttttttttttttaagtagagatggggtttcaccatgttggtcaggctgctctcaaactcctgacctcaggagtccacccgcctcggcctaccaaagtgctgggattacaggtgtgagccaccgtgcctggcctaaagtagtagttcttaatatacgtgtgtgtatgtgcgtgcacacgtgcatacacatgatcctgtgtttggggcagatgtgaggattatggaattttcagaaactcagatgaatttatgaaatagttggaaaatgcagaactccagaaaatgctatcaacaagtttaggaggtttgtagatgctctgaaggccatccatgagttaagcaaaagttttcattctatgtgggaagtatgagatgacatttgagtggcatacatttccttttgctgttggattttccccgtagtcacctattgttatactctgagtgttaggctcgttttgtagcatgacttttggcatgtatgtatctcaaactattgagtgatattttaatattgaaactcttattctacttcattcattcactcatgcattcaaattcaattttaattcagaatttgctaaatgctagacatctcaatacattattgtatataatcctataaaatagaaaattgctaggtgctcagagaggttgagtaatttgcccaaagttttacagctaataaatataaaatctggatttaaatccggatttactccaaaatatgtgaatacctccagagataacattgaagacaaatagagacaatgatgcaagttcataaaccatggaaatttctggtagaaaatggtagatgggccccagaggaatacagagaatgtgtactatgggattttaggaagggacaagatcatacattatgaattacttcatatcataattcgttaactacgtgtttatctggctccttaagaaagaataaaaaaagctagataatcatatgaaacacattatgcataactcagtttttttcttgttcttcaaacttctgtcaggttagtgctctcaatatcttcatttggtaagtgagatgaggagatgaagagtagttagggtcatagtgccctgatcatactgagttttcacctaaataggaatttcagtgctttgggtcatctattttgttcccctcctcccggcctacccccccattatattgagcttgagacttttaacagagataacttctgaccacgcacagatcagcacaaatgcagatgtgagcagctagaatttggatgctgccaaattgtgatgactgccacatgtgtgaagctaaagcttagcacctgatgacccactgtgagtgtgtgggggggccagaagagtgaaaggcaggtcagagatggaagacgcctcggagtttctcaatggcagtaccttcaccttgcagatgcagaaatggaggtggttagaaggggtaagacttactaaaattcacacagcaggttaatggctctctgagaataatggcaaaacaagaacaaggctttataccagcaatctacagtagtatctacttttatttcctacctttccgttggcatatactcacactgataggcttgacaggcagataaacctgtatttgaaggtcagcaggattagttgtgtggccttggataagttacttgatttacttgggtctcaggtttgttgtctgtaatagaaaccataccctttttcttttctttctttcttttttttttgagatggagttttgctcttattgctcaggctggagtgcaccggcatgaccttggctcactgcaacctctgcctcctgggttcaagcgattctcctgcttcagcctctgtagtagctgggattacaggcatgagccaccacgcccagctaattttttgtatttttagtagagacaaggtttcaccatgttggccaggctggtctcaaactcctgacctcaggtgatccacctgcctcagcctcccaaattgctgggattacaggcatgagccaccgtgcgtggctgaaaccatacccttttaacaggactataccagtgtactgttcaatatacagaaatactatcacccatctgattaataatccttatcacagcccaatgagacaggcacagatgttctgcttttcaagattctatttcctaacttcatcttgacagttgtaagtctcttgcttctcaaagtttggtctgaggaccggaagcatcagcattacatgggagcttgttagaaatgcaaatctcagatcatactctagaacttctgaatgagaatctctactttaacaagagccccaggtagttcatatgctcattagtgtttgagaaacattcacttcggccctcgccctatttcaaggctattgctgtggtgtgctgacaatgcctggcatgctgccagcattcttggggcatgctgtaccatgccttgagatagcggggtccggggggcggggatgctgtgaagtcactccttgggaataatggaagactgggttgaagggatccagcaggctttatctttttaacacccttcatttccttagaagttactattcagaaggggtcaaactgggattggattctaagtctttctgatccaaagtccatgttcttttcattaaaccacgatgtctcagtcaagaggaatgctgggttgtgggtgataactgttcattccctgtagtgtgaatatttccacactggctgctttaccctattactcaattcctagaggggaagaatttttttaaaaaaatttaaaaagcctgagttgaaagccaggatcctgcagcttaatcagttatttttgctttttaatgagggtgactattgtgaaataagtaattattaattactcaaaactaatgaaatattttagtttccttgctcaaaaagcatatggatgctaaaagaaagcatatgggtgctttctgggaagcatattggtgaatggacaaattacagtggtgccaatatgcctttgctgtctggctggggccatcaaaacgtgtgctggcatctgagtcctcgtgtgtttaaagggattttttaaaattcccatttgataagtgcctggggttgcctctggagttacacagcgctgtctcatcaatctttctgccatgctttcactcagacattactggctgagtataaactcggtataaacctttgctgtaagtagcttctgtggctctttctttccagatgcctcctatcctctgcaataggttcagtgggcctgccccatggatggcacgtatggagactttgtctatacaacattttaccacagtggtaaaagcagtagccgaaaaggtggcagcactgagacctgtttgctccatcagggactctgtctgaggccctcggccagctgttgaattgctgcactgcaaatttcttacttgtaaaactggaatgataataccagtgctcctgagctcacaagcatgctgttcatccaatttgcagtccatgccctttgctcttcctctcctttccttcatgcctcttctcctttgctgcacgttcagctggtctagtaaaaagcttgatggatttggaggtggctgaaaccattttgcttgctctggggattgcacacttctgagcttgtcagaggcaggcaacatggcatgttttagaagatacttggctgagtgtccacgaactgtggctctcagaccaacgtgacttagtaatcatttactcaacacctacaagcaaggtagcttgctaagaaattgaaggagggagctggcgggtctgtggaggtgagtttgattcagggccagtcaagacttggtgtgatgtgtgagctcagtaattatactttgagagagacagaatttggagaactctttcctattggaggtttcttatagaactagggacaagagctggctttgaaagattattaattggactttgataagatattacaaggatttgaagagtaagtctctgtcaggcaaaaaccagcttgcagtgggactcggaagcaggcaaatatcaggcatggctgaagaactgggcatcaatcacagacatgtgtagctgagagaaatcacttccttttggtgaaccctagactctatctgcaaaatatgagctttgaacaagatagttctcaggaagcctcaagaactctagctgaaattctacaaagtctcttatcacacagccaggttatccacttagcaaaatcctggcactagaatagcagcaatggagcaaggcctgggacccaggtgtcctgcctctattttatattcttcttactgtccacagagcattatgatgaagataggtggggtggacattattattctagtttttaatgtatgaaacataggatgttaagggaatctaagacataaaacgaataagagatttaactatcccagatattgatcacccttccaccacagagggccagctcttataaaatacaccccttgccattttgcctgtgtgggccttgctttcctgcctgaggaaccagcacgtaccccttctcccacgaaagtcatccctgtctgctctttggctctggaattcagtcttagcaatggactttgttttataattaaactttattttgtattgccatctttccatgtttccacccccatctcatccctcatacatattttaaaggctttgaatttaaggattactttctgcttctctgagttccctgtagctcctggcacagggccccagacatagtgctcagtagagaagcaaatgactatgttctgcaatagtttttctctctgcctattgcttgtttctgagatggatatgagacttataggcttaaagaatttcggaactggaaaggaagttaaaacctatctagtccagctcccccaccccagggaagaaatgacttacttaaatttgcctgcatagttagtggcagttctgcaaatcgtgcccacatctcaccaagcattggagagatggttggcacttgagtctcttcttaggactctacaggctctgtctggagtccttgtttctatgaagaccactaagaataaaggtaatacaggtgctgctgctgctgtattaaacagatggaaagaagtagacattcattgtatgtctgttatgtgacaggccttgtgacaggtgttttcacatagtttagcttggtcagtcatcaaaagctagaattcccattcctccatgagggagacagattgtttctaaataggacatttagcagaagctctttcctgtaagctctgaaaggcactcggtagtggatagatgcttccctcctagaacacgggtgtagggctctgcagagtagcatgcatggctcttctaagggatatggattgtagagactgtgaaaataagcagaagttgtgatcaaaattggcgttgggggacttgtggtcacccgagtgtaccagaagactgagctcttctactctcctttccacacatacatctgagtctttggagagctgcaacctgagtgcctcgttcttgagtgtctgtagcattggcttttacttgcacttactacattttactcctgcctcttccctagctagcctcgacctcaacgtgtattatttcctccccccttgtcatttttcttctattacttttgcttcttccccttcctccttctcctgacttaaccttgggtggccgcaggtcttaaggctctgtgatggcagagtcttctgtattggactgtgaagattctggcagggaagacaatacacaaatctgttaaatacacaataaaaatagcttatgatctatgggacttggtattaagcaagatgatattaacgaggtttgattgctgttctgaaatgtggcagctgcgcacacgtattggctgctttttctccccacctttggcagcttgtgagcggtgttgccatgacactccttgggctctgtttagatcagctattttctgaaggagtcgctgaccttccccacaatagaagctgttgatgtggtcacgtcagtgcctcttcgggagctgtgtgactggcgagccctcagttgccacttggaaacggttggaaactgtagatcaggcacagacattgaatgtttaggagcaagaagggcttgtgaatatcccgtactctcatttgatgtgtgaggacagtgaggcgcattatgcggaggtgacttgctcaaggccacagagtgcatagagagaaggctgggagaggaggtcaggtcttgtttccctgcttgttgatgttccagctgcatgcacggcactgagccctgcctgagtgcgcacttcagtcctgaaagctgcagagggatgggctggtgacactgccgtgcctaggagtgggcagagaaggtgaagacacggagagtaactcagtgcagaggcagcgacgggaaagtgaaggagagtaagaagcccagagtaaatggccaaggtgccactaacatgtccatccacagaaacttttctgggggagaatgtttcttatcagattccgcagatgggttccttgagaagtgagtgcttaaaggggctgggatagataatcataatgccatgttctcactgctctgaacccttttctgacctcacgtaagacctcacctaaaacttccacaagagccgttcattgtcagtaccatgctttttttggagtactgtataatgtcaagtatttttccaatagtttatatgtgaaatgtggtctccgccacaagattacagggtcctcgggagcagaaattgtgacttaaatgggcctttctcccttccactttttattcttgccctaccttttaatcaggcacctggaagagatctaaacacaggatgagcatccagtaagtttttgttgagttgaacttagttggattcggatgacctctaaaaaatgtttactaattgctggtgaaaattggcaaatgattattttgtggaaaaatgttctcaccgaattagattttgttaagaattcttatgtgtgattatttttcataaacccaatacactgtctattattatccttattttacaatgaagaaaaaaaattcaattgactgctcaaatttacctctaggaacaggtgatggagatttgatttgcatttagatcttttgtctccaaatattgtaatgttacttctgctttcccccactacataccgaagaggtcttacttcattgacagtggttcagccttctgctgaggagtcttcagtctttttatgttgtaatctgcctccttatgagtttgggaaaagaattatggggcctcaggtttaaatgctgttatgctttgggtaacactttagctgatttgttttcagtaaagccagaaggaaaatactgcatttctgtcttctttaatttccttaatttgaaataagccttgaactagtttgtaagactcctttaacttttaacaaatttaggcacatatgtaatataaagaaaaaggcactctgccctaaatgaattgactaattaagctgagaacaaaactagaccacttttttttttttggtttcaaaaaaaggatgcaggaatttttaaatgctacagctaaaacccagattttgtctgatattgatgttctgtaggttttctcaatatttgccatattcattagatgacattcattatactttcctaacttttataggatttagatgaggtttgttgataacattctatattctttctgaaaagaaaaacacacacacacaaatgtcgagcagtcttctttttttaatgtatattctcaggaaaaacaccattgactaatttaaatttcagtacggaggcaaagctgatctgtagtgaatgtaacatcttgttaaatacaggtttcatgcttcttttttgtacctttccaggcttttaaggaggagaataatttgaataataatggcataatgtccagagggaaagttgaatacgtaagacagagatgcatgtgggcctatttctgtactttgtgtgcgtgtctctgtgtggtggctttatggtttttaaaataaagttttctgtattttcaatgtatataataactttggaatcaccaaagaaaagttgatattgagacttgggtttttagtggggaggaatggatgttttttttcttttacagttttaggcaaagtgaaactttagaaaattatattatttgaagttagatggaaaccaaacactatctttatagtttctttcagaagaaactttgtcttaggaatctgggcactcttgtaaactttctaaatttcttcagccctcattgatacccacactttgcttaattcagttgaatcagtttacagtgaataacgtccctgggaacattaatcaatgaacacacacacgcgcgtgcgcgcacacacacacacagacacacacacacagggaggacaaaaaggaaataaaagcatcactttgtaccttcctcaattcaaacctgtctgctttcttcagaatttcggatgtatgtgtctgtttcttccagtagattgggagcaccctgaagacagaagagacatatgtatatatatatatttttgtttgttttttcttttttgtttttagacagagtctcgctctgtcactaggctagagtgcagtggcgtgatctcagctcactgcaatctccacctcctgggttcaagcgattctcctgcctcagcctcccgagtagctgggactacaggcgcccgccaccacacctggctaatttttgtatttttagtagagacagggtttcaccatattggccatgctggtctcgaactcctgaccttgtgttctacccgcctcggcctcccaaagtgctgggattacaggcgtgagccaccgcgcctggctagaaagaagagacattttatgtatgatcgtcataatgattttgtgaactcaggtgtagtaaggtaaaacgccctggtaaaatcacttactgggacttttcagaatctgtttagaagtcattccattactcttgaaatccctctgctttatagactttctgagaaataaggaaagtccatctgcctacttgtcatagaaatgggtacttcagcagtaaaatagcctgtttacatactggctcaaactgtcaatgtaggaaaaggtttcgtgtattataaaatgttacagagctagaaaaaatatatacaagtaatatatagagtgcatatatatgtacatatatatgatctgttccttgtcacaatatttaacccaaagtgctatttacagtaatgaatcaaaatgtcagtcttaaaaatatgaagtgtcaaagtgttcccacgttgtagaaaagtttgatgtgacagtttgttaatcatatgactattctatcaatgtgtctcataatgtcttttgctcaacactctcgtaggctcctcacacttttttcatgaattcctagcttaagttactaacccaaggagcacatttgagttgcgtgtctcccacacctcacacaaaggcggctatgttttgctgtacttaaaactgaatggatttcacattattttagagtggtttgattttgtgcctgacgcatttatggatagtagcttaaaaaatttctgtaattttgctgttttcactacagaatcatcaaatgaaactttaacttatagcgcggatgttttttgtttctccaaagtttcccaagatatcagatgtccttatttgctagtgcccattcgttgaacttggacacatttttgaatttttctcagcacattgatgatcccaacttctttttcctactaaaagggcagagtcttagaacataaatattatatatgtggaaaagggcaacatagtttctttcgggaggatttttggccatgctactcactagttcgtggatcacacttaatctctgtgcctccgtgtcttctggagaaaatttaagggtgaaattagattagatcagtgaatttttaaacttatgctctagaagccctaggattctgggtagaaatgaagctccaatgattgagtgtggggtgggcagtggggactctgggcccttcaaaccaagcagctctgctattcgcttgttaaaatttagagttttataaactgtttcacttaaagaaaggttctactgcttaacctgcctacctgttggcatcactgtcttaagtgatctagagtcagtggcttatttcccacaaggattcagtgggcaactgtggcaatagttcttggctaacctggtcactatggaagttctttccgtggaaaaagattctccatccttcaatttgagataagatttactaattgagacctcatttgtttctgattttaatctttgcatcattttagttttaataaactaactttccaacttaccagattttcgggttgacaaagaccattatttagagaaacacaggcaaaggaaagtctaaaagctttggctggaatttcaactgcttctggtcaagaatatgaattttactttgtacggccaaagcgtttcaaccattctggggaggtgggtgaatgcccacaacttgaacttttcattccattgctttccatcctcaagtctctcccttcttctccatacacatgcaactaccaccaccaccatggttctcttcgcatggcctatgtatgtccccagacatggtggagcagaaaagtaaaaagttgtgatttacaaaccaaggtagagactataagaagaacaaaaatgattaaggggcatgagttagtgacactaacaaaaagccttcatgtatcaacataaaaaaatcaaattgaagaaaatatttttcatggacagaaaacctaccctaaagacaggaaagaaggtgaacggctatttcactagatgctgaaacatcatctccaaagttcctcaggaatcaaactatgggattagattcaactcttttaatagctgaaatctagaagggagagagtggttacgtctatagttttatgaatgatgctgaactctttctcacaataaaatgctcttctactaacaaatttaaagacttgagcacccagaaacagcagttgcatgccaagtcaggaatattctttttttaagtcacatgtcagccactggggatgcacccgggtttaggctggaggttggagagggttcatccaaaatccatgcacaagatatttatccaaaattctggagtggttccttgttcattctctgaagaaattggtgagataaggcaagcatcctaaacaaatgttgagctctaaaaatacagtttaaataaaacagaaagcattctgagtatagttttggccaaaatagaatagtataataaatcatttggctggagggtatgacatgagaataaacaaaaaaacagcatgtttgctatcttttctgtttattttacttatgcatcaacccccttctgcctccttttactccttgctagagtgtggaaggatcttgaattcagggccttgtctgtcttgtttttcagctggctggagtcacacttggcttatttatgagctcaataaacattatgaatggatgagcaattttgaaagattgacatattgaaggaaaaaaatgacgtgaatctgaaaaattctgacatggccacttctaaactctctgggacttgtactaaatgcttatagatttaggtagcattctgagcattacctcacttattcctttcaaccagcctctgaggaaggtactgttattatcaccatttcacagaggaagaattgagatccagagatgttacataatttgcccaaggttacataataataatataatagctaaagccaggatatgaactcaggtagtctggcttcagcagcttctctcttaactacgaagctatattgtttccacatggtgattataattataactgcctgttctactttcctgtacgttgtgaggctgagtttaggtgtgaaaggattagggaagaagtatatcaactagtgaaggcgagacaacacacaaacaactataacttaaagtagatagaaacttgcagagaaagttcagagaagaaaaaagaactattatttccaccagggtgaagggcaggagtcaaagaaggcttcctgtgggaagtgacttagtttggccttgaatgagtagaattatagtaaagggagatgctttccaagtaaacagaataaacagtggaagagatgccagtctaatgctgttgagtttagcagattctttccgaaagagtgtgcgctgagaagtggggagtggagagggtttgtggtggaaggaggtggaagccctgagaagggatctgagtgggaagatgcaagcgttccaaaagcatattcgcaatctctctggaggtcaatcctgggcaaaatgttgcttttgtcatgctttaactcattattttttgatgcattgtccgcaaagactagtccaaggaggtaccactccagaaagagtggccacacgagtctggaaaatgctgcaccctctggtgctctattaggtgctgacagtgcgtgttaacatgcccagtcttcgaggaagtcccgtgagacagcaatcaccttgctttctttgactgtagacctggtttgttgttttactttgagcaaacccctgttaacatccctcagaagacacacttcaggagccctcttccagccaaccagctggactaatttgtgtaaactttccaacaagttgtgtgcttctgctgaacacaggtcatctcagagtaaaacttgctccattctcaggacagccaacagtccccttttgaaagaagttagagcacgtttgcctatagaaattgttatgtgtcagttagaaagcaagctgcatccgaggtaacaaacttgaggagctgcagcccctctgacgaagtaaaagtgagaagcaggaagtgaaggagtctcagctcttgaaataaaatgtgcatacgggtgagagttgccaaccacaagaactctagctggctgccctgagaacatattaggagaaaacatggttaaagtcggcacctgacctattagctgcaggggcagctcattatcttttttattctttcaccctgcattggcccgaaaggggaagagaggcagtaagtggactgtaaagagtgcttattccacgctgggcaggtcattagaattgtcatgtcaaattcccttccttaatcccctcaactacccagtggagtcaggattattaatctcttcctctatacgtgaggacagtgaatccagagtggcttgctggtgctgaatagatcatgttgtcttacaacttgagcttttcccttgttcctttccctatttgtctgctgaactcatctgtctccaggttgtaaatgagattctcctctgaagagcctctgagccccctgtaactctattcttgtattgcatgacgatactcttgttctttaggtttatacctctttctccccttaagacctaaaactcgatctgggttactctagagcccacaggtttatattgcactgctctgcccacattccagccttctccactttaacatatgacttgatgatagcttttcagacccagtccctcacaagatacctctttttcaacccattattttagaccttctttacttgacatattttgagttttctggattctaggcttccttatcgttagtgtcactttccccccttctgttacatgtctgttaccttcttgctatttgcttaggtcctaccttaactttgaaggaacgcttttcaaacccggcctgcatcggaattaggaatcccaccctcagaagttatggtttagtaaacctgagagagtgtgggagaatttgtattgcactcccagatgatcctgaaactgtcattctgtgggcttatgtttattagcacttctttaaagcatagttcaagacctctgttttccaggatatttaactatcttagtccaaagtctttcctttcttccttgcctccttctctctctcctctttgtcttttcttcttctcttcctcccttctttctcccaccctcctctctctttcttctcatgaagtccatatgatatcctgtctgaattacataactttttttttctttttgtggagatggggtctcactatgctgcccaggctggtcttgaattcctaggctcaagcgatcctcccattgaagccttccaaagtgctgggattacagtcatgagccaccacatctggcctgaattagacaacttcttatttatgtggatctcagaagctccatcatccacttcttaagcctggtaaacacttttattagataagagagacagttttgcataaatgaacaaaaatctagatgaaaagttctcgaatcctgaatcacatcttgccataacctcttactagccgtgtgttcttggacatcttatggactggagtttccttgtctctaaaataattattccatttccttgtactgcagaagctcatgaaaaaggtcaaatgagatagcgggtgtataaagtgctacacaaatgcaatgatgctaatagtaaattattgttgatgttttctttgtttctgtacagttgactcatttgctttatcattaatgatgaggcatgaaagaaatgctgcttgtttttaatgaactatggaagactaggtggagctgacgggatgttgggatttcaggaaagctcttttaggtttctggaaatgatactcataccaatagttgtgagcttaggttgaagagcaatgttgtatttatactataatttttcttcaaataaactgtgataaagattttgaatattactttcatattctgaacttctcatgtacacttgaaaagagtcatgaaatagtagtagcggttgccatttataggggtcgtagggtgttgttatggttaaatttataaatccttaaaattatgatttctatcacaaaaatgcctaaaagggtgcattctctaggttttttccttctttcattcccttccttccctcccctccctccctccttcccctccctcccttccttccttccctctcctttcctttcttctcctttccttttccttttccctctcctctcctctcctctcctctcctctcctcccctctcctctcctctcctctcctctcctttcatttttcctttcctttctctcgctctgttgctcaggctacagtgcagtggcacaatctcggctcactgcaacctccacctcccgggtccaagcgattctcatgcctcagcctcccaagtagctgggattacaggcgccctgccaccacaccaggataatttttgtatttttagtagagatggggttttgccatgttggccaggctggtctcgaactcctgacctcaaatgatttgcccattttggcttcccaaagtgttgggattacgggcgtgagccactgtgcctagcccctctaggttttcttaagaaaacctatctattcctcaagtgcttactctgcaaagcctaggtctgccaccaaggaataaaaatatggctaaatgtacttcctttcctcccagagttcactgttcaataggggacacaaacacataaataactagctcttgcaccaagcgaaatgtacagtgcgacaaaggagaggtacagatagtaggctgtgggcccgaaggagggtttccgtgggcgtgagtatgaaggaggggtttcctgaaggagggggtatttgaacaacccttttgaagactaaaaggatgtccgcaaatgaaatttagggtagaaacatgccagaaaaaggcacagtgttttcaatacgctaggcatttcttaaactatttatagctgaggttatgggaaaagagatagtagaaatatgagaatatcttctccaaagattctatgctaatatcctgatccatctgactatgcttatttgactgctttttgtgtttgtcttcttctttactggatatcctttttgccgcttcctttctggaattttctttcctggccattagcctctctctcctacaccgttgccttactctcactgccatactcctttggacatcctccttctcttgtttcctgatacttttacatccccttccatcctttactccttagcttttgtttttatttgcagtgttaaagatagcctctttttatttccctgtagtgattagatcgacgtgtttacaatatgaacacacacgttttctcttcttcaggctctgagtcatcgagttcacaatgccatgtctagtcagtacttctatgtgtgtatagtgcccattgtggccgagtagagataaggtcactgcggaagaaaataaatcgctaaaatctgttagaatacgtcagcttccaggtttgtctgaggatgcagtggaaaccacgttctgtggccagcatgtcagtagcttttgatgatcagagccttccattttgatactttaaaataatgtaatctaagttcacatcaactgaatccagacagtttcaccatccaccacattattaattccagatgggaaaattcattagggctcaaattttgtttgagacccaactgttttttaaattattattacaattattatctatttattttatttattttttttttttacaactgatgggaagggaaatttaacagctgtgtgattagcagggcatgaaattaaaaacgttttgcacagaatcaagaggttgtttactacagaatttgtcatctgagaattaagtgtcattaagactgcccacaggatgatctctttcaccattcaagctttgatttccacgcccggttttttgctaaaaggcctttaaccttttctggaaggaaaatgcatgtggatttatcacgaaggtaccatcagcatttcaaatgctaagtcaaggtaaaaacgacactcttgtctgtcacaaaataacagtacaactagatgttcagcctcactgctctcagcaaagagtgagttccaatttgaggaaatcaggtaaattagaaaaggctgcagctggattagtggcttcactctttccctctaaaactgtaggagtttcatatttccatcaaggcagctcaggtccctagagcatgatgtttacccttacattttcctaggtgtatgggctctttacgtctttggtctctttgcaaacgccctccttcgactgagctctagaaagtactctgtcctgggctgagcgcagtggctcaagcctgtaatcccagcactttgggaggccaaggcgggcagatcacgaggtcaggagttcaagaccagcctggccaacatggtgaaaccccgtctctactaaaaatacaaaaattagccaggcatgatggcgggctcctgtaatcccaactactagggaggctgaggcagaagaatcccttgatcctgggaggtagaggttgcagtgagttgagatggtgccactgcactccagcctggacgaaagagtgaaaactccctcccaaaaaaaaaaaaaaaaaaaaaaatactatgtacttgttcctttgggcaagatgttggcagttttctgcagaagcgtggtcaagcacattagctggactgtcttggtcgaggtttgaaggcaatgccatttgcttgggcaagttacatggactctctgcagttcatttgcctcatcatcctccaacttaatgaaggtaatgacagtatctacctcaaggattactttggggattcagagttattaccaaaaatgtttaaggccctgcccgactcattgtttatgctcagttaatgttagctatctccatgcttttcagtcaatatattgcattgtgtttggaagtcttcatatctagtttcatacctgacacagacttgcttaacttctgccctggaatctttttgctatccctgtcttactgtctttaatagagcctttcttatttgatacttatttatatacttgccttcgttcgttttttagacaaattttattttcatatttgttgaattaaaccagacacagcttctacacttatggggtttcctttctgggagaatggggctggtgacaattaatgcagaaaacttctattggagatagacatgcaaaaacactcagagatagagttgaggaatttgtagtcattagaggagagagatgttagttttggctgggattggagttaaatggagagaaaataaaggaagactttctggaggaggagggttttgatctggaacctgcacgctcattagaatttgaattcgacctggcagaaaggggaaaagacttcccaggctgagtgaagttttggagctgcacattttattttatttttcatatttgtttcctgctgccctctggccaccattcagaccgtttggaggcctgttattgtaggtgggacctaagttccagcaccagtagatgtgtgagtgaggcttttatagtattgatgtcttgtatttaaaatgaacagaggaagaagccctggagtccattctaataaatgtatttcaaagggggctttcttcttttgtctgagtgagaggcaggaataggaatgacagaggcagcaagtgttggatgtctgtagaagaatcatagagttctctttagagcactaaacagagggctaataaagggctattgagtcctccttatgtttttttcctctctcagatgagttttaagggtaatagaagcgcttttttttttttttctggtgacctcttaatcttacttttctctctttatctcttccttttcctagaagctaatattaaaaccactcttgtcctctgccattaaaaataaatctgggtaggtttcagcaagagagtatttcctagaatgcattatattctgggcagtagaagtgtatgtttaaatacttttcctgtagaaggtcattatgacaacagaggatgccaccagcaaccctgcagtatgtggtgaatgtgtttccacgctgtgtctgtctcgcctctgctctctgccatgtcaagctgattttaagtttaccgtcacttttagtatgtgacttgatgaggcaccataatgtgtgtgttgctggccaaacattacatgtcatgactgtagaatcatgagactggagttttagcctagaccttagaacacgtacctgcaagaggtagttattcgagcagcagtctttgtgagactggaattcaggcacagggaacacttgttcctaagttgctgccccgttgctcaaaacatcttggtaatgtctttctttctttcttttcttcttctttttttttttttttactctgttgaatgttatcttttattttgtttttattaaaaaatcaatttccagctttatcaggatataattgacgaaacaaaagttatgtatagttaaggtatacaacatattttgaggtacattgcattgtgaaatgattaccctagtcaagctaattaacataggcatcacctcacagttacctttctgtgtatgtggtgagaacgtttaagatttactctattagcaaatttcaagtgtacaatacagtattaactacagccaccgcactgtgtattaaatctccagaattattcatttggtatcactggatctccctttgaccaagaaccaagatctcctcattcccctggtcccggtagccatcattttgctctgcttctatgtgtttgacttttttaatttgcacatatcagtgaggtcacgcagtgtttgtttttctgtgcctggcttagttccttaagcaacatttcctccagattcatccatcttctcgtaaatgacaggatttccttctttgttaaggctgaataacattccacgtggtaatacaccgcattttctttattcactcttcaaatgatggacatttagatcgattccacatcctggctattgtgaataacgcagcagtgaacatgggagtgcaggtgtctccttgagacactgattttgccttagaggggattctggggctgggctccgtggtgaagggcactctctttccctcacctggaggttatgtcagcggtgtgctgggggttgtacaggtcatgttaagctgtccttcctgccttcctcaatgcgtcatttcttatttctatgttccacccaggtgctgcactctcgcctgaattccttaacgtgtgtgaggtattttggtgtgtggctagttgtttagaagtttctgagagggaatgagtgctggaaactctattttgtcatttgccaatgtaaccccacattggaattgtcttcagagataatgaagagccactgctaaaatcacagactcatgagatgtgaaagcggggaatctgtttagctcacatgcgtgtgagaaagctgagaccctgagacaaatattggcctgtgctgcaggctttcagttagacagggacagcatcagttctcattcccttgttagctctatgcctgatgtcttctcactgttttgctgcattataaagaattgattttttttttttttgagacagagtctcgctctgtcgcccaggctggagtgcagtggtgcgatctcgcctcactgcaagctccgcctcctgggttcaagtcattctcctgcctcagcctcccgaataggtgggactacaggcacccgccaccatgcccggctaattttttgtatttttagtagagacggggtttcaccatgttagccaggatggtctcgatctcctgacctcatgatccacccaccttggcctcccaaagtgctgggattacaggcgtgagccactgcacctggccagaaagttgattcttagttaagcctatgaatagttagaaaaaaaaaagagaagagagaaagttccccttagcatggcctattatcacagggtatgtttgtagcagagggagaacccagtccttatagagtgggttatggcttcttctacattccaagaaaatctcaagaagtagaaatcactctgagtgtcaaatattttagttgcctattgtcacatctattataaaatagatctggtatagataaaaatagagttaaacatactagttaatagatatatctggtgtggataaaaatagaatttagcatactagttaatatataaatatgatgtcgataaaaatagagttaaatgtacaagttcctaattggattgtagaacttaacattcaggagtaaggatgctgtcaagtctaaagctatgcccttatcctagtcagttgttatattcatggcagccttttctaaaatgtgctccatgaaatactagattcataaatggtcaaatcactgtgggactcttgctattatttccacccattgtggagattcttgatgcatccccaacaagtttaactctgagaagtcgaacaggcaaaagcaataagcacaactttcttttctcttatgttagattcaggttttgtccaatttattttataatggaaccattttgtggatgatttcccagacttgtgttctgtggaacattctttggatagcatgactttattgttaaaattcttaaggttcacatctgtcatcttataataatcttgtgtgaaatataaagtcatttgggctaaactgtagacctccatctgccctcccttccccacaggagaaattacaggtttatttaaggatcaaacagttttgaaatgaaatgttgttaggagggggaaataaaaacctttcagagcttaataattgtagaaagaagacagtgttataccggccaaaccaattttgtgaattagcactttaactcagagagttgttcctgaaaatagcttgtttttaagcaaaactttgttggcttctggtggtacactttttcaccatcaaaggcacaaatatgggtgattttaaactgtggcatactttttttgcattcaaaaccagggcttgtggaagaaacaacacccttttttaacttttcagaaacagttggcttgaccatcatggctttttttttttcccctatgtctttaggatattagcttttcgttaagctggaagggtcctcagagatcttgtccaagcccacccttgacagatgaagaaatagagggccagaaggctttagtaatctttccaagtctttttattagttactgacaaaatcagaactaaagtcaaggtctcttacttacctgtcatttacctgttcaatgcctcttttgtttgtacactctgttaaaaagaaagaggttaactgtttcttttggttataactgttatactacaaacacacacacactctcacacacacacacacacacacacacacacacacacacagagagagagagagagagagagagagagaacagatgaaagccatgattaggaacattttatgctcaaggtgagaagaccctctataggacctcgaatgtcttcttttctaaagaacttcatctacctcgggtcagtcctttgatactattcactttgaaaactggtttacctgaaaggaagaggtgtgtgtgaaagagagggtcacccgccacattttatctctctgtcttatttcaggcagacagattcactacatcaagatggtgtttacagttatcgccatgagatgaactagctcatctccaagtgcttaagggatattgcctggttataaatcatcatgtgattctctctcctcccacccccatttacagcttctttcttctttctccactgcccatgtctaaacctggggaactatctcactgcatagacagaaaaggaaggtcagatccaaggtagatctttctttctgctaggtttaacctagtgatagcaacaaaaacagttcttatgcctctgagtttcttgttttaggcagaagcatttgataggttggggatcacaggaaagtttttttttttttaaattctccattaagaagatgctaatgtacttgtgaaggcaagtacattaagcttagtaatggaagatatgggttctaagctgcacctctctgccaactagtagtgagatcctggggaaatcaaacaatcgtttggaaccacatgtggcctagtcttttcattatgacttcaggagtcataattcttgtcttgtcaacctcctggggttgttgtgaggattaagtgagataatagatatgaaaaggcttgtaaactacaaagcatctcatacatatgtgtaaggcattgttattatcaataataatagcaaccacacactgctgcctttgagctaggtactgttttaagtgctttccgtcgataagctcacttaattctgacagcaactctagtgtaccaatgaccagtgctgggcgctgtgaatcagcaggactggcagctcaccctgattagctggtgatttcctgtgttcttgggcatgtcctttcccttccctaggcctgaattttactctttgtaaaagaatcacagactcaggttggatggaaggattcttctgttctgtcatttgtgattttgtcaggcagtcattggccccacaggctaagtcactgattatttctatttatttatttatctgagacagagtctctctctgttgcccaggctggagtgcagtggcaggatctcggctcactgcaacctccaccttccggattcaagcagttctctgcctcagcctcccgagtagctgggattacaggtgcctaccaccacacccagctaatttttgtatttttagtagagacggggttttaccgtcttggtatgactggtcttgaactcctgacctcttgattcacctgcctcggcctcccaaagtgttgggattacaggcgtgagtcaccacacctggccagtcactaattattaatcacagcccacatttaactgagtacagtcattagtttcattctacagctatacagagagctcatgtaaattcctgaaggctgcaccgcctacaagtggtggggctggagttcgcacgttgctcttgtgccctggagtgatggcagcaagatagatgtgggtaactctctagcaatcccaggtgtgttatgttgtcagcatcctcatctaatcaacatgatgattatcattgagccttttaggttttcagttgttgttatcatttaactcctcaattagattccgagcatctcgatggtaggttttctgtactgcaatgtgtattgccagtgttttatgcaagatatgatgcaggctagtgtctcacagtttacgcaatttgttttccgtccatcctttcgatcctttgagcctctcaaggaagcctgggttggcatctgcccaactgtgttgggcagaatggtttttttctcgttgcccgacatggggctgggaaagccatttgaggaggtcgctgtggcatgaatctggacaagtctttctataggggaaacctgtttcaagctgtggctctttcactttctacatggcatatggaccctgatttttctcacgcctgcgtaactctactggtgtctcttggctgtcgcagctttgttttgctttgccattgttttattttattttttctgaagacttggttttcttgggctctgcttatatacaacacaaaatttgtagaccatttgcttatgggaaagagtcacacccacggaaattgggagaaaattaactcttggagcccaaagaaactgacataaatcttataccacgaacatcttcaatttccgactttgccttccttctctgtatggtgctgtaccaagatctcttattgggaccaggtttcatggagggttactggtaactattaacccactcaatgtacttattttaccattaacctatcatgaatagcctgtccaatccccattaaatgacccactatgggggtcattaattcatttatttatatatgaattatctacattcatttatatatgaattattagatattatctacactgaaccaggcaaaattggggataccaaaatgaattagacacagttcctgctttcaaaaacctcatactctgaagaggggagatttgttaattctgtcaagtcatctttgatgcctaccatgaccaggtatcagacatgccactggaactgtggacatctggcaggtacaagcctattcatcacagggtttcaggtctagggaagaaaaacatcatattaataattttacaaataattatgtagttatagttgtgataggtgccacagaggaaagactgagtggtgggaaaatatatatatatatatatatatatattttttttttttttttttttttttttttttgagatggagacttgctcttgtcgcccaggctggagtgcagtggcgcgatctcaactcaccacaacctctgcttcctgggttcaaacgattctcctgcctcagcctcccaagcagctgggattgcaggtgtgcaccacgacacctggctaattatttttgtatatttagtagagacggggtttcgccatgttggccaggctggtcttgaactcctgacctcaagtgatccgcccgtcttggcttcccaaactgctgggattacagacgtgagccactatgccaggccagttgtgggaattttataagggctttttcttttctttttttttttctccctctggcctagtttgtggggagaggtatgtttccccaaagatgtggagttagcctgttgatgtaggcatgggagagtgagcttagacagagatgcctctcatataaggtagaaagccttccatgcccaacccaagtgttgtagaagttgaaaggggaaaaaactttttcaaaattggcttgacagcaaaactcctctcagtgtcttcttttttgtccccctctataaatggtaggttttcgtagtatcatgaccctttttagtaattataaattaatataagataaatttatggtattccttactatatagatttgttaaaataattcacgatatttcatatgtacacacaagctccttcaatccaattagtaagaaaaacacttcatgtcactgttaaataacatgaaaataaacaactggttaaaaaacaaaacccaaatacaaagcgttgagcttcctactggaatctgaatctgggagtgtcttgttgtaagaaatgttttcagacctatcattttcttttgtttctttttctttttttctaaacagactcttgtcagttctcttctgattagtgttcccctgggcttttcttcccaaaataaagttaagtgcattcaagtttctgggatcttctttacatccttttgaaaatgcagagtaaatattatgttggcttctttttgttttttttttttaaattttattattattatactttaagttttagggtacatgtgtacaacgtgcaggtttgttacatatgtatacatgtgctatgttagtgtgctgcacccattaactcgtcatttagcattaggtgtatctcctaatgctatccctcccacctcccctaaccccacaacaggccccggtgtgtgatgttccccttcctgtgtccatgtgttctcattgttcaattcccacctatgagtgagaacatgcggtgtttggttttttgtccttgagatagtttgctgagaatgatggtttccagcttcatccatgtccctacaaaggacatgaactcatcatttttatggctgcatagtattccatggtgtatatgtgtcacattttcttaatccagtctattgttgttggacatttgggttggttcgaagtctttgctattgtgaatagtgccgctataaacatacgtgtgcatgtgtctttatagcagcatgatttataatcctttgggtataaacccagtaatgggatggctgggtcaaatggtatttctagttctagatccctgaggaatcgccacactgacttccacaatggttgaactagttcacagtcccaccaaaagtgtaaaagtgttcctatttctccacatcttctccagcacctgttgtttcctgactttttaatgatcaccattctaactggtgtgagatggtatctcattgtggttttgatttgcatttctctgatggccagtgatgatgagccttttttcatgtgttttttggctgcataaatgtcttcttttgagaagtgtctgttcatgtccttctcccactttttgatggggttgtttgtttttttcttgtaaatttgtttgagttcattgtagattctggatattagccctttgtcagatgagtaggttgcaaaaattttctcccattctgtaggttgcctgttcactctgatggtagtttcttttgctgtgcagaagctctttagtttatttagatcccatttgtcaattatggcttttgttgccattgcttttggtgttttagacatgaagtccttgcccatgcctatgtcctgaatggtattgcctaggttttcttctagggtttttatggttttaggtctaacgtttaagtctttaatccatcttgaattaatttttgtataaggtgtaaggaagggatccaatttcagctttctatatatggctggccagtttccccagcaccatttattaaatagggaatcctttccccattatttgtttttgtcaggtttgtcaaagatcagatagttgtagatatgcggcattatttctgagggctctgttctgttccattggcctatatctctgttttggtacccgtaccatgctgctttggttactgtaaccttgtagtatagtttgaagtcaggtagcgtgatgcctctggctttgttcttttggcttaggattgacttggcgatgcaggctgttttttggttccagatgaactttaaagtagttttttccaattctgtgaagaaagtcattggtagcttgatggggatggcattgaatctataaattacctttggcagtatggccattttcatgatattgattcttcctacccgtgagcatggaatgttcttccatttgtttgtatcctcttttatttccttgagcagtggtttgtagttctccttgaagaggtccttcacatcccttgtaagttggattcctaggtattttattctctttgaagcaattgtgaacgggagttcactcatgatttggctctctgtttgtctgttattggtgtataagaatgcttgtgatttttgtacaatgattttgtatcctgagactgctgaagttgcttatcagcttgaggagattttgggctgagatgatggggttttctagatatacaatcatgtcgtctgcaaacagggccaatttgacttccttttttcctaatttaataccctttatttccttctcctgcctgattgccctggccagaacttccaacactacgttgaataggagtggggagagagggcatccctgtcttgtgcccattttcaaagggaatgcttccagtttttgcccattcagtatgatattggctgtgggtttgtcatagatagctcttattattttgagatacgtcccatcaatacctaatttattgagagtttttagcatgaagcgttgttgaattttgtcaaaggccttttctgcatctattgagataatcatgtggtttttgtctttggttctgtttatatgctggattacatttattgatttgtgtatgttgaaccagccttgcatcccagggatgaaacccacttgatcatggtggataagcttcttgacgtgctgctggattcggtttgccagtattttattgaggatttttgcatcaatgttcatcaaggatattggtctaaaattctcttttttggttgtgtctctgccaggctttggtatcaggatgatgctggcctcataaaatgagttagggaggattccctctatttctgttgattgcaatagtttcagaaggaatggtaccagctcctctttgcacctctggtagaattcggctgtgaatccatctggtcctgaactttttttggtcagtaagctattgattattgcctcaatttcagagcctgttattggtctgttcagagattcagcttcttccttgtttaggcttgggaggatgtatgtgtcgaggaatttatccatttattctagattttctagtttattttagaagaggtgtttgtagtactctctgatggtagtttgtatttctgtgggattggtggtgatatcccctttatcattttttattgcgtctatttgattcttctcttttcttctttattagtcttgctagtggtctatcggttttgtttatcttttaaaaaaaccagctcctggattcattaattttttgaagggtttttttgtgtctctatttccttcattctgctctgatcttagttatttcttgccttctgctagcttttgaatgtgtttgctcttgcttttctagttcttttaattgtgatgttagggtgtcaattttagatctttcctgcttctcttgtgggcatttagtgctataaatttccctctacacactgctttgaatgtgtcccagagattctggtatgttgtgtctttgttctcgttggtttcaaagaacatctttatttctgccttcatttcattatttacccagtagtcattcaggagcaggttgttcagttttcacgtagttgagctgttttgagtgagtttcttaatcctgaattctagtttgattgcactgtggtctgagagacagtttgttataatttctgttcttttacatttgctgaggagtgctttacttccaactatgtggtcaatgttggagtaggtgtggtgtggtgctgaaaaaaatgtgtattctgtcgatttggggtggagagttctgtagatgtctattaggtctgcttggtgcagagctgagttcaattcctgggtatccttgttaactttctgtcttgttgatctgtctaatgttgacagtggggtgttaaagtctcccattattattgtgtgggagtctaagtctctttgtaggtcactaaggacttgctttatgaatctgggtgctcctatattgggtgcatatatatttaggatagttagctcttcttgttgaattgatccctttacaattatgtaatggccttctttgtctcttttgatcgttgttggtttaaagtctgttttatcagagactaggattgcaacccctgcctttttttgttttccatttgcttgatagatcttcctccatgcctttattttgagcctatgtgtgtctctgcacgtgagatgggtttcctgaatacagcacactgatgggtcttgactctttatccaatttgccagtctgtgtcttttagttggagcatttagtccatttacatttaagtttaatattgttatgtgtgaattcgatcctgtcattatgatgttagctggttattttgctcgctagttgatgcagtttcttcctagccttgatggtctttacaatttggcatgtttttgcagtggctggtactggttgttcctttccaggtttagtgctttcttcaggagctcttgtaaggcaggcctggtagtgacaaaatctctcagcatttgcttgtctgtaaagtattttatttctccttcacttatgaagcttagtttggctggatatgaaattctgggttgaaaattcttttctttaagaatgttgaatattggtccccgctctcttctggcttgtagagtttctgccgagagatctgctgttagtctgatgtgcttccctttgtgggtaacctgacctttctctctggctgcccttaacattttttccttcatttcaactttggtgaatctgacaaatatatgtcttggagttgctcttctcgaggagtatctttgtggcattctctgtatttcctgaatttgaatgttggcctgccttgctagattggggaagttcttctggataatatcctgccgagtgttttccaacttggtttcattctccccgtcactttcaggtacaccaatcagacgtagatttggtcctttcacatagtcccatatttcttggaggctttgttcatttctttttattcctttttctctgaacttctcttctcacttcatttcattcattttgtcgtccatcacttataccctttcttccagttgatcgcatcggctactgaggcttctgcattcgtcacgtagctcttgtgccttggttttcagctccatcaggtcctttaaggacttctctgcattggttattctagttatccattcgtctaattttttttcaaagcttttaacttctttgccattggtttgaatttcctcctgtagcttggagtagtttgatcatctgaagccttcttctctcaacttgtcaaagtcattctccgtccagctttattccattgctggtgaggagctgtgttcctttggaggaggagtggcgctctgatttttagagtttccagtttttctgctctgtttttttcccatctttgtggttttatgtacctttggtctttgatgatggtgacatacaggtgggtttttggtgtggatgtcctgtctgtttgttagttttccttctaacagacaggaccctcagctgcaggtctgttggagtttgctagaggtacactccagtccctgtttgtctaagtatcagcagcggtggctgcagaacagcggatattggtgaaccgcaaatgctgctgcccgatcattcctctggaagttttgtctcagaggagtacccggccgtgtgaggtgtccgtctgcccctactggggggtgcctcccagttaggctacttgcgggtcagggacccacttgaggaggcagtctgcccattctcagatctcaagctgcatgctgggagaacctctactctcttcaaagctgtcagagagggacatgtaagtctgcagaggttactgctgtctttttgtttgtctgtgccctgcccccagaggtggagcctacagaggcaggcaggcctccttgagctgtggtgggctccaccgagttcaagcttcctggccgctttgtttacctaatcaaacaactaactgggcaatggcaggcgcccctcccccagcctcactgccgccttgttgtttgatctcggaccgctgtgctagcaatgagtgagactccatgggcttaggaccctccgagccaggtgggggatataatctcctgatgtgccatttttaaagcccattggaaaagctcagtattagggtgggagtgacctgattttccaggtgccgtctgtcatccctttctttgactaggaaagggaattccctgaccccttgcaattcctgggtgaggtgatgcctcaccctgcttcggctcgtgcacggtgcactgcacccactctgctgcacctactctctggcactccccagtgagatgaacccggtacctcagttggaaatgcagaaatcacccatcttctgcgtcgctccctctgggagctgtagactggaggtgttcctattcggccatcttggctcctcctccctatgttccagacatatcattttcattccacatgtatttctttgtttattgagtgccttccatgtgttaattactttattggattcctgggggtgagaaggggaagggtgtgggcagggccactgcttacagctgctcaagttgtgccttgcttgagggcaggagcgcaagtggggctgaagtcctgccctccccactagccaggccaagataaggaccattttctttctttttttttttcttcctaatttgcacaaaagatactaatgattaacagagatcctggtatggaaacataagacacaagtttggttttgtctgaaagcactggtagtttagttggtgaggcagccacaaaactaaccaaaagtaattatattgccagccacaatgaaatatattaaccagagatacaaatgacattctgagggggcttggtggaagtagtttaaccctgatagggtggggagaatcaattcttacaactttcgaagagactagttggatgggcaagttttcttaatagctttattgagacataatttaattaattaactcaaagagtagaattcagtaatttttaatatattcatagagttacacagccgtcaccaagatcaattttagaatatgtccctcaccaaaaaacaaacaaacaaaaccaaaacaacaacaacaacaaaaacacatagtggtcgtttcttatttctcccaaatctcttgcatccggtactaagcaaccacgaatctactttataatctgtgaagttgcccattctggacattttatataaatgtccatacatttatataaacatcatacaacatcatacaatatgtagtcttttgttactttgtttctttcagttaggttttcaagattcatctatgttgcagcatgataagtaggcttttgattggtgaagaatagaagcaagtttaccccaaaatgatgcattagggagagctaagagattaacctttgtaagaaaccacggtctgtgtttgaaaggttgaaagtagactattgggtctgctgactagggcctgtagggaatgttacaggaattgaagttagaaatataagttgggagcagatcatggagattatgaatgcttggactttttctgagatgcagatgtttttgagaggggaatgatatgactagagatgtgtatttttctcccccataatgagaaaaattgatgaagctgtaaggtcccccaggttggtagtggagaaccaggtgtgaaatcatgaacaactccctcccaagtacttttccctcatattccactgcctcttactttttatgtttgttagctggagcaagtagaaaaagcacagatgatttgttttctgttataattattttttaaactactagaggcatggtggaaaattaaactcgatagattatagttataaatgttgttctttgggcacttgccatgaggcagcattttcatggcaaaccctactttgtatatttttgtcatattatgagaaagaggccctcttctgggtcacatgtttgcctctgcaggactctgacctgtcattttagatattgagtctatccttgttttgatttcctttggactcatggccttgagtatgtcccttatgttcatttgacagattcctgccaatcaaatggaagacaaagctatcccgagggtagttggcctgtgtttgcatctcttgtagccaagagaaatccctcattgcttgtttctgagctactcatgtcacagacttttgcaagaggaaggatttttgagattacatggttcaaatgttattaaattaaggtttagtggtccatgaacctcctgaaattgtttgcaaaattatctttaattgtgtggaggtgtatttttctcccccataaaattctcagatggattgcatccctgtaagggggaagaatcatttatccaccaacaatattgaacttttattgagtatttacactatgccttgtagaagacttgtgttatctcattcagtctttacagcccattctcatggattaggaaactgaatcatacagtagttaagttgacttgcccaaggtcacagagctagtaggtgacagaacctagattcagaccctggactctaaccccagagcctatgtcttcatccttctgcattttcaaccttcatgcctgctttgcactattctagtttaccttttataggctctggagttgatggagtctcctttaataaatgggtagtggaggcccagagagaagtgaaacatgtctaagatggtcctgtgattaaagacacatagctgttaacgtgtgacacgaatgcaaacaccaaagtcagattatgaggctttaacacataatttctaaatttaatttaaaatgctcctttttgacctttacttctgctattgattttcatcttttctcttttctccttcttaccccttctcttctttcctcttctgctctcctttcttcctgcttttcctttctttcttcagcaaccattactgagcatttaccttattggaattattggattaggtggaattattggtaattgtgtgttttcatgttactaaaatggactgtccagctcttctgtggccaacatctctttactctagaaggttctcaaaggagttaccacacatgaaagaaggttggggaaagcaaagtacccgaagccagtgctttacactggtacacaggagtaggtacccactttccgattcgggggactggattgtgtcattcattgaaatatgaaatagtgaaggaagcttcacttttatatcggttgggggtagcgtgagagttgtttgagcttttcacttttgagagcttttcaaatgaatcgccttatagttaaagctggagattagaagaaagatcaagactaggaaactctttatttaaatgtcaatatttaattgacaattaactgttgttgatttaaattaaatatatatatatgtatagagtcttgctctattgcccatgttccagactcaagctatcctctcacctcagcctccagagtagctctgactacaggtgtgacccgatacacccagctatttttttttttttagattttgtagagacaggggtcttgctatgttgctcaggctggtctccaattcctgagctcaagtgatcctcctgcctcagcctcccagtgtggtgggattacaggcataagccatcatgttcagccagggaatgtttgaagatagagaaaaaagccctgctttctccattccttctacggtttggcacccagttcatatcccatttgcccagatgctcccttttaatctttcctaatgcaggccatagacattggtctcagaattcttgtaagtctacttttgtcactcaattgtgtgaattgtgtgtttgtacaggtctcctgcatttactaaatatagtggaaatcatatttgcctagagatcagtagacctgtgcattgaatctaggctttgttatttgctatttgtgtgattcattgattgattttctttcagcatcaaattctaagttaataaaatgagattaataataatgtctaccctgtctctctcacagaattggtggtcactttttaactgtgaataatggatgtgatggctctttaaaaagagccttttaaaacaaaatgaatacttttttctacatttacatgtgtaattatgatgtttgtttgttttttcccactctctgggttaactctaaactcctttggattttaaacgcctttggacacttttctttttaaccctccttcatacctaagacagtgctatgtatattgacatttaaatgtacagggctaattatggtttcgtttcttcacttttttgttgttgttgttgttccttttgttacacatttattttgaagattttgttttcctggaaattagtgggatgttaacgtctccttaaagaactcattctttgtctttcctggttccccctcttatcctctgtaacctgtgacctcctcccaccatctgaggtggatgtctcctgaagttcttactctgtcccagcaatgatgaccttagtgtgtctactgactcttaaaacccgtagggacataggatccaactgcctcatagaaaagtaaggccgagagagggttactcctatatttggttcaagtcaatctgggtgctggtttataaacaatgcctattcagtgctctgcactaaggcatactggtgttatgcttctatttttgcctttattatttttaaagttttttggatgaaattactgacgttgatcacatattaaaaatttatgaggattctatttttgggttccattctatttaattctagctgaaatttgcttctcttttttatcctgttatggtacatttgttcctagacataatcaggaatgacaccagacacagactatattttggtgtgtattagtgagaaaatttagtatgtttcttttgtcatgttgaatgtagacactatggacaatgtttaattaattttaattgatttttgttgttgttattatctttctcaatttcctctgctttcttcttacttccttagcatggtatgccacagatagggacacatttcatctgaaagatgtatactatatatggatgtctttgcagtttcttcagtccttttaattacataaaaatcttaataatattaaaacaacaattatgtaaattttcaaaagaatttcaaaagcaatgaagaagaccactgttcagaacctcaatttctgaacctctccttacttttccttcttccttttcagccagtccttgctcaactctgaatatattttgacaatgtttcaattataatatatgcagaataatttacttctttcacttaacattatttttaaatgtcaatgttgctacatattccaaattactttggaattcattatatattattattcttttatttccactagatttatacttaagacagaatctcaagagtgggatatttgggtcaaatagcatttacattttggctcttgaaataactaacagcatgtcatttccaaagagacgttaatcattgataccaccagcagcaaatgttctcattcatcagaccacatttgttttacacgttcctctccttagaaagagataagtatggtttcttttctttagttcttgctaataggatacccaacatattgaaaatggtactccattgttttaattctcatcctctctgaccattagaaatattttgctccatgtgtctttgacgaagtttatgtattgttttatgaagtgtaaattcttgcccttgcccatttgatctattgagtttatgccttctttctttatttgggatccaaaatatttattaactctctgcctgacctatttgttccaaacattttttccaagtctgtttgcctttttagttatggtagtgtatgtatgtgcatgtgtgtgtgtgtgtgtgtgtgtgtatagatctacatacatgtgtacacaccatatatatatggcttataatggggacagaatcacttagcagatgggcaaccctgatgatccaggtatttacgaagggactcaaaccatcttcagttgtctaggtattcagaagaaaaaaattcagaaggctgggcgcagtggctcacgcctgtaatcccagcactttgggaggctgaggcgggcagatcatgaggtcaggagattgagagcatcctggccaacatggtgaaaccccgcctctactaaaaattcaaaaatcagtcaggcatggtggcacatgcctgtaatcccagttacttgggaggctgaggcaggagaatcgcttgaaccacgaagtcggaggttgcagtgagctgagattgcgtcactgcactccagcctgggcgacagagcgagactctgtctcaaaaaaaaaaaaaaaaaaaaaaaaaaaaaaaaaaaatttcagaagtcccggagtcctttccatgatgcatttgaagggccagagagatagaggcatgccctatgtagtacatcttgctgctgtccctcgtgtgtttaccctatgggtcaaatgagatggtgttggagcaatcaaaggatacagaccagtacccagcctttcttgtcaagactttgcctctccttgggatgttcacacacacctacccctattttctttagggatctagttgcttacttattttagacagtacatcctttatggccttgctgaaatgtaactccttgatggaatctcctctggtttctttctatctgtccacctcaattgagaactgatttccttcccctgaacccctcaccttcccatagtgctttagctgtagcttctttattcaatgtttcactttttactttggaccagagatatttatgaactttacaaaatctcttttaaggcagatatttcagttctctttgcattaacacaggacttgttggatgattgagtaagcgtgtgggggggtgtgaagagagggttcatttgttccttcctcgtgacagagctgagaggggaagggcccttgctggtggtggatgggccctgagggttaattgggctgagtgtggccacaaagcagaaagacttgctgtgctttctgaacttacgtaagttacaaacactattaaaatgtcacaaacaaataagagaatgaggactgtacttaggttccatacttgtggtatggaaagctatctaaaataaaattagctacatatctctgcagatttctctgattcactctacaaagaagcaagtgtttaatctaattctgcaaatatttgagactctttaccaggcgttgtggaacatgctttatgactggaaaagatgataaaggcatagtttctgccctaaggagctgtttgtgcatctgttggaggatatagatattttaacaggaagattctaacactaggtaggctgggtcctttgtgataaagtctgcattagaaatatgtgagaagaaaagattaacctgagtgcggtctctcatgaagttgctagtatactcttctttctttatgcatttaaccccaaaattatctctactgagatgattcttcttttgtatgtcaaattttacttggcttctccctcaccctgactcctagtcccaccattttaattttatcatgatttgaataatatcacaagggaatgaagaatttattctttttttcaataggtgaacaaaaaaaagtatgagaaatgattgatgtgtatttcaacattgagaaaacccaaggaattaggaagaaagttctctggcatatcaggaaataggaaatgatctcaccaattgctagaagtggttgctcagtctcttggaaagtgcaccttcagtagatagcacttaagtcatagcatgcgcgcacacacacacacacacacacacacacacacacacacacacacataatctctctgccttattagccatttattctctactgtctttcagtagatgatttcttttaccttgttcctttctaaatattacctccactgggacctaattacaacccctcaaaattcacattacattggaatagatgtgagctcccaatgttatctttaggcattacagaatattagaaactgactgtggttatccattgtgtatgcaggtatataaacctcttttgcccaaatcgttgtcagactgcagtgagaaaagtcaaggaaatatttcttactagcttctgaatgttgtatgaattttccccgaagaatgataataatgcaagctgagactttttatattctaaagtaaacatccaaagccagttttccccttctattaaatgaacctttaactgagctctgaaattgtgaggaaggacatactttgatgcccattattctgttcaatagccatattcagaagagaagtttaattcaaactccagcccatcaaagcattttgcagggttttcaaagcagttattgtaatagagagtaattaaatattactgttttcaactgcttatttataatgtacgaagacattataatgaccccaaagttggtttgcctttagaaaaataaggatacaaaatgctgtgtagaaaagaatatgctatcttaagtctagagagctgggttctagtcccatttctgcttgtgacttagtctgtggccttaggaaaaggcttttcttatcgttgagtctcattttcctgcctttaatgacaaagaaattacaaaccttatatctgtaaggcacttaataatttgtcccctcttcttaaacttgtacaagtgaagttacaacattctatcaagttcagaacatgtagactgtaaaattttacacctacagaacatgtaggtgtaaaatagagtcacccataaatctattacccagatacaggtgcaatctatcatgatcatatttatgtattcctttcaagtctttagctattagcataaattacccatcatgctgtgtatctcttgacatcatacattaagcattttccatatcactgcatattcttgaatgattacaattttaataactttaatatttcattgagtgattgtgccatatcttaattgtttcattatttgaaaattttgcgatgattaacatttatgcataaatgtagcttacttcttcaataatcttatatatgatgtctgagggttgagacacacgggtcagaggttaattttttttttttttttttgaggcagagtctcaccctgtcgcccatgctggagtgcagtggcatgatctcagctcactgcaacctccgcctcctgggttcaagcaattttcttgtgccagcctcccgagtagctgggattacaggtgtgcgccaccacacccggctaatttttgtatttttattagagacagggtttcatcatgttgataaggctggtcttgaactcctgatctggtaattcacctgccttggcctcccaaagtgctgggattacaggcatgagccaccctgcccggcccagaggtgaatatttttatggttatttctatctattgatgacttgttttgtgaaagggattttttttttttttagctttagtaggaatgtgtgagtgagtcagcatctcccctatcatgctagtattaaatatgttgtttttttggtattagcatttctctggttatttgtaaatttagatatgtttccacatgcctcatttccagttatttttttttattgcctttgaagatgagtactttccaatctttaggatcccattcacagcaaatcaaagaggaaacattttagtgagaattgtgcaattgtgcatgtcttataaaaggttctagaacattttttactcacatgaaggactgtttgaataagttgagacatgccttattcctaaatggaaacatagaggttgttaagtagttgttttccctacatttcgtgcaatcacagttagtacaactctcaggtcaattattcttgaattttaaccaaaaaattctaaattgtcttgacaataaacaggcaaaataggtaaaagaaatctgcaaaataagtgtaatgagcaactgggaccatcctagccagatgctgaggtgcatttataaggcaactctgattgaaggaggaggtggtgctggaatagatgggaggtcaaagcagtaacagaacccacccagacataaggcaactgcacgtggaattaattggcaataaaagaaccaccttgctacattccgaaaaggaaggattattctcatggcattgggataattggtcagcgttaatgaaaaacttacatcatgagtatgtttcacaataaaccctgatataaattagtggtcatgttaaaaaataaaacttgcaaaagtcttcaggcaaagaagaaatttgttatatctgtagtaactgaaagcagtaacttttaagtttacacctgaggtcctcaaactttttctgtaaagggccaagtagtaaatattttaggctttgtaggccagatggtctctgtcacaggtcctcaactctttgtgctgcaaaagcatcaatagacaatatgtaatatgtctcatatataaacaaatagagaatatgtaggtttataggaagagtcataatattgtgaatgttaatttcctgacaaatcgtgtcccatggtgaattttatgaatctttcatttttttggcaaactgtttgaaaaagcatttcatggctattttaatttatatttccctgattattatttaagttgtgtgtgtgtatgtatgtgtgtgcgtatgtgtgtgtgtgtgtttggtatatttgtgtgccactgatgtctctttttatgtgaattataggtagagttaatttatctcacttatttcacctctctgtcacctgatgtcccaataccctggagagctttgtgatatctacaccccagtacagactaataggtcactggtttgcttcagaactagaacttctcctgtgcctttgtgcccaagggcctgggacttgacttttggctcagttctacttgtctgctaacctgaccgcttgacagtggattgaggatggagggcactgagcagttttggctgtgcttgacctcctgcttagtttccctccatggtctcttagaaatctgagactgggcgtggtggctcacgtctgtaatcccagcactttgggaggccaaggtgggtggatcacctgaggtcaggagttcgagaccagcctggccaatgtggcgaaacgccatctgtactaaaaatactaaagttagccaggtgtggtggcaggagcctataatcctggctactcaggaggctgaggcaggagaatcacttgaacccgggaggcagaggttgcagtgagccaagattgtgccactgtactctagtctgggcaacagagtgggactccgtctcaaaaaaaaaaaaaaaaaaatgggactccgtctcaaaaaaaaaaagaaaagaaaaaaagaaagaaatctgggtgagttgttgcctgaatcttgtctgaacctgcctatcccctctgggtcctgaaatctaactgtgggtgagatctgcctttgcatttctgttcatccaggtgagcaaacctggagtttggcctcactctgtccaattgtgttccttccaagagataaaactgagaaagtggtaaagtcacttgcataagccactttcagatccatagaggacccacagcatgagattctgactgttattattacagaggtagaagcgtcattttcttggagctgtgtctccgtgtctttggtgtgccacagtcacaggcctgctcctgcccctccctgcaatctttccattgttgtgtgtggtacaggaactgagacaattatgacagagccgagctggtttctcttctcttttggacatcattgtttgtcacaattctgatcaccatttcttcctctagatcacaaaattgtaaaatcactgctatatttacattttcttttgctgcctgggctttaaaaagtactatttatagctttcctttgaaattcctttattaatagtcttccttcacatgtatatcactctgctatttacaaaatgctcttacgtttagtatttcacttgatcagcataaacacccatgggataagctaggcaggattgttgtctccattttacaggtgaggaaattaaggctcagtgaggcctggaaggccctggcctgcagccactgctggaccgggtgccagaactgggtttagacgtcttactagatctctcttgctgtttttctttccgtctacaaaaactccttctcatttatgagtttcaaagattttcttgtctgacacataaggaaattagtggcttttcttgagagatctaagcattactgcatttgcctaatatttcttttactatacctattggtctgagtactttaagagaaaccagtgtctgtaaataatcttccttcttgtcagacatggaggcagaaattttccaagaagagagagaccctgaagacactgtttgttctctgctgttcttaacaagtactgcaaccacaattttggatttttctcctcgaggctttctagttgtaggctgccacagaatacttcggggtcacagattcctattcccttttaaactgtatcgggcatgtgtgttatgtgacctttgtgttctgaccttcagatttagggaactgaagatttaggaagtcttgttaggacttaaatccaagtaaattccctcatgagtacaaagactcatctgtggaggtgtggaatgttggagagaaagggactttcattcatctagccccctgggttagaaaacagggctggtgagtgatagagctgaggctagcgtgcggagatcagactagattcggctttctgctggcttcctccatatcactcagtacttctggagttgtagcatgcctcttccccctggactgggagctttgagagggacggcactgggtgtgctctgtgcacggctcttctagaggtgatccaagtgctttgcataggcactcaggatttatttgcttgatgaatttgaacctgtctgttgttgataaaatatcattattgcccataaggatcttgagggagtttgtaaggatcttgagggagtttcagtcaggattcactataggaaacaaaccactttagatattttaagtggaaggtacttaatacagggtgtttcacagaagtaattagatggactgcatggagcagaatcgaggctgtctccagaaatgaatcacaaaactgcacaaaattattccattttctacaatcaagcaagacaaaaatggtgaagccaccatgggaattactgagttcagtgatacatcacaaaacttgtgaaacagagatcaaaagccatagtcagaatgatggtagctggacactgagacatgagtccagctacttactctttttgtcacggctgctttttgacagccaccaagctgaagactcaatatgagaacacagatgctgaaaaaccccatgtctgtgtcaccattcttctaacagaaaacagggcaaacagcagaaacatgtcttccatcttacttttgcctttcaaatatcaagccaattacatatattttggcagaatttcttttgcaatcaaaccttacctgcaagacagcctgtgcaatatgggaagtttgagtgtcgatctaccatatccaccacattaagggtgatggttttcatatttcgggcatgtcttccataaggctttgtgtgtagtagatattaagttggaaccagagtaacaattacgttctattacatctctacttgtcagtgtagttaattatataacagaatggactgcaacagttttactttagggaatccctaagggggaattcctatttatcagaaaaatgctgtaaggagggaagaccctgaggtgggagagtattctaaactgttttggtttcaaacatcttggaaagtactacatggagacatgcgatattataacatatcagtgcttaccatgtctggggggagttctgtcttaaaaaagcttgcctaccttctatgctgttgctccctcgctgcactgttttgaccccactttcctcctcaccagccaaatacaagttttgcaatgagaattaatgtaaaatggtttctttataacaaactaaataggcttattcttaaaaggaaacatagaggttgttaaaccgttgttttccctacatttcatgcaatcacagtacaactcacaggtcagttattcttgaattttaaccaaaaatttctaaattgtcttgacaataaacaggcaaaataggtaaaagaaatttccaaaacaagcagaatgagcaactgggaccatcctggccagatactgaggtgcatttataaggcaaccttgattgaaaaaggaggtggtcctggaatagatgggaggccactgcagtaacaaaacccacccagacacaaggcaactgcacgtggaattaataggccataaaagaaccaccttgaaacattccgaaatgttgagccttcactgaattcttctgacttttccctcaactctgtgtaaccccaatttagaaatgtgaaatagttgttagtaatcccttccacctttacattgtaccctagtgagtgcatttggatgtattttagacacatttttttttttcctgctccaaattaagaatcaggcaacatattgtccttctagtacttgtaaccaagtatatattataaaatcactgataatctcgtatgtgtggggtcaggtgttaaagatataattgaagtaaacactcttgatttatttttatttttattttaagaaaaagtgacatttttgcttcaggagaaagaggctgagtgaataggttagttgataatagtttctgctaggtttctgctatatcttgcttttctcccgaagattcattttagtaccttctttccttcttaagagcacatgctcctaaagcagggaagcccccaaagcctcctctacttcccgttgctaattgctgtggcctcttatccacgccagtaatgaaccaaaagtatgggagggctttagccatatggaacttctgggagaggacttgactgtattcaggattcacttggactaaacgaccaaaacctcattaacacagtgttttcagtaggtgattatatgagttatcgtcaaaactgggacacttttgcaaaggggcactgttaataattacaccagaacagcaggtataaattggagatgtatggtcatcctaattatacagagccttcaagaacagtgtttgaaatgtgaattaaaacgattcgaaaccagagcttaagtcttagtattttcatgggtttaagtttaccttctcttttatataacaatcacttgctgagatctgatgatgggatatactgtgtattaggtcctaggaatatatagataaagtagataccaattttgtttttttcttcactcacagtattgtaatattttagaccagtgggtttccagtctggcttatagcatactggagatactagggcaataatgcattttatgcttcccccaaattaaagtatgttttgccaaagtgtgatgatttaaatgcccctgtaatggttttattaatttttctatttatacttggggttttgtttatgatttggcatgaagaaaccatttattttgctaaggaaaagtttgaaagctactggtttgagacttaaaaatttatctttaatatttggttataaagtcgtaaggctactttttaaagaggggaagaactagactgattaaagctgaaacacataaagatgtaaactgagtgggaaacaaataaattacctgaaatatataaaggtctgctatgtattagaggttttgtgattctagagggcacaggtaggaccaataggtggtacttatgggaatacaggcttcagctgcagaaaactttctagcagtcataacttttctgccatggaaggggctgtcttgtaaggtaatgagttccttgtcattggacatgtacaaatgaactcacagatggtgggtaagcttcatcttgagctccacattagataaaatgtcttcattaacaatttcacacttcaaggatgttaaacttctgtattggtgaatgttgggtcctttgctacttctttaaaaatatctaaagtgtgtgtgtgtgtgtgtgtgtgtgtgtgtgtatgtatttgtgttttatttccccagaacattagctgagtatatttttcatgtattttattttatatttttacacagtggtcaataattgataaaaatacagaagctactacaacagttctctcatcaagggaaacttaaaagggataatgtccatagatgtgattctgaaactgatttgaaacagcctggttcatttttactgtgttgccattggttaatgcttaaccagattttgtctctgtttcaaaatcttgaaataaaagtggaacaacttccaacatgacttaagaaaaaggtccccagttgaaaatgcttccaatcgttttgctattaaatgtgaaattgcaaaactagcctctcttacaaaaactagtgagaagcttgcctgtttttcataccatttcaaatactgagaaataatttctctaggctcttggaattagagttaaataaaaattatatttcagagtatataatgcatgaagttggatttctttgttttctaaaactgtatctcatggtccttgaaggttgataatttatatctctggtaccactttatttttctattatttgtggattaaaaattttaaatttagcaatatacttatattttgctttagaataaagttgatttttaaaaacttatttagagacagggtctcattctattgcccaggctggagtgcagtggcatgatcgtggctcactgtaaccttgaacccctggtctcaagtgatccttccacctcagcctcccgagtagctgggattagagaggcgagccaccattcccagctaatgttttttagaaattattattattttttttttccagagacacatcttgttgtgttgcgcaggctgatctcgaactccaggcctcaagcaatccagggtctcctcccaaagtgctaggattatatgtgtgagccactgctcccagctgagctttttcttaatagatatttaagatgatatgtaattagagaatcggagattaaactggaaactttaatttacaataacaataaaatattaattcaataatagtaatttaaattacaggccaggtgtgatgactttaatctcagcagtttgggaggccagggtgagagcaccgcttgagcccaggagttcgagactagtgagaccctgtctttacaaaaaaaattaaaaaatttgccagacattgtggcacacctatagtcccgactactttggagaggctgaggtgggagaaatacttgagtctaggagttgcaggcttcagtgagccatgatggtaccactgcactacagcttgggcaacagagtgagaccttgtctctaaataataataatgataataataataataaaaataaacaaataaataaattataatgtccaaactcaattcaaaagctctaagctaatttatagtagttctgatgtaggatacaaacaacacagttgacagttttgtgaacaatatgatgttcaaaaggctgaagtataatctctaactccccatcttgttgctatgattactcttagcagattatgtggcctgaatcaacattggttcacagtcacaagcagtgttatcagatgtaaatatgtcttaacgttcatcaatagtagactcatattcattgaaggaaaaattaagaatttctactttttcaagttataactaaaattgcttttaaaatcttccttattttattgagatatcaaaataaatattcaaaaacagaaaaatacaaacagaatcattaaaaaattaagataattagaacatcctaaagtggtagcaaaatctcatggcctgactaatggtcatgacacacttgtaaatggatatctaaaatggagtgtttacatgttttaatacaagtttgaacaagctgtcagggaaacacagctaagtgagctgcagttaacttgcagacttacacagttattggtaggtttagaaatagaagatgctagataaccgttaaagagattgctaggtctcattagagatcatattggtgatttttcctatcgtcactttttcctgggtgaggggcaaaatctttatgaattaggcacttagcgtctcacctttacaaatccagatttccacctttagaagcagatttactgaactcaaagaggtgcaggctattgttgcctgttttctcttggccttgaacagaaaagcagtctataataatcaaggacttagaagaaacctgctaaggagcccgtttttttgccagcactgcacactccacagactagccataacattgtggatcataagaagttgtgggaggagattttgaaggtcatcattagttgcttattattttaaatctgcagaaactgaggtccagagagaattcacattttcttggttactttgccacgtggaacaattgttatcaaatgtgacctggaatgcaaggttggggccatttatcttctgtgctaattttcagtgccatggttgcgaactttcttggcagagaaattgtttacttctgtgccctattccattgccttttacctaccccatctagttataatctagcaatagagttataagcttgtgtaatcaaactttcccactgcagatgctctttggagacagaatatttgggtttaaacccagcctctgatatgttctagctgctctattacattggataagtttctttagcttctctaaatctcggtatttgaatactcaaattagaagacgtaaattatttcctaagatttctcctagctggggttctctatgaccttttagctcttaagtagtctgtcctggctattgtcaaccatgtctttttttccttgactgatagaaactgtggcaaactaaaggccacttagtcagtatttgttccgtccttaaccttctctcctgagagtcctgatctttcagtgctgttgtttccctgtcagggttgattgtttccttttcgagtgccgttctgaatctgaagtgaaagtgcagcgtggaggcatgtcactgttgtgtctcacttctttttcttttttttttttgagatggagtttcaccctgtctcccaggctggagtgcagtggcgcgatctcggctcactgcaacctctgcctcctgggttcaagtgattctcctgccttagcctcccaagtagctgggactacaggtgtgcacctctgtgctcggctaatttttgtatttgtagttgagaaggggtttcaacatgttggccatgctgatcttgaactcctgacctcaaacgatctgccttcctcggcctcccaaagtgctgggattacaggtctgagccactgggcccggccgtgtctcacttctttatctgagacaatgtttactggtctagacctgatgcttctctcccttgctgcttcgtagtttatttggatcctgaaatgccgctgagtttttcttgtcacctgcagcattgccaagaacaaggagtgcaccattagtgttaatttattttttctggtactctgtgcaaggcagatgggcatttaatgtgctgattccaaccctaccttccctcatctacactccctggtctcataggagttaaaacatagttttgtaagaaaccttagctccttgaacttgtggacttgtgggagaatcatggaaacatgagagttagagggaatggtagtggatatctaatctttagtgtacagataggaagggtcactgaggttcaaagaggttaagaacgaaagtcatagacccaattagtgactgagctagatagaaagtacgcccaagtcctctgcatctaagtctagtgccttttccagtttttccaaatgtctctcagatagcctatataaaggtttggcatttctgtagcgttgttctctcgttacctcttctgagcaatgccagctgtccatgcagagagtggggcacttagccagtgctgggccaaagctgtctgtaagaagaagttgagtgaatacattgacattttcagcccatggtagatcctgctttgcccttccggctctatgtgacctgatgcttcagaggaagagtgaatacatttgctgttcaactaacaattgtgtgtaattttcagcctgccttattcttcaatgctgtcttcccacgcctccaccacatgccacagcatatctgcttcgcaattacgctggtagggacttaccccgtttggaaaaggtttgcctaaatacttatttacttgtgcatgatacatcttgattgataccttgttaatctctgagatcaacccaagaatccttccttcaagggggaggatagaagagtcagggaaacgggtgacagaaaaagagaaaaagaggactgtgcttcctcactgatgagcaaagaggagaattacagatgatatcaaaacaatgaggagaatcacgggtgatatcgaatctgctttacttggcgttggctacttgtaaagtcaagatctttcatagactcataaaagcttgtgagcagagttgtcatttgtaccatctaattccatcactacatttttcgagaaggacacaagatttcagagataacggaagttacacagtgggctcatggcggagccaagactagaagctgggtctgaattctgaagatcaggcatctttccactaaatactgagatgtgaacaataatggagagccgtatagcccagaggggaaaccacattataccactttagtggatgattaggaaagcagttttgaaattccaggaaggtactgacttttgtataaagagaatgtttaaaaaaaaaaaaccttcaaagttataggagagtgttatttaaattgtaacagcttgtttaaatgaagaaaatgttgctaagggacatgaatgctaaacgttagtctgccatcagctacttctgatgtttaagtcaaatagtccctcagttctgtggtgttaatctacgtcccttttctaatatcattcatttattcagtgcacactgaccaagagctaggccttgagttagttgccaggaagatatagggactaatacaatgtcatttaaagattaatagaaatgctctaagtcaattattctcaacccttgaatcagagtatatacataaagatccccatatgaggttagtgtgcagactgttttgataaacactactctaagtttattgcactggatgttggataatatgatgtaacggttgtttgtttttcagttttggtgatctatataaatctttttagaagagtagcatattgatttggacgaaaaaaaggaaaatatgaccaaacactacttctttctgtttttgtgggtgacagtgacttgacattcacatggtatcctgagagaggcttagtagctttgttagtattaattgtcagtttgcctatggcactaagttttcccacctacgtggggcgggtcctggtcatcacatagccttttgtagttatttgctttctgttgtgccttgattttttttttctgttgactattggcttcatcactttgtggtcctgtggcttattatgattagatttgagggtacagaatagagaaaacattatggcaagtagaattcaagagctggaatggaaataataagagcaaaaactactgttaagtgctgatttcctttgaattgtggtgttttcctttcttctccaaatagggaggtagtacagagtgaagaccggagatttggagttaaagatctgtgtcccagcttcagctttgctatttgttagctgtatatccttgagcaagttattcaacctcttacagtcttactttcttgatttgctagatgtgggtaatgatagtgctacctcatatggcagtcaggatgactgtgtggccattgaaaatttgctagacatataataaaccttcaataaacacttgtttattgtcagtctctagtcttcttaggaccgctgggggaacagacagaagagcagcagaggagttgataagtgaaacctcttaggttcttcttaattgcttgcatgtgacaatttctgaaagagcaatgctgaggaagcagcagctccccagctcccttcagcagtaggcatcttgcttagaggagggccactgctcttgctttcctgtctgctgatggtggttgtgtattctcagagcctctctggaaatcttccctttcacttcttgctttcatgatgattatgaacttcgagtgaaacctagctagaatgaggggaagtaagagcagtgtaaatcttggtccagcaacaccagttctcaccactgcttatttttgtgtttacatgggtctctcttagaagccaagagccccaatgatatgtgctagttcatctgttcattaaacttgtgaagtttcatcaaacccatttatcaaaatgaagggctgtaatgaagattttagagaaagaaagcactctaaaatattagagctgattgggactttacaggtattcattttgcaaatgagtgtcatctcttgttaaaggtcacacttgtatagctgagactagaactggggccacagggactctatgtctatactattggatttatcactttccttggatccatcctacatgattcaatttttaatacctggagttttcactcttgttatcttcctattcaaggataaaagctctagcttcttatctttatataaaacctttaaaaggcagaactcatgttatcttttaaaactttcccctaactgttctccctgaatccctcattttggtgccgctggtctgatccctgtcctacagaaatgccttgcttcatacccaagctcacagtattatttctaatctttgccctggttactccagttttcttttatttactcagcattcaaagtcctggttaagggctacctctgccaagcttatgctagcttttctgacatcccccaagatttttcatgtgctttctgtgttgctctctttctcttttcacatttataaatatttcttcctcaaatagtctttgagctctttgagtaaagaataagaatctgattcatctatagctccagtgccaggcaaataaattcattcattcattaaattaacagacatttttattgagtacctatcatgtggtagcccctggaattataaaatgataaatatttccactctcaaggatttgcgagtttagtttggggaacaggaaagcagatgggcagagcaccatgtgacgaatatgtgacaacagtatgtagatgctgtgggattgtactataaggatgtataacttgaactgtagaatatagtgcaagatttgccttcaaggactagtagaaagtaatgcttatgatctaaattgatgcatagtatgttggaagtcatttttagacaagaagtagcttgtttcagagggagcagagatcaaacctaggaaaaaaatgtgaatttctatcagaaaagtactgcaaaatgacctcagaataaatagaaaactactactattatcatagaagttactggcaatatgattaatgtctgttaaaagaagatgtatttagatgactttatgctgaatttggataacctttaaaaaaccagataattccagtgtagttattaaatatcctagacagtagaggaggttggagaaaactcccctatcaaaacctaatcatgataagtaaaacaagcagaaaaaaatgctataaaatgatctttattatgattatatgtacacaaattatagataaaatagcctagttaattcattaatatatcaaaacacaagtgtaacaaaggatttattctaggcatgcaaagatggttcaatatgtagactttatcaacatatttcattacatcatcaaattaagggagggaaaaagagttgaatgtatcagtggttgctaaagagggcactgcagctgtaactagataggattttattccacaaatgccaagatagttcaatatctggaaatctatcagcatgcttcattacatcaccaaattaagggaagataaaagagatgattgtatcagtgaatgctatagcaattctagaaagatatgagtaactaagaaagagtaacgttcattcattctcccatttctatgtaacatacttgtttaaggggcttcctgcctaggcattgtgccggtatagtgagactagttggagtttccaacttgttgggacatgtaggcaggtaaataaatggctttcttgtggattgttataagtatgccgaaagtactaaagagcctagaaaaaggaattaggctactcttccttggagaagttagggaaatgttcacagagttagagacatttgagctgagacaatataaaaatatagggcttggtagaacgtgaagagagggaaacggcattgttgatggtgaacacagcatgagcaagggttcagaatcatgaaaacttattataaatcctgggaatggggtcactgggtcactgctgacatgcagaagaatggtaagagaagatactgaggaggacatctgcaaacaaatgattggtcagaagatgggcctctcaggaggagcagctggaggtgcttcttcatggagggcagcatgcgggtaatttatgatgctggggataactgaaatgactgtggagccaatgatttgcatattgatacttacattttatttatactctcccagaaattgcctgtttctttatatctgtgctatatccgaaaagccaagatgatacagtcagtcagtaacttgggattactatgaaaaatgtgaatctttgcttaagaaaatactgcatcctatattaaccaatttttcaaccttttattataaaatgactttagatttatagagaccttccaaggatagtattaagccattttaaaaattataattaacatttatactaccaatgtgcataatgcattaaaagttttaaacctttacttgatcccttttatttcacacttatattcactttagtcatactgaaagcaaaccagtcacttttatcccaatttagtagaagaccaagcctcaattaaaagcaaaagcaaaaccaaaattggcatttctcagccatgtgagatgggtttggttttggtatttagaaaaaaaaaatcatctgaagttattccaaatgaacagctaaatttaaaaaccacgagtaaaacagacattcattggtagtttttctatattggttttgtgctaggccttaatggtagtttataaatgtgtaaaatatggtccctacccttttaaggaactcaagtttagcaagtatgtatgtgtctttgtgtgtgtgtatatatatacatgtatgtatgtgtgtgtatatatgaatatgtaaaaggtacgggggaaagaaaaagaaaagaaaggccctgtaaccagagtgaaaagccagtaccatcactggcttcaatagcatgtgtcctgattaccagtttagagtctttgtcattgattcatgttatcctcgtcttttaagaaaactatacatcaagctgttcttccaagcaagatggtcataaaattgccattgactttctacaagaatagaggcttctttttttctcactttgcatagcactctatactataaaaagtactttaatatcatctcattggttgccataaaaattctgagagttaaggaagacagaggtttatatgtttgtttgttttttgagagaaggtctccctctgttgcccaagctggagtacagtggtgcaatcacagcttaccgcagcctcaatctcccaggctcaagtgatcctccaacctcagcctcttgagtagctggaacaacaggtgtgcgccattatatcctgctaattttttaattttttgtagagaccgagtctcattctattgcccaggctggtctcaaactcctggcctcaagtgatccttctgccttggcctccaaagtgctcggattagaggcgtgagccattgtgcttggctgagtcctctgagacagtgaaactatctgaggctctagaggcgatgccgttcaaagtcatgccacttgttggtggtgtggactgatgtgaatatccaggcaacactgtttcccagctctcccctccaccctgtctctctattactatgccatgtactgaggcctttgatttctgtgttctgatgctctttgtctttacagacatctggaggtaattgtgtagccctcttaattaattcagttcaattaataaattagtaggtggcttttgggctgggggcgcttacagggtgccttccgggcgtccctgtgctggagagctcttgcaatcaggcttggagagccctcctcggcagcagcctctgagtctcatccccagcaggcaggctgactggagaggtgattggcttaccctgacagaggagacatttcctctcttcaaatattatatgcaatctgatcagagcagcatctgggctgggctgattgttcccctcctagtttaagcaagcttttcatgaaggtccaacatggtatcagctcaacatacaagttgatgggcatttctttgttgtgcggggctgacctttgcattacatgtgttgaatattctatcctccggtcctaaattctaataattgtcccagacgttggggcaaccaatatgcccctcttccccttttccacataccccttggtggggaccagagctgctcctgcagatggatcatttaaaagtgtcctgccaggtatctgttaaaaccctgtttccaaaataaactttcagtggttccttaatgcctgaagaataaatttaaactcaactgtggctgctgagctgtctgtgctttggtttcaacccaccttttagttcttttgcttgctactttctgttattcgccctccaagcacactaaacgtaaatgctgtgtacttttctgcctgtataattttgccaacatttttcaggttcaaccctacttagcactcaaacccagtctgtatatcacctcatcaataaaatcttgttaattctgcccccaccaagaagtgagcctatctttttctgcatctcagcaacacttgttcttaacctcacttaggtaacttagcacttcatttaggcataaccatttaattggtgagataattaatttaatagattattaataaaattcaagctcttttccatcctcctaccataaaatctccttcaagttaggaaccatttcttattcatatctatttcccaagagtggctaggcactaaaataggtaactattggaagggagatattcaagtttgaggcagtgttctcttcctgctcctcctctttctctttctttctttctttctccttttcctctccttcctccttttcctcctcctctttctattcatgattcctctgcctcttcatttttctttcttccattttctttcacccttctttccagagaactttatcaggatgcatttagtatggattaaggtgaaatagcaatgaaatgaggagtattgtcttcgttttcatgcttccataaaaacagtgtttctttttcattgcagattccaacaatgtctcacccatcttggctgccacccaaaagcactggtgagcccctcggccatgtgcctgcacggatggagaccacccattcctttgggaaccccagcatttcagtgtctacacaacagccacccaaaaagtttgccccggtagttgctccaaaacctaagtacaacccatacaaacaacctggaggtgagggtaagtgctgggatttcagagttggttacttggagtaggaaaattcagttatataggtgatttgtagtacaaagttgtgtcagaaaaacgtagtttgtgaattcacagcgtgggtgtcataggctactaaaagtaaaggagcccccggaaatagtctagaccaaccccgtcttttaggaaaaagactttttatgggttatatggctatggttacataatgaaatagggttagagctcaaactagaaacctggcctctttagtcacagctcaatgcctttctactgcgttatcttccacctccagctcattctcttgtagggttttagctaccagacagtcatccctccctcttgccgttggacaaatgtccacaaatgctgccaagcagtagtccaatcagaaacttatacaaagtgaacctaataaagtgcatggaattgtttacctcctctggctgtttttcttcccttaggctgctgaaggataagttgtctagagtgttctgtgagatctgcatttgttgaatctcccagacaaatatgagtgaagcctagttccaggggttttaataacaatgcattcagtttacatcaagtagagtttgaaggtctacgtgagctccagctctcatgtgtatgtatacactcacacacgaagcctcagaggcagtataaatggtaccatactctttggttgaaaaggttccatatttttaccagtgaatgttagcagcttattcaaactcaagaaaaaataacttaaaataaaaaaaaaaaaaactgaagaatattagacttctaggagctgagagagaagaggcagtgaaaggagatttaactccctttgttttctgtccctgtcccaccattaaaaaaattattaatatcttaccctcttcatgatgtttccagttgcttcttggatgacattaatgtttgttttgtcaatattgcacgcaagtgtttcacactctgtgatatagtccagtcctcctcttttctttcctgtcctctcctgcgcccaggaaacactttactagtctgttagtattttgggtctgatgccagaagcctagttcagatgtctagcttgtgtaaggtgaacacctaggttgggtggtagagaggatcaggcttcagcatgcatggctaagctgcagctgtggatctttggatatccttttcctcagaaagtacaagaacgagaccctcagaaagctgctcttgaaaaacaataaacgaagcctttggtgctgtactaatctctgtagcactccatgatgttttattgccttagaaagagactgcatctttgcagttaatcaagcacttagtggaactggctttctttgactcatccttctttagtgacttcagggcttgggaatgggatctggaagagaatctctcttcatagggacaggaggagccatatgttggcttcctcatttatggtttttttttttgtttgtttgtttttttttttttttttttgagatggagtttcactcttgttgcccaggctggagtgcaatggcattatttcggctcactgcaacctccgcttcccgggttcaagtgattctcagcctcagcctcccgtatagctggattacaggcatgcactaccatgcttgactaattttgtatttttagtagagatggcgtttctccacattggtcaggctggtcttgaactcctgacctcaggtgatctgccagcctcggcttcccaaagggctgggattacaggcgtgagccaccgcacctggccctcatttatgttttcaatgtttccctttgtcagcttactaggggcattgttattttgtctcctaacttttggggaaagcttcagtggacctctctctaatctgaacagaatacagacatggccagttatagagcagaaggcaaaggtgtgaggaagtctttgtaggtatgagagttcttataggcctgagcgttatggtgagggcaggtcctatattaagtgggctcataaatggcatatatgagataggtagaagagaagcatataatggcctcgctttagactcctttactgtgaatttgacatgccctccttgtactatgtgtggttcacccactgtcttactctctaggaacactgaagtgatttgtttgcgtgccctgcagcacagtccttggtcccctctcaacatgccaccccacacgtttttgttacctgaaaattctatttgtatcactttctccaaaatggctaggtgcagcctaggtcagaattaatcgctccctttcccgagtttccacatcttattctttgacttatccaaatttctaccacttttgttattgctcctgcttacattctgtcccatattgaacatgtagtatatgccaggctctatgctttctctttattattttattgccttcttatgtaaccctacaaaatgtttttttttttttcttataaagaaatggaagcttaaaggaggtgacattctctatgatttgcttggagtatgtttctgaactaaggctgctgtccatatccagcatgcggtactgcctgtccttctattcacagcacatgtggcagcaaaccccatattacagtgatacatccctgcatcccttataagaatatatataagctttgcttcctcattgaagcaacaagacatggtttctcactcgtccttatgttcctcatagctcatattatgctactgtgtttttagtaggaatggttgcatatggtcaaatgtatgtctgtgtgttcttatgtatgcatatatatttggatggctggcggatggctggctgggtgagtgcactgctcagtgatgcttctccaaagcagtttggaatatggtataactcagtcttttgttttctgaaattttggctctctcttgcatttctgccaattctcactctttttctctctccccctctctctaaatataataacctttaccttttctgaatatgcaagagaagaaattttcctttaatatataagttaaagacaaatcttgggaacagtttatggacattcagactttttaaaatagaagctacatttctgcatctgctgtatgaaacaaagatgtatccatgtatttgttggaagtagatttgcttttctttatatttaatttaaatgttatcagtgcattctgttactctgaacatttttgtaacttacatctattgtgtttgtttacacatttaaacaatttataaccattccttttcgtttctttttttcatttagaatgttctatactctcagtgaaattcccaagatagtaggtagcacaggttttatttccaggatgcattggtgataccagcttatgctctgtattgcctcagctcatgctgtttttggcttttagagtgtacttgtcccccagtttcctgcttctacagtcttttaattcattgcttaaaagttgacctccacgaagctcaaccacaaatgcagaaagttagaactaatagaaatcacgcaatccatcttgttctgacgtaaatgtgaaaactgcagtctagagagtgtaagttatttgttcagagaagcacagcctgctctgagccgagttggcactcaagtcttttccctctaactctagagttacccaaaccttgtactatattctaatggcaaactgttctttactaccccataccctcatgcattgcctacaattcttatgacaatgtgttttttaatagatttgcttgtatatgcacctgtcttctctagcggagtctgaactttgagagtcaggggctgcctgactcatgccttttccctcaacagcacctagcaggatacctgacacatactaggaactcaatagtgtttgcagaactgaattaattgataaagcacagtaatataaacctacttctccagacacaggttctaggttctcagctacttattagacactgtggttctgcagtttcaacccacgtctttgcattacttttccttcctatgcccattctttgaacttacatttctcaccttggtgttacgtctgtaatctctggagtttgctttcccatgttttaattctgactgtgaaagtagaaaaatacccacatgttttccacatcaacttatctttctggggtacccatatttataatttcttttataagatattctgataataaccattttctaaagggctttggcacactgaaaagtggggcatgctttttttcccagttagtagctctttagatctcagggtccttttattttacttccattgttctcatttcttttcactgattttgtaacaagttgtgttttcatagctaacttagaatacccctacatttccaaatgctttctctgtgttcaatgctttgtgcttacgaactcatacttattttttaattaaatttagtcttcttagagattttttttagttcaatagcttttggggaacaggtggtttttgcttacatggagaagttctgtagtggtgatttctgagatttcggtgtgcccattgcccgagcagtgtacactgtagtcttttatccctcacatccttcccatccttcaccctgagtccccaaagtccattatatcattcttatgcctttgcatcctcatagcttagctcccacttataagtgagaacatacaatatttgattttccattcctgagttacgtttagaataatggtctccaactctatccaagttgctgcaaatgccattatttcattcctttttatggctgagtagtatcccatagtgtatatataccacaattttttatccatttgttggctgatgggtatttagaagatatacagacaataatcatatgaaaaaatgctcaactcactgtccgggaaatgcaaattaaaaccacattgagataccaccttactcctgcaagaatagtcataattaaaaaaataataaatgttggcatagatatggtgaaaaggggacacttttacactgttggtgggaatgtaaactagtacaactgctatgaaaaacaatatggagattcactaaagaacgaaagtagacataccatttgatacagcaatcccactactgggtatctacccaaaggaaaagaaatcattacatgaaaaagacacctgtgcacacatgtttatagcagcacaattcttaaagattttatagtgttaactatttcattttttgtgaaattattttggtatatatttatgatgttgttccatcactttctattctgtgtaactgatgacaacaagataagataatgcaatttttcttctggtcttcaaaatactagcctttagtgttgtttgtcctataatctgggttttcactctgctccaaatcaaaaaataaaaagatacaacaaacaacaaccaccccacccccaaaaataaaacaacaacagcaattaaactcagtcttagactttgatggcagaacagtatagttctttttctgtttttggtaaatagcaaagcaaatgaactttcctactgtactaatataattttttaaagatggtttttgaaattatcttactaatacactctggggattagtgttaggttgcctttaatggcaaaaaccacgattacttttgcaccaacttaataactctctctctctctttctctgtctctctctctctctctctctctctaatttggctgaatgaaatttgataatactttttatccatcattaaaatagataatcatttggaaagatttgtaaagttcacgtttgtgaagctggagttgtcttgtggcctagaattcactttctttaatttctgaaattctttttaaaaaacatttttatgttagatttttgaaaaaacaaattggcatgacatgccagttctcactctttttctttctccctctctctctctaaatataataacctttaccttttctgagtatacaagaggagacattttcctttagtatataaattaaagacaaatattgggaacggtttgtggccattcagactttgggtctgcattaggtaccaattcaacgtgatcattttggtggaatccttttatattggtatactcttttatagtttatttagcagttgcatgttcattgtcttttcatttcagtagaaaattcttactgtcactctctgaggtaggtagaacagatgttattgtcattttgatgatttgtaagtagtagaagtggaagagcttaataaggaatcatgtagctagtaaaagagtagagggagaccctcacacctagggctcttacgaattttaaatgctttcgtttattaaagcgttggctacacagtctgatgtctcctttaacttcattattttattatttcatgattcttctttgaaattaatttcaaaatggtgaccctttttacaaaccagctttgtgaatattggttcacatagacttgtcaagatagatcaagataggtgaggtgaattatattaaatagggatcctaagcctggattatttttttatgacatctttctgtgctttctgctactgtgaggttacgaatgtattattccatggaggggaaacagttatagatgattgctaatctacccatgagtttggggctgaattgatccagaacccaggtttcctaaatgcactcattcagctgtaccactgtggtttatgggaaccaggcaagtttggagcttggttcctaggaactgatgagtcctggattattgatgcttggtggagaattagccattagtgatgtgaagccatgtatcctgggtaggcaggacacatttgttttcttagcagataactaacatgtgagggaaatggatgtccacttatggcattatatttaaaggaataatttagactggattttccccattatttttgctgcgaacgtatggtcctcatggtgtgcttttctgtctctggagtcttattgtccttttccccatgcaaagagaatcttgctctgactttggagatacaaatgggaaacatcttttttggaggttacaaatgggaaacatctttttgtaatcctgacagtcctgttaattgcaattagagactgcagttgtaacatcttggacgtttggtataagtatgcgtgttatgccatgaggatagccacaaattcacggaaacatcaggaactgtaatgaagctcgggtttgcctgtcatgccccttttctggatgagcgtaagcatctcgagcctcatccatcactgcacagtgcagtgcatgagttttaattttcaggtcctcagggggacaaaagaacaagctgtgtattcattaaaggatcaaatattaattgtattaatttgatctttacactgcatctttcagcagagaaattaacttgtaattcttggagtgacatcagatcttaccaaatattcttaggccttattgatgctcaaaagtgccaagatgcagccctggcttgatggtcagtgcagttacattcaagcttcagtttcatcacttggccttgggcatgatgcttttctaatccatatcctctttaattcataaaatattagctggtaataccaactgcctcacaagattgttttgaaagccaaatatgatgataaatgtgaaaatgtttttaaaccataaaataccttataactctaaggagttactattatatacttattcagcagtcatttacttaaaacagattttgtgccagatactcttctaggggctgaagtaatggcactgagtgaaacagagactagttcctgccctcttgggatgtattttcttgctataataaaaataacattattaataataatagtgataacatttgtgaaataaaatttatttaataaatgcattttataactttacatataattaccaataactattcaaaattataaaaaatactttaatataggttaagtaactctaatccaaaaatctgaaatcttaaatgtgaaaaaatctgaaactttctgagtgctaacacaatgctcaaaggaaatgctcacaggaacattttggatttcagtattgtggattagggttgcttagctggtatgtgtaaatattccaaaaatccaaaaaatctgaaatttgaaacacttcatgtcccagatgttttgtatatgcgatacttagtctgtagtaatgaatatgtgataatataagtataataataatttagcatgttatccataagtactcatgtcattagcttctaacaacagtgatagagatcacaatgcctcaacactatataaactgtaaaattctagaaccagggtgaatcttaaaagttatctaatacaacccctttctttcctagatgagaatagttgagaatgtattcactaatacatttcagcgaagtacaggttctttgcccaggagtgctgtaaataaccaatgaaaattcttgaatgcaggcaacaatttaatcttcatttcagagactcagagaggcaggtggcttgttcagtattgcagattagtaagtggggaagccaagccatgatcctggggattccttctctggttgccatagacacgttttgggggacttgtttagaagttacagtgattgaactaatatacccgaacaaagtggattggatgttttagaacaaggagaagtccctgtattgttgacagaaatctcttttattttgtaacttgtcagcttaattaactactgaaatgagttccttaataaggtgatgggtgcctcctaattcttgtatggttcaaaaacaataattaatgctgatttgtgtggtgagatacatattaatcatctttatttttgaattatacaaatatacaatactattgtccctccgtattttacatctgaagagaatttaattgcttttttgataataaaaataaacagagagccacaaagagatatcaccacacatgtattagaaaagctaaaataaaaatttgtaccagatgctgctaaggatgtggagaaatgatctctcacaatgctggtaggcatgtgcaaaattttgtagccacgatggaaaactctttggcggtattttacaaaagtaaacatgtactaaccatatgactcagcaaatataccctttggcatttaatccagagaatcaaaatgttatgttcacgaaaaaacctgtacatggatgttcatagcaacttttttttttttatcataatgacaaaacactggaaacaacccaaatatcctttgatgggcagatgtttcagtgaagtctggtacagccatacaatggaataataccattcagcagtaaaaaagaatgaagtattgttggtatatgcaataacctggacatgcttaatgaaaaaactgtctcgaaaggttacatgtattatatgatttcattttaagacaaagctctagagataaaggacatattcatgattgctaggggacagaaatgggtgggtcgggggggggcaagtactggtcattcctacaaagaggacgcagcaagagtctttgtatgggtggaacagatctgtacctcaattggagtgatgattacatgaatctatacatgggataaagttacatagaactgtatgcacacacaaatcaatgcaggttataaaatggtaaaaactgagtaactcctagttaacaataaggtaacaatgtcagtttgctgggttttcgaatgtattacagctttatgagcattaccatttagggaacctgggtaaaatgtacatggaaactctgtactatttttgcaactttctatgagtccatatttaaaaaaaaattaataatagtaaaataaaggaatgcatatagatatcttaatgtattcttctcttactcaaagtgctatcttacatgccatctgaattgcttgcatgatactttgaaagatcactgctatatgtatccctgccaaaatgtatggcttaaacctgtggttttcaaagctggccagtcatcagaaagacttggagaacatttttcaaaagaaaaaaattaaagcaagtcctaggtcccatcacaattttacagaatcaaaatatctggccatggggcccaggaatctgcattaaaacaaagcaaaataaaaaataaaacagaacttcccgggaattgtgattgatgctcaaccaacgtttgggaaccactcatttatttcattaacttcagggaccagtgccttaatctcctttgaaccttctccaagtcctgagagtgtactcttcctcccgtagttaatgatggtagcttttgaagtcttgagagtctttatcttgtgaacattgtacagattcagagacctagagcatctttcatgttgctattcttttccctcagtgctttcattatagacaccaatcgtttgcatatgttgtcctgggtcattttatttgggatccaaaaccagaaaatttcaaacaacaacaaaaaaatggattcttcgagaatgccctagccatggacaagcttctgcattacagagctcttgctattgtgttgctttgggtagcaatgcctgaaatctcagccaattttgggtcacagtaggcctatgtaaattatctaaaaatggattcattatggacattataaaaataaatctgacacctgagcctttgggcaaatataccatataaagaaatcataccctagaataacgattaacctaaagaacttaaaaaaaatcagtatgatatttttatcatcctttcttaaaattactgcattcagagagacctgatggctgaggacagcacctggggcagaggagtataggtcattgggatgtggcatcctgagtcttctagcagtttgctcttccagcactctcccttattatatgttctttacattgttctgtatgtcgctgtcttcaaacagaatagataagtctactagtcaagatagacatataacaggcaccacatgtgcataaaaattgcattatgtaaatttagtgccgtaatataatatgaaggatgtcctctaggaggaactggggaaagcatcacagacgaggacacatctgatctgagtgttggagaatgagttagttgtttaccaagcagaaaagggtggtggacagcatggcatgccaagtaaagggaacagcatgtgcaaaagcagagaatggcccccatcctgacccttgtaattttggcagctctttgctgatgtcctcaggcaatgcatctgggctcctgggaatagctttgcaatgtgaacagagtgacttcactatgggtagacctaaatgttctagcgtgctctgaaacttacctctagaaatagctccaggaagttaggtagcttcagagaggaaggaccaagaaatatgatcttataccacaggcaagaagtactttcctggaggtactggccagaagtactattgctatctctctgcacttgtctgttatattttagaatgaaatgtgcctgtgcatacaaatgctaaggcaagaaagaaaaagcaaaaggcaattctctttaaatctcctgaaataatttcaggcagctttttttacctagtcaaacacacacgcttaagaatggagttgtaagctaacttaatcattttttgttttgttttgctctcttacttgttcacacgttggggtaatcctgagaaaacaggaagcaatgaaagaaggattttattgtgaaatgttcattacaacttgtaattttaaaatgtgtttgtatgagtgtgcacaaatgtgaataaattttagagcactttctcacataatatctagtttaatcaccagaatatcctgcaacgttattatagttcctacattattatggttcctaaagacaaatgaaaaatctgtgattcagagacccaaggttaggctaataaatgtagaagtcacatttgaccaaattttagtatcttcccttaagtattggtaatgtacgataaacactatttggtaataatgaattattacaattactaaaacaacttatctggcagaacagtatcttaactatttgaaaaatattgtagtggatttattagcttccatttcatctgaagtccactttgctttactgcttactttatctttctagctactctgtaaaaaagttattatcaccctcaatctgccaagtataatgtatgtaaagtgaaataactagcatattgcaaagctgggaattgaacccttgtctcctaaatccaagtctgtagctgttcctcagcagtacactgtatctcatgttaatgccattattacttgtattaaatgaaataatttttccatcattattttcccgaattattactatccagagcgatttgaaggttaaggtcatccaaataatgtgtgaaaattgcttaaaatcaatctcctgtgcatggatgtctatgatgtatacaaatataaaacagccaaagtagtctcaagaagttattaccaagtttctcaaatagtgtctcaaggcgacattatttgacaagacctttggaataaccatttggaattttccttagttcagttgaattgtgtcatcttgcttaaacttttcagatatcaggggtagttttattgacattacaatggaattaaaatgacattttattttattttttaccgttctatagaaatggcattttaattcgtcattatttttattattgatctgttaatgttgtaatgacttgggttttagtaagggcatcctctgtaaaaattacctcctgggaaagaaatctccaagttctatgaggtctcccagaaatatcaccacttgaggtgagagtaaagtgtcatgaatgccacccaatgtgattcctggtagataagatttcactgttttatatcttgacatctgcattaaattccgttcttttactgggtcctattcacttccatcttgtgccattgttacttaaccaggctctgtagtggacaggaaaaagtaaaaacacgtcttagcccttaaacagtttatattttcattagaaattcaacatatgaaaatgcccagttaactaacaatataaagctttactgtacagcttctatttgtgaagtgactccatggctaactctatcagaagaaagagtttgcttggagccaaggtagtattggaaggttacagagaagaaagactcagggaggcagtggttaagcttgtagactctggcatcagatagatctgggtttcgagttttgattttacctcttaattctctggaaacttggactcaccaggataagtggcaacctaagttctttcagttttaaaatagagatagttatgcactaggcgtggtggctcacgcctgtaatcccagcactttgggaggccaagggtggatcacctgagatcaggagttcaagaccagtctggccaacatggcaaaaccccgactttactaaaaatacaaaaattagccgggcgtggtggcacacacctgtaatcccagctacttgggagactgaggcaggcgaatcacttgaacacagaaggtggaggttgctgtaagccactgcattccattccagcctaggcgtcagagtaagactccatctcaaataaatgaataaataaaaataataaataaatatatgaataaatgaaatagagatatttgtatcttaaagagttgttttcaaagttaagtcatgacaaaataatgacaaaatcagtggaagctgcaatcattgttcttgctattattattgaaatgaaaatatgaacattagctctgagggttctatccatagttttttttaaaaaattctgattataaaattttaattataaaatcccatatagctcatgctgaccatttaaaaaataatcttagttgtatccttgtttctttttgtatttgctaatagagattttagaattggcttggtgtatgtttgtccttgctagaattatgattccttttttgaatttgcattacacctttgttagaagtagaattactttacttgaactttgtcaatgtggcaaaaaatgattcatgtttatattatctctttgaaaagtagtgtttttactattgaactataagtacagttaaaatgtaaatgaacatttcagaaagaaactattgatttttattaattaaagaaattaattttccaaaatgtcagttgctacagagagattttagggattattaactacacaatctcagaaaaattaatttaattagggattttattttgggttccattcgtttttgagattcatattttggattaagccagtctcctgaaattgtatttaaacttagtctgcgtgtatgtcttttttagggaaagcattcacaacaccatcagaccctcgaagagattcttaacttacccattaagaaaagtaacatctctgtctaggggtcaccagtctctcaagccagttatattgttgctgcttgaataaacaaaacaggtttttatttctgctcttaccaacattactaggctgtgtttgtagcaaaaactgagtatgtggtggtggtagtaactacagtagaaagtgtaacgtgtacacaattatatcatgatacatggtttttaaacacattttatatatgtatatatttaatttattcacacaacaaatatttgcacatgttgcctgagctgtgcatgtgtaaggcagggcatagaaatgaatagggcatgggttctttctgctgaattagatggtaccccctcaccccccattttactgttgaagagagggaagcttggtggtgaggtggcttgccccagaccatacaggtaaaaagtagtccagagtagattcaggcataacttgtttgaaccaaattgtgttctttagactgcaacatgctttctgttccttagcatgtaactattaaccatgtatttttatttatttttcttttacgtgaatttaaaatgtcatatttgttctgcttctattactgcagtcttgaatgatgattcatcagtgcagtggcctattttagtgaaccacaatagcttgggtagaaagaaaaaagatccaacatacacaggaatggaaagcagccatctttttatagctaaaattgcaaacatctggcaattactctattctacctcccttcaaaaaagaagaatcatcccttcaactggagcctgccactgtgtttaatcaaggcagaaagcaagccttaaggagcaataggttttgattcaaggaggccattgcctaacctagttggccaaagtctcttcagaaaataccccatttagtgctccccataagctactgggttatataatgatagtaatggtaatatagcaattaataactgcagaaatccccttttgtttttctgctgtttcatttgtggtggctcttatggcagcttttatattgtgaaagttaattattttggtcagttttgcctgtctccatctgcttaagcttcttgtattccttaacaaaagattcaaccacatcgatacaaccaataattgccaacttgattttattataaacatgtccggtaaaatgctgaaggaacaaataaatttatttttaaagcctggccgtgatcttacagtcaaaaagtggtccaccaaggttatggctcctaagtaccccacccgtatttcttattgtgataattgtttgtgaaactagttcttccctcactggccaaagtcaacactgttggcaggggaagtgagaacagctggtggttcacagtatatgctgagaatcagaacttctgcatttttctcatggggctagtaccagcttttgctctggccttgaccaatgcacgtacctttctcttccccatttacctttctcttcctctaggtctctgaagagtagaggtggatctttcccttcccaggttgtgccaacattattaccaatgttcccttttgttgtagaatattttggtcagtaatcatcagtaatcgctaagtaacagaaaatcaaggttcgacagcacggttttcaaaaacaacctcaaatactataaatagtctgttttctagtgttagcagattatggtacatggaaatcataagcattcagtgggggcctttgagcttacattaaatgcctgccttttgcttttatgtctttgctagaactgtgttcaatacccaaagacacagctttttctttgatataataatttttctaggctgtctttcctgccagtcttcccaaaatcccagtgaagtttgcaaacacctcattaaactaaatgcagttttgggagagatgagattgtgactagggagttttctggtttttacaaaaagaatagaaaaagaaaaagaacaggaactcctaacaacctaaaatgcatgccttgtgcaatatagttatcccatgcagagctacatagtgtaacgatctctggaatctcaaatgaatgtgctcccttttctctgtcttcattcagttggatagttctggtcttcctccctcgtgtgcacatctttgaacttgaactactgtattacagccagtgttctaacctatatgcgtttctctttggtggccctgctaatatagaagaggttacgctaatgttccttaccatatttttctttttggtgtcttctttgtgtgtgtgtgtgtgtgtgtgtgtgtgtgtgtgtgtgtgtgtgttttaattgtactttaacttctaggatacatgtgcagaacgtgcaggtttgttacataggtatacacatgccatggtggtttgctgcacccatcaacccgtcatctacattaggtatttctcctaatgctatccctcccctaggcccccaccccctgacaggacatagtgtgtgatgtacccctccctgtgtccatgtgttctcactgttcagctcccacttatgagtgagaacatgtggtgtttggttttctgttcctgtgttagtttgctgagaatgatggtttccagcttcatccatgtccctgcaaaggacatgaactcatttttatggctgcatagtattccatggtgtatctgtgccacattttctttatccagtctatcattgttgggcatttggattggttccaaatctttgctattgtgaatagtgctgcaataaatatacgtgtacatgtgtcttcatagtagaatgatttataatcctttgggtgtatacccagtaatgggatcgctgggtcaaatggtatttcttgttctagatccttgaggaatcgccacactctcgtccacaatggttgaactaatttacactcccaccaacagtgtaaaagcattcttatttctctacatcctctccagcatctgttgtttcctgactttttaatgatcaccattctaactggcatgagatggtatctcactgtggttttgatttgcattgttctaatgaccagtgatgatgaggtttttttcatatgtttgttggccacataaatctcttgttttgagaagtttgttggccacataaatatccttcacatactttttgatggcattgtttgtttttttcttgaaaatttgtttaagttctttgtagaatctggatattagccctttgtcagatggatagattgcacgcttttttttcccattctgtaggtttcctgttcactctgatagatagttttttttgctgtgcagaagctctttagtttaattagatcccatttgtcaattttagcttttgttgccattgcttttggtgttttagtcataaagtctttgtccattcctatgtcctgaatggtattgcctaggttttcttctagggtttttatggttttaagtctcacatttaagtttttaattcatcttgagttgatttttgtataaggtgtaaggaaggggtccagtttcagttttctgcacatggctggccagttttccaaacagcatttattaaatagagaatctctccccattgcttgtttttgtcagatttgtcagagatcagatggttgtagatgtgcagtgttatttctgaggcctctgttctgtttcattggtctatatatctgttttggtaccagtaccatgctgttttggttactgtagccttgtagcatagtttgaagtcaggtagcatgatgcctccagctttgttctttttgcttaggattgttgggtctatatgggcttttttttggttccatgtgaaatttaaactagttttttctacttctgtgaagaatgtcaatgctagcttgatggggatagcattgaatctgtaaattactttgggcagtatggccattttcatgatattgattcttatccatgagcatggaatggttttccatttgtttgtgtcctctcttatttccttgagtagtggtttgtagttctccatgaaagggtcattcacatcccttgtaagtcgtattcctaggtattttattttctttatagcaattgtgaatgggagttcactcatgattcagctctctatcattggtttataggaatgcttgtgatttttgtacattgattttgtatcctgagactttgctgaagttgcttatcagcttaaggagattttgggttgagattttgggattttctaaatatgcaatcatgtcatctgcaaacagagacaatttgacttcccctcttcctatttgaatattctctatttctttttgttgcctgattgccctgaccagaacttccaatactatgttgaataggagtggtgagagagggcatccttgtcttgtgctggttttcaaagggaaagctttcagcttttgcccatttagtatgatattggctgtgggtttgtcataaatagctcttattattttgaggtatgttccatcaatacctagtttattgagagtttttagcatgaggtggtgttgaattttgttgaaggacttttctgcatctattgagataatagtgtgatttttgtcattggttctgtttatgtgatgcattatgtttattgatttgtgtatgttgaatcagccttgcatcccagggatgaagctgactttttcatagtggataagctttttgatgtgctgcaggattcggttttccagtatttttattgaggattttcacaatgatgttcatcagggatattggcctgaaattttcttttttttgttgtgtctctgccaggttttggtagcaggatgatgctggcctcataaaatgagttagggaggagtccctctttttctattgtttggaataatttcagaaggaatggtagcaagctcctctttgtacctctcttagaatttggctgttaatctttctggtcctgggctttttttggtcagtaggctattaattactgcatcaatttcagaacttgttattggtctattcagggatttgaattcttcctggtttagtcttgggagagtctatgtgtcgcagaatttatccatttcttctagattttctactttatttgcatataggtgtttatggtattatttattggtagtttgtatttctgtgggatcattggtgatatcccctttatcattttttattgtgtctatttgattcttctctcttttcttctttattagcctggctagtggtctatctattttgttaatcttttcaaaacaccagctcctggattcatcgattgttttgaagggtttttctcatgtctctatctcctccagttctgctcttatcttagttatttcttgtcttctgctagcttttgaatttgtttgctcttgcttctctagttcttttaattgcaacgttagggtgtcgatttgagatctttcccgctttctcttgtgggtatttagtgctataaattcccctctaaacactgctttagctgtgtcccagaaattgtgacatgttgtgtctttattctgattggtttcaaagaacttatttatttctgccttcattttgttatttacccagtagtcattcaggagcaggttgttcagtttccatgcagttgttcggttttgagtgagtttctgaatcctgagttctaatttgattgcactgtagactgagaaactgtttgttatgatttctgttcttttgcattttctgaggagtgttttacttccaattatgtggtcaattttaaaataaatgtgatgtggttcttagaagaatatatattttgttgatttggggtggagagttctgtagatgtctattaggtctgcttggtctagagctgagttgaagtccttgatatccttgttaaccttctgtctcgttgatctgtctaatattgacagtggggtgttaaagtctccaactattattatgtaggagtcttagtctctttgtaggtctctaagaacttgctttatggatctgggtgctcctgtattgggtgcatatatatttagggtagttagccctttttgttgcgttgctccctttaccattatataatggccttctttgtcttttttatctttgttggtttaatgtctgttttatcagagactaggattgcaacccctgcttttttttgctttccgtttgcttggtaaatattcctcgatccatttattttgagcctgtatgtgtctttgcatgtgagatggatctcttgaatacagcacactgatgggtcttgacgctttatccagtttgccagtctgtgtcttttaactggggcctttagcctgtttacattgaaggttaatattgttatgtgtgaattttttcctgtctatgatgctagctggttattttccctgttagttgatgcagtttcttcatggtgtcgatggtctttacaatgcgctatgtttttgcagtggctagtactgtactagttgttcctccatgtttagtgcttccttcaggagctcttgtaaagcaggccttgtgttgagaaaacctctcagtgtttacttatatgtaaaggattttatttcttcttcacttatgaagcttagtttggctggatatgaaattctgggttgaaaatgcttttctttatcaatgttgaatattggcccccattctcttctggcttgtagagtttctgcagagagatctgctgttagtctgatgaggttccctttgtaggtaacctgacctttttctctggctgcccttaacattttttccttcatttcaaccttggtggggtaacccaatctttctctctggctgcccttaacattttttccttcatttcaaccttggtgaatctgacaattatgtatcttggggttgctcttctcgaggagtatctttttggtgttctctgtatttcctgaatttgaatgttggcctgtcttcctgggttgggaaagttctcctttctttcagagatgccctgcccagagaggaggaatctatagcggcagtctgtctacagtgcctttgtggcactgtggtgggctttgtcctgttctaacttcctgggggctttgtttacactgtgatgggaaaaccacctactgaagcctcagtaatggtggacgcccctccccccaccaagctggagcatcccaggtcaacttcagactgctgtgctggcagtgagaatctcaagccagtggatcttagcttgctgggctctgtgggggtggggtccactgagttagaacacttggctccctggcttcagtcccctttccaggggagtgaacggttctgtctccctggcattccaggagccactggggtatgaaaaaacaaagtcctgcagctagctcggtgtctgcccaaacggtcacccggttttgtgcttgaaacccagggccctggtggtgtaggcacccaagggaatctcctggtctgtgggttgcaaagaccatgggaaaagggtagtatctgggccagagtgcaccgtttgtcatggcacagtctctcatggcttctcttggctaggagagggaattccctgaccccttgtgcttccagagtgaggtgatgctccaccctgcttagactcaacctctgtgggctgcacccactgtctaaccagtcccagtgagataagctgagtacttcagttggaaatgcagaaatcacccaccttctgagttgatctctctgggagctgcagactggagctgttcctatttggccatcttcatcctaagtcccatatttttcttttactttgggacttggaatctacaaatgttccggaatacagacagtattgtattgcagtggactttacatgtttatagtggttctctatcctcttaacactggtaataatcacctggggaacttcaaaaaatttccagtcttgggtctcaccctcaagtattgtaatgtaattgctctgggatgggcactatatatatatatatattttttttttttaacactatccatttttagaactgctaaggtaggccaatctctcactgatgcttgaattcatataatcactgtcaaggtgtttttcaggcttatattgagtatttctagtgcaggaaactgaaagaacgctttctgtcttaaggaagttctgattttttgagagatcagatttattattatttaaattctgccttcataacatgagattatcttttagtcttataaatttataatttctagccatggagtttagttagtacttaaaattgtaactacctgcccttcaaaaaaacaaaaacaaaacaagaacaacctgatcacgtctttataattgtgactcaatcctcatcagataggacctttctgttcttcacttttgagttataaatcctagggaaaggaacaatgaggaacaattagacaaagaaataaaataagtactttctatagtgagacagcactagagttaccttgttaactagactgagagctggaactctaagcctttcatcattatattgacaatgtgtaacgtatggttaagttacagaagaaacattacattattattattgaataagtaataattatgagttttattaagagggcccagttcaatttatatgtgcaaaactgatgcccttaattgtaacaatactttagaaatgatagtggaagtaagttccttttgcagagaaaatgcaccttaaaatgcctaggcacaaatttaatgagatacattgttctatatcccaataaaaacaaagacaaagccaaagtaatgacctcaaactctctagaaggacacgaggcttaatggtaacagtccctgatgcaggtgggtcctcttaggcaatcttaggtttgcattggccttactatatggtgaaagtgagcatatgttttatttatgcatcatccattttactttagattgaaagtatttccccatgttttggtaaaacctgctgctcctgaaacctacctttgttcctagtcctgcccttataaattgcaaaaaacaaagccaattcatcttgcttatatgagcccgtcttccctttcataatagagatatgtccttcattctgactcgtcttcttttctttaagcggaatagttccactgcagagtctcttaattatttaatgtagtacatccggaaagacctcatttgtaaggaccaagaactgaaaatattgctattgaatgcagaaagggaatggtaaggttctctcagagaattccttttcctaaacaaaggtgcaattgccaggaagcaccttcacatttttctacaccatgtcaggcttccttatagcactgttatatgtggccgtattatggttgacattaaaaaatgtgtgtatttttgaaagaactacttcctttattttaaatagaaaagaacacagcatctctgagagtgagaagatcaaaaataagttaaaagcttttcttgtgattagattaaccagattgattaggacaaatagggtttatctatagcttaataaataagttattatttcctcaaaatttagacttactaggcctaaaggagcatagaggtctttagacttaataagtctaaattttgaggaaataagttggaaaaactagagttcagaatgagtaatagtaaaggcaaaactaagattattaagaaaattatcagaatttcctatgtgatttttttaacaactttccctggcttatattgtacatgggtttaagttatcttacagctctttaattatttttaaaagtaggatagcatgttatcttccttctctctgtctataccaagtgtttgttatttgagcattacagttacacaccaccactatctggttgtaccgtgactgaaatatcagttaattggaaaagtgaaaaaaactctttaaactcaacctatacaattaagatgatgaagtggcagcaatcattgcactcttttacttacctgtgtgatttgttataccatgtgtttgtttagaatgtaaataatgtgcagttagagtaatagatgcagatgactgaacatccttagacatctggagaagcagcactggcaagattatctctgaaaatttctgaaaatctttttgttgcaacctgagaaggcatagacataactgaaagcccaatagtaaggccaagttcagtaaagttgaaaatgctttacaccatcactgatgatgttgagtcttccccacccagctcaacattgagattttttttttatatgtagaagttatttgttccagaatttttcctttaattcattgaattattacataattaactttttttttctttaggatttcttggctctcaaatacttttactctttttagagtgctacagccacagttttcttaaatatagggatttttgaggtatcatattttgctaatggtaagtttatagtattcctaagcagcttatctcatacagttttctctatattgaatatgattcagatgaaaattaacctgcgtgaaatggttgtcatctggaatgactgccttttaccctagaaaacagccagcccaaggttgagaacacatctgagaaactgtgcctattttgagaactaccaagaaatttttattcactggaacagctgccaggaaacttgttggtcatagaccagtgccttagttgggcatttttttcagaagtagagaaaggcaaagctagagtcaccgagggattggaaggatgaaagacgtgtagttgaaagctgggcaccatggaagaccgaaacactcttcaaacattctgttttcaagaataaacccaaccctaggagcacgagacagagtataaagagccatgatttttagcgaagacctcgcatttatcttaaaatttgattttgttgtgaatataatctcagaattatgcagggatggtccatcaaaaaggtctgccagagtcaagctgagtttatcttagccatgctgaaaagtaggtggcagtcaatcaaaatggcaattactgtacaagacaagagttcactggagggaagggtgaatggaaaggacactccctgcattcttgaggcctatgtaaatcaacaaatgactctgggttagtttccacaattgtaaaacaatgtgattgaacaatattgtttcttcacttccttcctgctctaagattgtacaaaagtatgattcaactacagatattgcataaaattggttactcctgaagtgcatggagtaaaattgttcccatagaatatcgtgaatttagttaggttgtgacatgggtcatagtctccgcagtctgtacgccctcagtatattcctctgacaaccccatgtcctttcattctaagctaatatccttacacatctttttctctacacctgagcaaaatatacattcatgttcttaagtgcatgtagttaagaggaagctaacacttaatttgttcctgctgtatgccgggtatctggtatgtcatcttcatagcattatttgaagtttggtactaatatttccatttttcaagtgatgaaattaaggctcagagagatagtaagttgcccaaggcatcatgacttacaaagaatggatcttagatttgaacacaaatatctctaaatccaaacttcatgatttttctactgtatttcatttgctcacttccaaagtctatacaaaaatatttgttaaatgtgcatgtactgagctaccgatatctactatatctgtgtatacagcgatagctatcaaaaggagagacgtcctctaaatctttgataaaagtatgtcaaaatggaaccctcccagaaggacttcatttttaatagaaatcagagtattagctgaaggcacgaagttctaagataaaaatgtagctatgaatcagggtggattcagagaggtctttgtgtgtatgctataggtgatcatgtgtgaatttgacctacggcaagaagaattttttttttttttaaagctcttccaggttatccttgtgttggggaggaggatagaataaagaaatgaatgtcttgctggttcttccaagttgtatgaggataatatcacccagggatgatatgctagataaagacccaggatctttattactttttgacatttagttttgttgttgttgcttaaatttctagtctgttttgatggcattagaacctttaaaaggagcttgtaaccttttctttttacttttcctgaaatgtgtggatgggaggattggacaagagcctcaagggatgggaagaagagctcagtgcgaacacacatgcatttattcatttagcaaacatccattaagtgcctaggacctttaaggtattctgccaagagctgtgcaggataggaatgaacaagggatgacctttgctttggctatgtacaccagaaaaacgagcaggggctggaggactcttgccaagaagctatttagtggttctcttagagccttatctctatctaggctggagattaactcagaacatttttttagtctgtttacctctaaaatgaaaagaaatatatattaagaataaggaggtggcgtggagctttcactgaatgtatttcaactggagtattgaacgttatagtgatggatacagttaatccatcacaaccaccatttcaaaggaaagtggggaaatcctttgtccctgtgtgaaaaataacttaggaaattttggtctgacagttgtgagagggttaagaaagtcaatcattttgtaaccaggcacagcaatcttgtatgaaccatgtcaggatgttgtctgcatgccgtctttgctgatcacagtaatcgggtcataagagaaagggaagtaatagagtgtctcttagcaaccaaccccaggaaaaagaaaattactcaaacccagccatccagccagagaagtagaaagaaaaaaatattctgatagtttgctgaaagagctcagggatgagagagagagaaagagagagagacagaaagtgagagagagagagagagagagagagagaggagaaaggagagagagaaggagggagagagaggaaagggagaaagaggagaaaataggaaggagagagagagatgatggagaagagaggccagagagaaagaggaaggtatggagagacaggagggagagagagagagaaggaaaagaaggaaggaaaaaagcagaaagaagtaaacaaaaaactgaaaccttttatttctttgttttcctttctcttggtgttatctttttttaaaatttttatttcagaaagagagaaagaggcaaagagtgggtgaggacaaaagaaaccctgtctcctaaaacaggaacttgatagtccacatcgtgagagaaagtggggagggtgaatggtagtataacttcatcgtgtcccatgtttctcatggtttccagttgcgatctggattactgttgagaagtaataggaagacgaagtctacagatgctgtgattagtgttctaagacctgtttttgaattctctgcttgttaatcgtgtagcagtcagttctacagcttactgcagtctttatagtaatgactttcgaactttgttttttctgacataaatagtggtaagaaacacatagtacattgacaagagcgtatatatgtacatgtcaatgtaatatatattgtcaatgtaatattatgctaagtgaaattttcatatatagatatatatattttttcatatataggctctttatgtgatgcatactaatgttttctattcaatttcattacaaaaattcttttggatacctgctgaattgattgtatgaccctaatgagttacattcttccatttgaaaacaccagtctaggatcagcacttgccttacattttgattttactagagtggtgccaggcagcaagttcagtcttggtgaagagtctttggccagcactgtgatgttcagaataacagctatttaagctaaatattttcttgtcatctgccaagtagatgtatcctaagagtctgtcctggtttggaatttaaggggataaacctgaggcaattccccctggactatcttcagtttagaaaagtgccacagtgtgttcaagaagcaccggactggactcaggagacttggttgcgcttgatggcatccttttctcactctgagcctggggtcaatgatggatcgaattagatgatgtcataaattccttctggctgtaacatcttggaatttatagctggatggggctccagaaaccatcctgtctaatgtctttgtttccaagatttagttcttgaaaaggaatgatagacttcctactttctttaaagatctgtgctaggaacaagtatacatgaaagactgaagcttagtacataacttcaaacatctcagtgtggtataggagtataccatgcgcacatataaacataattcgaagaaaatatataatttgttaaacactacaggtagggtagaagtaaaatataaaaactcagaaaaatgataatttaatcttactgggaagaatgtctgaatgctacactagtatataaggaggaaggctttgctgtggactttgagggaaggaaaatattgataataataggatgttccgggtagattaaatgttgtagggaatcaaagaatggagtcttaattgtctcctttgagttctgttttttgacctcattgaactcacaagggtttactttttaccactaaatattcctattattttatagctgttttttcttccaatttaacatgactttttaataatgatccattgcccacatttagtgataaggtgaggtttgattaaatagtatttgtacagtactacctcctacttggagacacacgtttatataaacacaaggtgttatataatttgtttctctgttggggggagggggaaagtaaataaggaaatataaattaatacctgttttcttttcaggataaataatatctgaatatgtttctttttctttcttttttcttaatgcaggctttatttagtttgattttacctttagaaatttataaaccatggaaataccccacatttttggggatattggaaataatctctgtgatgtcactttctgaatcagactaaggtttgtttattacatcagttacaggaaataagtgcataaacctgaattaatctgaggatgttgtgtttgtaatgttgcttccattttgtccctttccttgaagcttgaggcacttgcacatctcactcagtcttccttttctctacagctttcctgctgtcctaaagagacaaaaggcatatggctttctccagctgcatttcctgacctgtttccttgccatagatcgcttctaaagcaacattcccaccatttgaacttccattcttcctctgtcccaaacctaatattaacaataacaggagccaatgcaatttttcattataatatggtgttttacattcatagcacacacattactttatttgatccttggaactcgtggatatgtaaatggcaagagttactcttccattgtgtagattactaaaatgaaatatctagaggtaatgtcacctagtaccactgactatagtgttgtgataccaataccagaataacagggctcctgacttctgacccaagggagataaggtggatcatcttaaggttatggctgatatataattgacgttatcagttttagtaaattttattttacacgaagaaactgaggctaaaagaaacggagccactagtgcttagggtgtcaacatcagaatcagatctttgattcccagatttaacatttcctagattctgtgttctaatcatctcaatggacagtgcagatattacttgagaaacatgtttgcatttcgtgaacaactcctgtttattttcaacattttctatgtataaataatgtttgtgtaagcatatatttacttaggacccgatatctgttcagtactgttaattgccttgggagaaaacaaaagcaaaaatgtaaggcctgggatttctatgcaaaaggccaaaaagggcttttggtgagattttaaaaatagaaaaccaattagaaaataattaggtgtatagtggtaggcccagacttgaatttcagtatgaattttgaaaaagaatatatattttaaggcctacaagggcaaaagtagatgggctttaaagtttgtgtaggtaagattgtctgtgggtgaagatgggtagtgggatggtgagcaggcagagtggggttggggtgtggggtggcacggccagctttaatggagacaggcgacttcgatggggggtaggacatgaggtgcacagagcaacagttttcagaggtgcagtagggatgatccaggggatcagagaggaaaagagtaaagactctgccaacctttcagcctggagcctagagccacagtgtgagttaaagatgtaaattccttggaattaagaaccataccttatttagccatttatacagctgcttaccatggtaataattagaaattaagatgatgatcttttatgtgagcaactttcctaaataacacttgatgctgctgataaatgagacttaggtacagtgctttttctgtaggattcaggcctaaatggatctaggaggatactagagcttccgttccaaagtacgtgcatttgaatgatatgctaagtaatgccttgtgtatccttcaacaggaaaagttcctgctattaggataatttgatatgcacttgatgtttgctaatatgtttcaatcacataaatccttcttggatatttttgttctttgtggacttcaggtaagtttaaagatattccacacacttaaatatgtacacaaatgactttataacaagaaagcaaatttgtttaaaaaacaaacctacaattctgtctctctaacacatcaactccattttctctgtactcttttagtctttgccaatatatgtttatagttttcataatatgtaactaaagatagacataattttgcatttttttcacttaatactacagaataagaattccccaccatcatatttagcaatggcattatagttcttgaagtaagcatcccagaatttattgaactattgccatattactggtcgtttgtgttatttcactgctttaagtgtttttatgttagagaacataatgaaggtcttcatgggtatagctttttgagaagctagacatgttgaagaaattgggagcatgctattactagcttctatgaattggtatttactatgtatccctttaattaaattccattctgcagtaagtgtgatagctttgccgaagcacttgggggccaaaaggacatttgtaactggttaagttggaagatatttatttgtataaggtgggtagggacaggatggacaggctatttttcttggccacactcactgaatttaaataggcaatggagataaatcagttgtggcccaactagactgcctggatataatatccttttggactggatcatgtcgtttcattgcagtcaggatggctaagcatggtgatggatcataactgaccaaacagacaggttggttagaatgtatgaccagtcatagctgtgtaactgaggaactgattatattcctgtgactaatgaaaaagcccaatcttagagtagctgtggtaattataatgagaatactagtaaaacattttaaggtgttgtgttccagacactattccatgcattacacacacacacacacacacacacacacacacacacacacacacacagtctcatttaatcctcataatattatgaggtagtgctattattaatatccattttctggatgaggaaactgaggccccaaccagtgaaataacttgctttgagtcccatattaagtagtactacccaggcaacctggccccagagcttacttacacgtgtagtaactacactgttcttcccatttatgaggtgattaaactatggaggcaggcatggcatacctgcagaacaggactagaatctcataggtttttgaacttattaggcagacctaaggttttttacacttcctgaggctatagaacagaactaatctcttagccttaatgtcactataacgtaaaaaccacgtgaagagaattacgatggtgagcagaggataggacacttattatagttgttacctcatttatttaattctttgtttcttagagaataagattctggtacatagcaggttcccattaaatacctattgatttaaagtttaaaacaaggaataatggctaaatgaatcattgaatgcatatgtctatttcttggaggtctaatcatgttttcaaaactttggctcaactgtagttagtgcagagtatgtatggtcattctgctagagcaaaatcttagtataggattaaagaactctgcaaattgttaaaacatgcaggtacactagtttcaaaatgtattagtttgatttattattgtcattttctgataaagaaaggggagtagtctcccctaaagtttggtgattaagtcaccagccaccttttctattttggttgttgtggtaattggtgtttcctggaaattttccctctgttctattaataatgttaaagggggttacagccgtgactcactccaggaagtcaaccatcattcgcttcctcaatctcaccaaccagtccccatgtacaaaatcagcgacttctgcaaatgagttactttacagctctcaagagagttctagaaaatacagcttttgtatttcgctgtgtgcttcctgccttggcagagagtaaaacaaaccttcatgttttgctccttggtagtctcgagataattgaccagttaggtaactagtgtagtctcactcaagagaaatcccacttgctgtctaacaaaagtcccttggcactcagatttgcaaagttaaacctggggacagttcatgaagtccagtggagtctatacttcttttatacctggctttatgtttctgtattcattattttgctcaatgtttaattaagtaatgaatattttaacttgttcaacatataactccgtatgtcttagcactgctgtgtagtagataccatcataggcactgaggatgcagtacagacatggtagctgcccttgggaaccttctatcctagttattgttcactatattaccaagttaaccacagggaaaacaagttcagagaatacataggctgtgggcctgtcctaaaggaatcaatctgtaaccgacatgtctaaagttgtgcaggataggattattccacttaattctgtaatttgttttgtctggaatttatctcatctatgcccccaccctcactcatacacataaacatggagatggaacttaactgtgcattctcgtggtacttaaatttttgtaccttggattatcaaaatttttgttcatgtcctagcttctctgcaagttctttggttaaaaccagtgtgtgacacatctctggatcagaaatgtcttcctttctacctttcaccttccccaaccttcctggtctcctagcacagtgccagatgaatgacagctgtttagtatgtttggtaaatgctaactgtgtgtgatcttagaaaagttagtgaactttgctgattttcagtgtcctctttcgtaaaaaagagaataataaccatttctacttcctaggttgttgtcaaggttaagtattatatttaaagtttttttttagtagtgactagcacttagtaagcacttactgaatgttatcattaataaatgatcttacaaagcagtagcatttccttctaggatttttttgtagtccttcatgattgatagagaagagacatgcagtctaggatttcacatcagctttttaaatataggaaaccagatgtaaatatgctgcttcggttatttacatctgacattcttgcatgcttgctgacaaaacattaagtaaaaattatgctactctttcccttagatgtcaattcatggtcacattaaagtcacaagatttttcctgaaacttactgctggtaccaattttaccataggttatcttaattagtatcatcacacagtggtgcagtttgacctttggggtttgattccagtcctttgtttattctgactgtgaatggaggagtcaggcagaatgacctttacatatctttacctccttctcccatcttctgctggcatagaaaactttgcataaagaaaggcaacagagcaactgcaaaattgctgggattaaaaagaaaattgtatgataatgagaaatccagtgtactctctctcccttaatatgtgtgtgtgtgtgtgtgtgtgcgcctgtatacatcagatatatggattgatgcagtgtactctctctcccttaatatgtgtgtgtgtgtgtgtgtgcgtgcctgtatacatcagatatatggattgatttctttttgtttataaaaaatattcacttttcaaaatgtatttatactatgctatcattgaattcttacatatcaaccctttgtggttgacactgcagagatgatgagctccattttataaagatggggcagttttatctcaacaactagtgtgttctagatcaaggactgattccagattctcaaagtcctacaacagtaatcttcaccatgctgtgtgtatgcgtgcgtatgtgtttatcagaatatattagaagataatttgcaagcagggattggttaaagttgaatgtttatgtattcttttgtagtgttgcttacgttttaaataaaaataaaactgcagtggatgtgcatttgtcatcatttagaggccttcagaccccaattcgtagtttcttcacagttgcctctattttctgattactagtccctggaaggtacagtgtcagagttgaagggatgttctcaaatccccctaaagttttccattgcaatactcattacagtttctttttttcttttcttttctttttttttttttttttttttttttttttgagatggagtctcgctctgtcgcccaggctggagtgcagtggtgtgatctcggctcactgcaagctctgcctcccaggttcacgccattctcccacctcagcctcctgagtagttggtactacaggcgcccgccaccacgcccggctaattttgtttttgtatttttagtagagacggggtttcaccgtgttagccaggatggtctccatctcctgacctcatgatccgcccacctcggcctcccaagtgctgggattacaggcgtgagccaccgcgcccggccgcaatactcattacagtttctaattgcgtatgtgtgtaaaagaacatataacttcctcacagactcagctgtacactctacaggggcatcattgtatcttaggggtctagcctaatggctggtgggcactaggtgcttagcaataactattgaatgaatgaatgaaaaaatgaataagtgaattcaacacaacttttatttatttatttttattattatactttaagttctagggtacatgtgcacaacgtgcaggtttgttacataggtatacatgtgccatgttggtttgctgcacccatcaactcgtcatttacgttaggtatttctcctaacgctatccctcccccagccccacacaccccaagaggccctggtgtgtgatgttcccttccccgtgtccgtgtgttctcattgttcaactcccacttgtgagtgagaacatgcggtcaacataacttttaaaatccagaatgtcagtactaaaaggagccttttaagtattagaattcaacttaatgaaatgttgctacgtattttctctgttctcatcactgacgtagctgctttggagcatctatatctgatatttagatagtggatggcttcttgcaaacacttacattgctcacgtagtaatgtgaaccaacagattggtggcccgggcagcaacatattttctataatctgtagcatgaagccaactgaggtgtgaccgtggtatttcctgaagtggctttcttttgcttttctgttttgattattatgtggctgtggatttagttcacaccatcactgtgaagaattttcgaaacttaagaatcaagctctgtttatacattttcaacgtaagcccttaattacagtcactcctcgggcccagtgattttacagttacatgtcagattgaggggtttcgtcttgagaatgtcagctggctctgtgaagaagaagaagagcagatacgtgagttacccagaggagtgctgattgagtccaggagtctttctgtttaagagcacgttgaaagagtttgtgtgtctatttgtaaaaccattttggagatgataaaaagcattctgagacacacaaattttttttctgttttcaaaggcaagacagagacatgtggacaggttgatgaagggatcattgtgatcttttctctcagaacttgattttcattacttgaactttgtcttctatgcttttattaccaacacctgtacacaaaggtacacataatacttgcaaaaaagagaagaaactgttttcagactggggctctattaagtgttcattgaccacaatctacaacaacaaaaatgacaattcctgcttgccattgaaaataatgcaattgaaaagaaagggcggaagcaagttcttggctgcatagcttcagtctgatgccatattctagagtgaaaaggtattggcttggttttgaggcctgccttcatcacgtgaaggctctgtggcctggcagggttatcttacgctattgaacctcagtttctccatttatccaatagagatggaaagtattggcctgcatttatttctccttcaaatgacatattgtatagaagcgtatcgtaagttgtaggtacttaacaaacatgaaggactgttatgatctcactttctgggctaaggagaaaatggtgggatgagtttcatgtccttttctttgtggttttgactccagcagcttccaaacgacttttgctgatgtttcctaattagcaatgctgaatctcgtgttgtatcaatcctccccattccttaagatggaaacaagtgttccagttatagctataccatgtgcctgacaggaaagaattgggttgccatcagaaccttaatttatcaatctcagtggcttaaaattttgaatttgcagcttaatattattcattaacaaagtatttttcatcccttagctttcctccagggaacaaaaggaaatggtacacactagctcttctaacaggctctcattcaataaaggatggtgtgcccttaattttgttagcatgtgtataaagaatgtacttttagtggacatgcttcactttgcaaatatagtgcataattttcaaatacatctttgactcttcctcaaacctgctcagaagctgtgtttttcctctcttcattaaaatgttccaacctggaaattttctctttacaattcagatatttttcacttcttgggaagggaataactaaataatttcaatactttaaactacaaggatgatgtatttttgttctacacagcattgatatggtggagctgtattctttttctaataatacaaataatatagggctgtaagggtttgtatcattgcatgtatatgttaagaggataagaggtatgtataaaagtaaattttgagaaattataagtataaaccaaaaagtcttatacctttagcaatgcctttaaatcttgaacttgaaagaaaaagttatgcccgactcgttgattgcatattaaataggaaaatacatttgttatacttgaactagattgttcttaggattttgtgaaagaaaatatataagcatgaatttattatagaaaataaaaatgaccctagaagaaaacctaggcaataccatttaggacataggcatgggcaaagacttcatgactaaaacaccaaaagcaatgccaacaaaagccaaaattgacaaatgggatctaattaaactaaagagcttctacacagcaaaagaaactatcatcagagtgaacaggcagcctacagaatgggagaaaatttttgcaatctgtccatctgagaaagggctaatatccagaatctacaaagaacttaaacaaatgtacaagaaaaaaacaaacaactccatcaaaaagtgggcaaaggatatgaacaggcacttctcagaagaagacatttatgtggccaaccaaaatatggaaaaaaaacctcactatcactggtcattagagcaatgcaaatcaaaaccacaatgagataccatctcacgccagttaaagtggtgatcattaaaatgtcaggaaacaacagatgctggagaggatgtggagaaataagaatgcttttacactgttggtgggagtgtaaattagttcaaccattgtagaagacagtctggtcattcctcaaggatctacaaccagaaataccatttgacccaacaatcccattactggatgtatacccaaacgattataaatcattccactataaagacacatgcacacacatatgtttattgtggcactgttcacaatagcaaagaattggaaccaacccaaatgcccatcaatggtagactggataaagaaaatgtggcacatatgcaccatggaatactatgcagccataaaaaaggatgagttcatgtcctttgcagggacatggatgaagctggaaaccatcattctcagcaaactgacacaggaacagaaaaccaaacaccgtatgttctcactcataattgggagttgaagaatgagaacacatggacacagggagggtaacatcacacaccggggcctgttgggcagtgggagactagggagggatagcattaggagaaatacctaatgtagatgacaggttgacggatgcagcaaaccaccgtggcatatgtatacctatgtaacaaacctgcacgttctgcacatgtatcccagaacttaaagtataatttaaaaaaaaaaagtaaaaaagacattgattcattcattcatttattcaggcaatgtttggaactcatgatgtgccaggcactgttttaggaccaggaataagcaatgaccaaagtatttgctctcctgatagattataaacaaataaatatataatagctcaagctgtgaaagtcacaggcacacagagacacacacatctccaacatatgcagcaaggtaatgagataaagaattcctggccattttttgtgatacaggatagatgtaatggtttcctatcagttttatcatttttaaggtctctcttcttagaataaattattttatttgtttcttccgtatgccatttaacagggaggggaagttttctgccagttttgcacccactgtttttctttttcagtaagagccttctcatagtctgcttgaaggcagcggtcttgccacatgtgttctatgcataataatttcaggagagtcttgtccacaatgcttggttgattacggcttgtgggacaccacttaaatgactagaaacagctctctttaataaacacactggtgttgtccatcattttaagtgagcatgagagcccagcttcattttgccactccaatctcacacggcctagaagaactagtgaaagtagcaggtggtgtttgactttcagtttttctgaaatgtgtctctttctgccactctccagacgccgtgccagtcaggccctcaaggtcaaaacatcatgaaattgaccatagattatctcagccttttctttttaaaagtgtcattgtaacctgttggttactgtgtatgtcatttaacttctctgtctttagtttctgaagtaactggttttacattgccatcaaaaggcttctgtgggtttttatttttctttgtttttatttgtttgtaaacaatctccttttctaaactcatttccccaaatttccttaatttttcacggactgatgaaaatgttttgctgcttccagagcttgtcagcttctctttgtggcattgctttcattgttgttctccaagttcccactcagctcctgctttcttcaaaaaaccctttggtttctaacatctatgttttcaacatggcaatggagtgagttgcccagggaatgattggaccgtgattgttttcatggctttcttttgccttttctccatgtcctttttagctctaagcctcatttgtaagctttctagaaatgtggattctattatagaacttctgtttttctcatttttgtagttgctttctcaagagcaggtgctggtgaccacaggacgagtgagagacgagatggtgtctctcctttagcagttggcttaattaaggaggttttttgaagtgtatgggcttcaaaaagtctgacatgtgatttgtggcctgtgtggtctaactctgattcctttggatacagaaccttagaaagccttgagaaaaacctcagagatcatctatgcaatcaattctggctttacctggagggagttttataaaacacaaatgccagggcttcaacttgagagactctgatttcattgttttgcagtgggtctgcacatcagtagtttatagaaatttcccacatgattttgtgaaaccagggttgagaatcacttgattttacagggcatatataaggtccaaagcaaaagtgactcttggctgggcgtggtggctcacgcctgtaatcccagcactttgggaggccgaggtgggaggatcatgaggtcaggagatcgagaccagcctgcccaacatggtgaaaccccgtctctactaaaaatacaaaaattagtcaggcatggtggcaggtgcctgtaatcccaactactcaagaagctgaggcaggagaattacttgaatccaggaggcagaggttgcagtgagcagagattacaccatagcagtccagcctgggcgacagagtgagactgcctcaaaaaaaaaaaaaaaaaaaaaaaattaacctgtcatggtggcatgtaatcccagctactccagaggctgatgcaggagaatcacttaaaacccgggaagtggaggttgcagtgagccgagatcgcgccattgcactccagcctgggcgacacagcaagactccatcttagaagaaaaaaaaaaggtgactctccgggattctatagcagtatggccatagagtagggacaagaacatatgcctcctcatttaccatcagtgctatttctattttgtttactaccatttactctcatttgattgtgtcaaattatctactgttgtactggggggccagagtggattcccaagcctcaaccacatagaagagtagattggaggttgttttcaaactattcaacattatcagtgggttgaatttgtaagctatcaactcaaaatataaagataatttttataacagggtctatattggattgtaaaaagagggtcataggatttggatctttagggctctgtaattcaaaatttgggatgttcattaggactatttgtgttatgttgtaaaacaattgtacttgttggcagacgtcttgggttcaagttatgattttgcatttaggaggtttgggaacgtggacaaactcccttttgagttttccttcaccccgtctttgtaatggagataatattctcatttccctgggtttttaggaaggttacctgagatgactcgtgcaaaagctaacacataatagataataatatctatctatattgagatatctatatttagataaagatatctatatttagataaagatatctatatttagatatctatatttagataaagatctatatttagatatctttatctaaatatctatctaaataaatgttaatttattctgaagtgtggtaagtttatctaacatttactgtagcaaccaaggtggggctaaatatggggaccaatcagaaagacgatctctgtcagttttgcctaggacgttcagtgggacttgggtaggagactgtggactaatctcacctctggaaatttgtgtggcctgtgctataactgagaggaaccaagtaagcctgtgtatatggcaaatggtagtcctctcccaaacaacatttgtaaagaaaatgcattttgcactatttcttagtgtgtctgaggctttttatgttcataaaaatcttagtgagttgttgaaacgtgcttttctgaaaaaccttggaatttacctggtttagaattagaatcagaaatgtgtctttttaaactgtattctaccttcttaaatcttttgccttctgcagcaacatggagcaactctgatacttttttctacttgagggcctttcgtagtcagagattatactaagatagcaaaaaatagaaagtgacacactagtcaaggttggtttattgtgtggtaggaaatccaaaagacgttggaagcaacaacaatagctctgaggtccttggaaccaggagttttgaaacttttactttactgcacgtctgttgacatgattccatgaatatttctgctctttctcccttatgtataccagatccactgggctgagttaaatataagaccccaagcatggtcaattcttattaatagtccttgaagaggctctctcttgtttttgattgactttctttttctttcttttcttttcctcatcctttctccttcttccattctcccttccacctcacagaagcctaacgggcttggaatagcacttataaatgcatgaatttttagaaatatatactattgttttcatttccacaataatcatgcctaacatttatcagccacttcccatatgctaggctctctttcaagtcctttaaatgtaataactataataatctcacaacaaactccatgagacagggactgttatctagtgtgttttatagattagaaaactgagacacaaagaaagtaactttctaagctcacatacctggtgagtcagtagctgaggcaagatttaaaatcaggcaatctgactgtacatctcactcttcgctactttgtccttgtgcctttagatcatggttctgtgctatcgatctgatcttatttcttactctttttactactgttgttgctcagcatagtcttcccccctcaaaaataagtaacatttatattgctattattattattattattttgagacagagtctcgttctgtcacccaggctggagtgcagtggcacaatctcagctcactgcaacctctgcctcccaggttcaagcaattcttctgcctcagcctcctgagtagctgggattacaggcgtgcaccaccacgcctggctaatttttgtatttttagtagagacagggttttaccatgttggtcaggctggtcttcagctcctgacctcgtgatccgcccacctcggactcccaaaatgctgggattacaggtgtgagccaccacgcccaacctgtattatgaattataatacatagataacgtgtaaatatttaatgtcacatattattcgtgtgagttagatttgtaaatttgattagcgctgagacattggtattagttttttctacagatgagaaaacaattacatacttttacaaatgatacaaatatgtgtgaaatatatttaatcacatacatgaataatgctcagtgagcaggcatagaattgtcaggacctttgcagtatctccaatatataccctgcccatagattaggaactattgctgtactattgctcatcagtttaaataattatgttaattcacatttatctatatgatcagcataatctttcaaaaatcgatttacaggcctggtgcggtggctcacgcctgtaatcctagcactttgggaggccgaggcaggtggatcatctgaggtcatgagttcgagaccagcctgaccaacatggtgaaactccttctctactaaaaatacaaaaattagctgggcatggtggcaagcgcctgtaatcccagctacttgggaggctgaggcaggagaattgcttgaacctgggaagcagaggttgcagtgagccgagatcacgccactgcactccagcttgggtgacaaagtgagactctgtctcaaaaaaaaaaaaaaaatctatttacattgcagctcctttaggaggtttactacttgtaatactgtagagtcttccagagtgtgcatccattgtatttcactgattgatttcgttagtgatacacctcaaagtgaggtagtcatatacctccaactcttggctgccacaaatgtactgtcgtgagcattttgtatatgtgttcttaatgattggcagaagttagctcaggatttgtggctgtggggagggtgcttgatcatagtgcattttaatattgagtttcactaggctctgtgttttttgttttttgtttttgtttttttttaaacataaaggcttcactagggttactttcccccagtaaagcattaggattcttgttttcttcatgccatcaccagcacggggtattgcatgactttatattttttgctaatatgatgggtatggaactactagtacctcctggtttctgcttcttttccatacatagtaaacagattcagtctctcaaaattactgggaagaaaagtgatttgtttcataagtgttaagtgtctgtttctggtcatggctatctctgggactgtggtcatagagaggcatactggctattcagcagggtttctgagtgggaaaaaaatctcttgaaaatgtggtgttgtcaaggaaggccattttactgatgttacttcagggcccttctttcattccttcacatttttcaatatttattgtatggcaattgcattgtagaaacttttctaggtacttgggaacaaaattgtgaacaaaatagacatgtcctgtggtttctctggaacctttagtgtggtcaaggggacaggcattaatcaaaatactcaagcaaacatttaattacaaactatcatgagtgctacaaagggaaaggagaagagctctggtatataacggggtagatgatctgtgtgtgcttacttgatgcaggtgtcttttggggatgctataagacagaaaatttagaggataaggtaaagcagtaggaggaatattcagacagagagaataatgtgtgcagagatccacaggcaagagggaatgtggcatcctcgagggatagtgaaaccagagttgttttgaggacttttattcatttattcaacatatttttatggagtgcttactatgctctagaatatgacagtgaacaagacagaacactaggagatgtttgagatgaggccgaaaaaataggtaaggggctcgccctattgtacactcatctcccttggtttgtttttttgtgtgttttcagagagaaacagccgtacttaacaatctggtttcagattcttttaaccttctgtttgcctttctctgaaggtgctacagtttgtttgacaccctcttcaagaggggccagtagaactaaggataaaatttttaagtcttcccatcaagaaatgtgtcgttaacattaattaagtttcctcactgttatcaatgaatatccctccgtatccttctctttcactagctgagcattatattatgtgttgttcaagggcagatagtctgtgaagaagtgctttaaaaactgatagcgtgtgggctctgagcatgttgtgcggctgactggcccccacctcctcttgtttcctttctccccagaaaggcctcacttgctgcatgacaagtcaggctattgtttgctcattcgatattgtcagctaagatgcttcacaattccttaagaatttattattgttgttgttgagggatgatagagtcctcttcttctcatttaagtgacgtgtatcgaaaaggaaaaatgacaaataagaaaggacttgggaaaatttcctccactcctgacttccagacctttagaacttaatgctttccgttcagtacttctgccccctaaccttaaagtcttgagagaagaatgactggtgttgacaggatgcttgtttactggcttctgcctaatttttgaggcatgaagtggccatctcatataaagcaagtagttcacatcctgggactgagactacaacctggtttctccttgtcttgtttcgatggagttattctgtatcctgtgaagaatctctgttttgtcatattgtattccctctttaaatcttttatatctctttctcgtactattttgcccctgatgctgtttctttctttattttaagctttagattcacctcttaagttgtcagcccacatggccatacatgaccatggttcttactggtgtgaagaaagcagattgtagctggttgtttgagatgccttcttaggtggaccaacctctctcgggttctttggttttatctcttgctcttcctcttgaatgtttatgatacttcctggtcacgtcatttctctttgactctttctttcttccttccttaggttccggattcatacaggtatgaatctacttccccatctttgccaaccctggcatcgtgcccccttgattccttggcttttcacaggctagatgcttaatggactctggaagcctttatctctaggacgcctttatctgtaggactgggcttttttgtttgtttgagacagggtctcactccgatcacccaggctggagtgtagacctggggtttctaaacactcttcaccttgtgctcagctccttgtatgataccgaccggatcctatccatggacaataacaatcttgaatgtgttcacaatgcctgggggaataagtcccaatccggccaggaaatgctgatctccttccgacgggatctgcttgtctcacctcagcgccagttgcttccctttacaatctctttgctggccaggttagaacatgtgctaattctctgaaaacacaccatgctttccttcctctgtgtctttgcttgaatggttctctcagtccagaatacattttaaatatttctacttccacaaatctattctatagtatttatcaaaatagtaccttccctattaagtctcccctgattctttagctgaaagttattttgatttcctctgagttcctgttaattttgtgggtacttctgttaggcttcttagcattctacagataaggagatgggacttcgtttaaacagctctgggccacaaatatagcatgtagaactgtggagattctaactcacattttaacctaaaatgccatactctttttatcctattacattcttctcattccatatatgtctatcttatgtagtatgattgaaggcagggtgcttgaataaggtgtaatgtttttgaatacttagcatatcctaggcactgtgtgacatattttgcatttatttaatttggctgtcataaaatttctgcaaggcaggtacagttactattcccactttacatatgaggaagtgaggtatggaaagattatgtaacttgtccaaggttaggcagctagcaggtgacaggcaggacaccagcttaggcagtgtggcatcacagcctatgcttgtaactgccgtgcaatgctgtaggtaagcaagagctaacaatataagcctgaaactactggctttctcagttgatggtatttgagaagtgtggtctatgatattcctcagtaactttcatccatggaaaaccaacatatctcatttctataggttttaggatttaaatatttttaaggatttttctgttgtagactttaaatttacgatttgagataaactgaatgctaaatctttcctgcttgggaagaattcagatgtaaaattgtaatttgtattattggaaaacaactccagttttatgcattctatgcaaggatgagctatgtattagttcattttcacgctgctgataaagacatacccgagactgggaagaagaagagggttaattggacttacaattccacatggctgggggaggcttcagaatcatggtgggaggtgaaaggcacatcttacatggcggaagcaagagaaaatgaggaggaagcaaaagcgggaacccctgataaacccatcagatctcatgaaacttattcactaccatgagaacagtatggggggaccatctccatgattcacatgatctcccacggcatccctcccacaacacgtgggaattattggagtataattcaagatgtgatttgggtggggacacaaagccatgactagaataaaccacatcaagttacctgcttatctaaagttttagaaggtgttcacaatgttattcgaaagccaacttagtgtagtgagcatttggagaagcatcctttatacaagtgagatgacatacattgttaatatgtgcttttatgtttgtctttgcaagatctgagctagaatagaatcatagctctagggccaattagagtgggagatagtttaatagataacacaggtgctattttgtcaagttgcatggtttctggacagtttacagagaaaaaatttttagctgagagcctgatgaagtcttaaggctattattaatagtaatatttggggactagcaaagtgctcacataaaaagcaccaacaaggattaaaaaaagagaaggtactgaccagattcactgccttctattcccaaaaagattattaaaaggttcatgtaaatagaatatgcgcacacccaggagaaagtgatttatttttaagctgaagccgaggttttacacatccctgataatagggtttaattaatgtttggagtgaataaaacacactcagaagaagtgtagtcatatccttaatttccttgattggcaaagtaattgatatcatgtgtgacatttgagtcagtgctattttatcagtcacttgctctctgcgagacagagactgtgattgaaaacagtaggtatgggtacttgattttaaaatgaactctatcataatatactgattacagaatcagaagggcaatgttggtgaatatttttgggcaaaaaatgactgtaacctattctagatatggtaaaaccagctctcagtacttaccctataaagagaatattggtttttttcagaattttgcagagggtctttttacttagggaacaaagagaactgtaattgtcaaatgtggttgtaaaacggtaaatctatttttgttcatggctcattcattcacttggcatttaaaaaaaaatttttttatttgtttattttagagacaggattttgctgtcacccaggcttgagtgcactagtgcagtcatagcttactgcacgctcaaactcctgatcttaaacaatcctcctgtcacagcttctcgagtagctgggactattggtgtgccccaccacacctggctaattttctattttttgtagagatgggatcttgctatgttgtccatgttggcactgggctcaaatgattctttgctttcgcctccccaaccactgcgattacaggcgtgagccaatgggcctgacctcatttggcgtttattgacaccatattagaaaccctgtactacgtataaagattattgggggaaacttctcagctatgcatgtgtgtacatgcatatgtgctcattagatcttggtgtaagtacagtttttcttctagtcatggtttaaaatatctgaaaaggtgctatggggacacagcagtttacaccaacagggaccttataattaagtagatatgactgtaacatagagagcgataacgttataaaagaaacacaggtatgttactataagaatgtgatgaacaaatcatttgataaagatatcagcagaggcttagtgtgggagatgccttttggctggacttgggcagttggttaattctgaatggggtttggggtaggggagtcaggtgaggattggtgtgtgtaggtatgcctaaaggcgtgaaaatatttccaagaaggattgcgtttctttttgccactgatggcagagtcaacctcggcttctgagtttaagaagagtgtgagcacctcgagcaaataagtcagctaaacaaatggagctgaggcattagaaaacgcctgtcgatttttaagaaaaggagctcaactctaagagtgcaaggaaaaataaatgcgtggagtgacaggataatagtctataattacttttaagattgctatattgaggctgtgacagtcacttagttcctgagtcttttcaggaaagggtaagaggtaactagccagagctggagtcactccttgtagaagttaggtggctttgatagtgacattaactcttcagaaactccatgactattatttggtatccaaagcagaaatttatgaaagagtcacagaattttacatctgtaagataatcttttgaaaataattagaaagaattcaggtttagaatatacatgggtgatagacagagtagtgaaaacatccccagaatctggtcctgctcaaaaatggagcagagtttcttagaatgcactgacgtcttcacattgaccctgcacagtaccatccctgggagatctggcaaaggagacatttcagaaatgtgtgagttaggtgccatggcattaagatcttttcctactgtacaacttcccgtttttaaactcaccatcttgatgtacagctaactaatgtaattttccaaagtttctagagaagacaacaaccttattgagatactgggacatctgggtgccagtctagttccagttacatcttacttttgaaagaaaggaaaatccattaaaattagaatttgtctaggaagcatctccctcccaggagcggagtactagctcttcactatcattggtctaagcgcttgaaatgctcccatgtttggaatcccattgtttatgtatcagttctcccaacacttccactcgttaggggtatgatttaagagttaaggccaggtgcggtggctcacacctgtaatccaagtactttgggaggccaaggggagcagatcacgaggtcaggagatcgagatcatcctggctaacatgatgaaacactgtctctactaaaaaaaaaaaatatatatatatatataaaattagccaggcgtggtggcacacacctatattcccagctacctgggaggctgaggcaggagaatcgcttgaacccaggaggtggaggttgcagtgatccgagatcacgcccctgcactccagcctgggtgacagagtgagactccgtctcaaaaaatatcctttgaggtcacaggattgatgctatacaaatagtaattgtattattaatgatagaaatatgaagcatattggtattaaactatgagctgatacatggagcagcagatattgtatttttagttcatttccttaggcaaactcaaatattgtactcacacagttacctcaggcattcacaagttagagttccagtgcaaacagtttgcagcaaatatgaaccacagtggtactattagttttgcatccactaggcacattttccagcttctgaagagataattgaaggagaacttggatatgggctaaattgtgtatatggataaaagattcagcagggatttaagcactttcgacccacatgaaacattaaatattagctgagactcacttgaagatggacttcttgattttgaagagttgtctgcatttttataaaactacatgagcatagtgcattttaactaataaaggaagtgaacacagttgagatgcattatctttcttagccttagggtactgggtgttactattataatttttaaaaatgtatgcttttcaatttttaaacagtttattatggaaatgtttaaacatatacaaagggatgagattactataatgtaccgccaggaatatattatccagcttcagcaataattgactgatggccagtcttgcttcacctatacacctattcctttccctcaccctggattattttgaagatagtctcagatattacgtcagttagtcacttctgcaaattttagtctttagtaggtatgtctaaaacatctctcaaccataaataacatgtcaggagagctcttttgcaagatgtttattgatcttgtgccttttgcatgagtatgggaatggctactgtttatggaaaaggagattaaagaatgcagtgtgggttttttttcgtggccgatttctttctttccttctttttttttttctggaagtaggattggtttggggcatgatgtaggaatgttattgggtaagggtttaaactctatgtggcttctgtggtttggagagaccccaggttgatctgatctactatagttaacaagtcagataaactagattttatttgtaatccttttgtactgaagcccaaacaactggcattcttaaattagctagaatatcacttagtattccatttatagaagagttgtggttttaatttaaaaaatactgtaagtggagctactgaaataggcccaagtttattatagctaatacttcattacagagacttccgccattccctaaatctaaggagggggttgtttgtataccaaacatagtagatgtttctgtttgactagattacctagaaaatggcacctagggtaacaacttatgtgcttaatttgaatgaacacgcccagaaaaacaggagagaggaaaaaaagaaaagtaagagaaaagaggagagagagcacatagagagaggtacattatcaagctgtccacagcttcctgacaagagcagctgagttcttggtatcacagcacatcttcacaaaggcctcataaactagcgtgtctcagaatagttcattaataggagggaggaagaagaatttacgtagcagttcctgattcccatcgttcaaagtacatatttcctttttagtattgacttttccaggaaacttgttttattagtactcctactttccaaaataattctctatgtatggttttattttttaaaatgaaaacgataggaaagaaaattcttcgaattcattgtcatggggactcatactcagagaattggatatgacaatactcaacaccaaacctagttctgaaccccaatatctgattattatcaatagaatcagatcaagggaatacttattttcctcttagcaatctatattgattattcatgggggggggttctttgttctgagatcaggagaatgccctggttatatgtccatgtgtggccttagtcagtttctcatgtttcttatgttcatgtatcttttgcttaaaattggaaatatctaccttcaaggaaatactgtcgaagacatggttgacaatttcatagcagcagtttgatgaaatcattttgcacactgagtaaattagtcaattatgtaaaaattttatctgtagttttgtccaccttatgacaaaaattttggagaaaaacaacagccttattgatttacagacatctttctatttatcagtactagcatcagctttctgggacatgtcaactttcctgtttttgagtctgaatggatccataaacctaaacttgctgcaattggagtgcagatatcaagactattgcagaggtcttctcacacattatctgtgtgccttgagaatgggacctctactttggattctatttcatccatcctatacaaagagatcaagcaagataatcacgtattctctgtgctttggcctttgaagactttaaatgacttagcttggtattaaatatttcatccaggagaagttgggacttgaaaatcaggctttgtcccttgcagaaaacttgactggttccaggcgcagttactgttggaacagaattctctttaatcttttgcggccattatcaacattgattttattccttgtgcagggcagtagagttccagcttctgtgttattacttttaaaacatggtataattttaggaaaccattttctttgtttctgaaggtgtatgtataggctatgttcttcacattagatttttattttgaaagaacatggcaaagtgtggaaaacaaggaacatagttaacatgatcaagatatctgaaattgtgtaattagtgatagcttggataaagttgatatgaataagtaatatagagcagggagtgtccatgaatggagtggagttagcctcatgtcaaagtttactgtcccccagccagacctcagcttgtagacttagtattcaatttggttactctactgtgaaagagatactctcatctggagaagaccagccaagatagagagagaactaggctatgtcttgggaggaactgttgaaagagattgtaaggtgactttaagaaggtgataatcagggataccagaggaagacttagaggactccagaggatagaaatatgccagaatacagaacttaaacagaggcaaattttcattcagtacagaaaaagagtttctgacaaagtgatctgaaggtagaatgggctgtcctgggggatggtgagctccttcccactggaggattttcaagccttagcctagtgacccctaaggatatcaagatgtacaagggtcagtttgtggtttaactaggtgaccttcccctccaacctaaagacatttttgttgtctggctagacatcttacttcccatagtcttttaaaaaataaaattaaaaggcaataaataacttctgacaaaagaaaatagaagccatgttcttatcacccagtaatgaatatattgatatggttctttcaagtaacttttaaccttttacaatatacgtatcaaatgcatgtatcataggtgatatgttcaataatttttgcaaattgtgcatttttgtttaaaaaacacccagatcaagaaatagaacctcactagtcactcagactacttcatctccccatgaaaaacaccattatgatgtctaacagcatagattagttttgcttatttttgtatcatatgtaaaaggaaccacacagaatttattaagtatttttaattgtggttttcgttttttgactcaggcttaaatagctctctttttattgtccacagatttttatatatgcctagtcttgcaaagttattgtaggcagcaccttaatgaggttttaagggaattttgctattctaacattggaaaatttaggctgttttcagtttttatctgttaaaatctttgggcttgtagctttcctatcccctccacacccatttcttcactcatatttctcacaatatttcaaattgatttccatatgtggaattattagatcaaatggtacaatgaagttttaaagtttgatatttaccaaattttaatccaaaagttaccaaattatacttgcattagtaatatttaatagtgcctattgctttgttttaaaaaatgtgctaattttatgagaatggcttttcttcaattattaatagggcaacacttcctttcacgtttgtaaactagttatagatttggtacatgtagtcagtcactgtgctaaattctccttaagaattacgtctcttttttgaaaaactaacttttaaaatagacattattattattattattattctcattttgaagatggggtaactgagaaacagagatactaactaatgtagctaatgaagtgaagctaattagtgtcacatttggagtttactcaaaatatgatactcttcagtttgatatgctactgcccttcatgttatcctttttaaaaaatatttttaaattgattgtatattattgcattagcatatttagccaatttatatgagcttcatatatagcatatgtgtgtgttaccttcctggtaacacaccaaatggctcatataaatttagccaatttatatgagctttatatatatatatatatatatatatatatatatatatatatgcatgtgtgtgtgtgtgtgtgtgtgtgtgtgtgtgtgtgtgtgtgtgtgttacttttttgggtgtttatttttaattttgttccaatttagaagcatataaaagtttgtttcaatgtgttttttaaattattcaagttgtaatcaaactgaaactaattttggtcaaaggtgaggctctacattgatttttaaataatttacccatttttccaatttcatttaataaataatcttttctagccgagcacggtgggtcacacctgtaattccagcactttgggaggccgaggctggcagatcacctgaggtcaggaatttgtgaccaacctggccaacatggtgaaacactgtctctactaaaaatacaaaattagccaggcatggtggggggcacttgtaatcccagcttcttgggaggctgaggcaggagaattgcttgaaccaggaggcagaggctgcaatgagctgagattgtgccattgcactcctgcctgggaggcagagcaagactgtctccaaaaacaacaacaacaaaaataatctttcctttactgattcatttgtggtgtctcttttactgcatatgtatgaacgtgtggggtgtatgtgtatgtgtgttttagacataggatctcactctgttgcccatgtaggagtgagtggcacaatcatggctcactctgaccttgaactcttgggtgcaagtgatcttcctgtctcaacctccagagtaactaggactataggtgtgtgtcatcatgcctgactaatttaaaaaaaaaaaaaaagtttagaaatggggtcctgcaatgttgcccaggctggtcttcaactcctggcctcaggttgatcctcaagtgattaacctaggcctcccatagtgctacaatatatttggcaattatatctgcgtgcacggtttcttcattaatgtcgtcttattcctgtgtaaataacttccactcccatttcattttagattttcttacccatctttgcaatatcttcaaaaagaaagaagacttgcaagagtccaatgctgcataatattaataaacttaattttcttaaattttcttctctggcagagaccataagcagtatgatatttagtcatgctaggataagacctgagtagaaattgtactagctatccagctcgtttgttaatttacttttgatgaggcagagaacggtcatttaaccagcttttgttcagtgtctgttcggtactaggatctcctgagaaacccttgcatcctttatgtacttggtcctcataacattcacactaagcattcatggcagagccagcactggcacctgtggcttctatgttgctttttaccttgcattataccaattcatactaagaaaattgaagtgtgccctaatcacagtctttcatttgtaagtcgactcaatacagtattggatttggagttttgaaagaaagtaaaacctaatttccttccccaaagctattattattctatttagataaatggaaaagcaggtatgtgttgaggtttctagcttttaatctacagtgtttaataggttttaagttatttgttattgaaatcttgaagaaaacacataagttagatttcttgcttttatagcaaaatattttttggatggcttagggagtcaagtgaaccattttaaatacagtatgactaaatctgaaaggcctgatatggtagctgctagccccatgtgaccatttgaagttgaatttaaatctacattaattaaacttaaataaaacatttgtaaaaattagtctctcagccactagtcacattttgagtgctcagtagccatcccttgcaagtattaggacagtatggaacattcccaccactgcagaaagttctgtggtgcagtgtccatctagatgattctacaaatggaagatttaggggaagaggagaagtaagtagtgaggtgtacctaattgcttctataagttttagtacaaagaacccttcctttaaaatattgatatttggtgaaacattcagatatcacgttttaaagtgatttcatggacactaatcaacagagcaacaacatagatatatcattgactacaaggatggatcaatacttgttctacctgtttcataacttagaggattatagggcactctataacacagcaccttaagtatcagaaaaataaaggctgcaggtgtttgaatgaattgttggatgttctgtttttataaacatgtggtcttctcatatttacaccccatttggtttgggatgaatctccattctgagtcccttaaatgttagggaagcttaagatgagaccctttggattccacacaccaatctaatttcggacccaatttgaagctgaaaaaggcttactatggaaaaaaaaaaaaaaaaaagcccaagccccaaaacatacacacacaaaacaaagtagaacaaaaggggataccatgatctttttatcaaattaggataataggatgacatggaattcagaagacagtgtgatattctctgggaatttgttattttatgaatgttcctgactgaaatttaaataaaaataaaatccagagtatacttccccctttagtaacagatagaagtgacaccttgttgaattccatttctggattactctgtttttattttcatctattggcacccaggacctggtgtttggtttgtaactatgatgagtgggttgggattaatatgagaaattccgcaatgagtaagtcggaactattcggtgttatgtccaagaaagctcacatgtcctagttaaggctgtgtgaagtgaattggaccatcctgatgtggtggccccaaacactgggcttaatcctctggtgtgactgctttcacaggtcttttcaagagcctaagtaccataaaatattctcacaaaagccttcattccaaagaatgtgtgtgtcggctcatgtcaagagcttttagtgtagaacaatgtgtcgaaaaccacaatctaataaacaaacagataatctagttcagttttgtctaagtaatataatgtctttattaaactatttcctgcacctttagctctattcagaaggagaaagttctgcgtgggaatgtgtgtatatttactcttaataggaggccgtgtagctcctgtgactggatgtcttgtttttctcttctgagtagctcttgttttccatggtgggaattttccgtcttggtaatttggtattttacttggttttcattgtgaagtgtggaagtgtgtacaccttagttttagaaatgttgttttatcacctgcatctcagttatcaagggccaagtcagaaagttctcacgtgtttttaagcctttctaccagaccttgaactatccattaagtcaaaggggataggctatttccatgaagaaggtttagggattcctggcagggcaggaagaaggggcaagatttgcgaggatcagaatcctaggtactctcctttagactgcctggtgactactcatttgtcatatggaaaatcatggctcaatagttcagtagaatataactttgtggaaatttctgaatattaaaggcttcattttcaacacggcagtgagatgggagagtcagggtcattcattggtattgtccacgttactggttgctttttgtctgatcttgcctggagaattatttttaagtaatgtgcctggaaagtgcctacttacagttaggttaacggccatcttatggcatcaggaggagctttctggctatacctattaaaggaagccttagtctcttattgccattaattgacccttgcattttgagtcatagaatcataaaccatcagtgtcgagagggctactaagcagtttccttggattaataaagcttgtatcttctttataatattcatgtcaagtggccttcctgcctctacttgaatacttccagttatttgtcaatctcacatcctcaaaccaggtaatttctatttaatttttgcccttaatcttcagggtttataaatacctattgataataccttcgttaatatggtgctttgaaactcttcatttttttccctaaataaacttgtaatttttctttctatatcatgacagtagaggctcatatttttatgccttttagtctcagttatatttttgtctgaagagctaaatatacttgaaaaaagtggtttctgtcatctcagaacatatatatatatatatatatatatatatatatatatgctgtgtaaactccacctgtttgctaatcataacattcatttttctcaatgtgatggattttgtcaccacctccccccgcccccccgcctttatggcattgctatgtgaatcattgcaaaaactctgcactaacatttttcattctgtttataaggttcaaatagatagaacaattttctctaggctttagctctggtgtgtataattctggtcaggctcctaatctttttgagggatagtttccttatccataaaatggacctaagaaaagcaatcctatggggacaatataaaacttgtttagctgcaatcttaactcagacttgcttcctgaaattcctcaatctaatattaaataggggttttttgtttaaatgtggtagcaagattatagttacaaaaagaatagaacaatgcattaaaaaatagaagtatcttaaataatatgtttaaattttttaaaaatatgctgaaattataaagaaattcttagaaaatcatgaggaactctggaaaataggtacgatgaatacaagaacttttgctcttgtctatacttgtccttgcactgatgttcctactctgagtctagcactatgtgcagacttcccttcttatggtatgttgtggtgagcagaataatagccctcaaagttgtccacgtcttaatctctggaacatgtgaatatgttagggtacatgccacagggaaattaatgatgcacatggaactaaggttgttaatcagctaacctaagataatgaaattatcctggagtataaggatgggcccaacgctattacaagtgtgatagcaaatggaagaagaggacagaggaggtctttgaagtgatgtgatgtgagaaaaacttaacgtgtctttgctggctttgaagatggaggaaggggccacaagccaaagaatgaggagtagctttgagaagctggaaaagacaaagaagtggattctctggagagactccagaaaggaatgctgccctgccaacaccttgattttagtgcattgatatgcataactgatttctgatttatagaacagtaagataaatatatttctgttcttctaaacaaccaagcttgtggtactttgttgtagtaacaacagaaaacgaatacacacaatatcatgttaaaatgatctgtttatatgtttttctcctttctaggcaatgaattcctcaagggtaacaatgctatctttgaaaaatcattttagtccatttccatatgaaaagaatacgaaatgtcctgtcaaacaccagaggtggtatttactcagtgtgtatgcaccatatgcctggcactgccctgggtattttgctttgaaaattttatttcctgtctgtttaaccctactaaatcttaactttcttatctgtaatgtgagtctatggactagatcaggtttggcaaacttttctgtaaatctggtaactaaatattttaggttttataggccatatggtatttgtcacaactattcatttctgccactggaatgcaaaagcagccatagacaataagtaaatgaatgaccttggctatgttccaaaagaactttatctacaaaaacaggaggtggtctggatttggccatttggctgttgcttgttgacctgtagactagcggacctctttattctgttctaattcctgtctaatatgattattctgtcagtttataacattgtgccgtgtcagttaagccaaggaagtgccagtaagacctgaagaaggaactcaagtgattggatgggtctgtttataagaagaagcataatattggagactcaagtgccaggaaggggactgtcaccatgtccttggcaaatggacctgggacaaattctctttaggatgagacataaggagatccttgaatgccaaagctgagctcgctgaacttgaaactcagtgaactggaactactgctggaggaataaaagggagcaataaatcctttgcactccagaatgaaagaccttctgaggcagctggccaaatgaagcaggaggagggaacaagttcctcactcagctaaattatgtctttgggctggccgacctggtctgctaaaataacaaggtggctgaacttctgctcagaacacgtcaccaaattttgcaatttgggactgtcttctatcccatgacttcctaatctgaggaagtgaagaaagcagagtgaatgaaacccaaggattgacttttttatggagggcctccttagagacaaaagttgatttttcaagagaaccctttatattgtgaactctgtattctaattcaaaaaccgttaagttcttggatgaagaacatccaatagattttggaggtcttgtaaactttgctattgatctgggacttaacctttgcagatgtgggactgtgtgtttatacatcaaagtgggtaaagaagagcccatccagagctaggcagacggaattgggatatgtttgtttgtctgattgcccggttgtggtggttgtggtggtggcggttgttttgacttggttacatcatcgcatttttgaggacaaaactaccctctttgattggtatgttacaatagcttgtttatgtcttgcaaattgttcgagaacagtttgtccattaaagaaaaaagtgacctagtaatactcccctacccaggggaatgtcgggttaatcagttgcacaagggcttgatatgccaagtcagtactaccccgaggctccgtatgcagttcctttccaagatttttaaacattctggggagaacacaatatttgtttatttggcttctaggactttgttttgttatcgttttagttacggtcttatgcttttctctcactccctgtctttcttttacccctaactctttggagccctggtgtgctaagagccatgttaacagtaaagcatctattcaataaacacttaactatattttatatttgagcttctaaatgtttgtgaagaatgtgtttctgggcaagtcacataaagaataatctcacagtaaaaataacttatatttatgtaggacattatagtttttatggtatttctaaattcagtaaaaggcgaaagatttataccatctgaagaaaaaccagggtgttgtatttttaaatttaaatactttggtctacacaaccctgggtagtataaaaggtaagtgctgttgctctcatttacaaacaaaaatattgagaatcaaaagtttcatgatttccctaggttcacacacatctagtaaatggttccaagtggacaaaaacttacacattttaatgtcgcagagctatttttttatatatgtaagttacctaactgcagcagtgattgccgagatcatccctatggtgatgttcaattgagtctccctatttcaatctttcaacctctcttttcttctctctctctctcatacacacacacacacacacacacacacacacacacacacgcacacataaaccacatacacacacattttgaaattggtagtcactcagtttctcaatcttcctttaaagactaatttattgggctagaatttatgggtgtagttgtcaaaaattcctgcatatacccactcaggaaatattttcccaaatcttctccatctcaactctgtgaggcattggaagaggtgcttttaggatagactgatgactcatatatgatgtctgccctcagggagcacacagtttagtgaggtaaatgtctcatgaatattccacaagatccaccttgataatgctctaaagttactatagagggctgaaggtgggaagatgctttcgtctggtggcaaaggatagtagtgtagggtgacatgggcctccaagaatagcttgggctcagatagtggagaggaaactcttaacggagacagaggtgtgagcaaagtcttggtgtccaggaagccagaggaagcattctggcagattaccgggtatgtggcttagcaaaagtcattattctgaaatataaaatgtccagtgctgctgtctgcagtattagtctcaaaggatacatactcaccagtacattccagagtttgttgacaaactttgacaacaaagcttatcaagtttctctccattgcctcataagaggcccatccagttagaggattcctccttttcagaatgagatcttgtcaaatcttgggaggctcagaacagacgtttaccaagcttccaataatactctcaaaccataattctctaaaacttcagcataattgccataaaatcaattgaccatatattagagagtttatttctgggctctgtattctattccatttgtctctatgtctgtccttatgctaggaccacactgttttgatcactgtagctttgtgataagctgtgaaatcaggaagtgagtgtcctccaacttggtccttttttcaagattgctttggctattcaaagagagccatgatatttttaatctagcaacagttgtatcaaatacattggaaaaacctgggtcaggaagaatgttgactatctgggctatttgtttagtctagatatgaggtaactatgcattaggtattttggtggcaaaggagatgcagagcagtaaatgaattagaaaaatttggtgtaatttaatatagcttgtttgtattcagagtgggtggttaagataaaaaggaaaagggttttccacctttgtgatagggagaattgtgataaggtaaatagaaaaatagagcacacaagaggaggttagcaggtctgtgggttatcctatctaaattcagatttgagcactgagctagaggttcatttgatgatgctcattcagcaatcagaaattcagaggtgaaatcaatgagtaccacaattattctgggtcttattttacttataaatggtgtatttatttagaattgcttttttaatgtaatgcatttatggttaccatggcacaagagccagatactgggaagcagttggggacagcagcaaaaatcaagatctggataaaggcagcttcatgaggcttctgtgccttacctcagctaagagtaaacagagtgctagatggctgttgacatgtgttttattttgaagtgactattattactaggatctgaaatccttagccttgatctcttggagcctaatgttcctgttctccagctgagagagactaattcaccatcttgtgttgtaaacactcactcattttaactgattacacctccaatgattctcaaatcactaaaattactaattgctattccttacacatcaaagagtgaatcctgaataattaaccccaaataaaattagatgaattggcccttttaattagagtccctgctgctgtttgttctgagcttccttttcttactgttaagagacttttagaatgattaaaactgtttaagacttaaacagccagtgaccttttaatacaatataaatccatgaaagcaatatttcagctagcaggtggtgaagtaaatttttagagcaagtacctgtcagctccagtattcctttggaaaaaaaaaatacatgccaaaaaacaaccaccttgaaatgaaatgagtgtctctatttgattatttttaaagcattcatgcatttgctaagcttcagacttgatgaaataaatgtcagggttgaaggagagtgagtaatggttggcatcattttatataaatagtaacaagaatttctcagtgagaagaatttgaagtcatttgtgcataaaagatgaatactggataaatcacagaaggcccctggcctcatgtagccatccttgtcttcggggattctcttgaagcaagagaatgagccccaacattggggaaaaggaagttttatggggtttaattgctgctgatcatcgaggcaggattaccagcctagccatgctgcattcagcctggattttgttggagatattttacatgttcctgctcgtctattccaagtctcctaaatagtaagaacctcttctcttcttcatagtcttctgaatttgtaggggtgtagcgggttttctcaccattcccaagaagtctcagtttctcacactaagtctgccatgtgctgtggtcagtgtgtccttagctagaagttaagatatttggggtcacagtgggctgcctggtgtggttctacattctttgactgtttctctattttttttccatggtggaaaatgtattcatctataaaaaaagttattggactagttcaatgacttactttttccttaaaatttaaaacataaattttaactttttattctgaaataatttgagaccctagagaacggttgaaaatagtataaaggattctcatttagtcatcacccagttttcccaagtattgacatcttacataaccacggtagagttaccaaagccaggtaaacactgacataatacttccttctaatacataaaccttatttagatttcattgattgtcctagtgatgtctcttttctggtctagaattatatccagaatcacatattgcattttattgccttgtcaccttagtcatctttaatttcagagagagagttgttcaatctttgtttttccagaaggtcaatgattcttaaccagcgctatacgccagaatcattgaaggagctttgcaaggtccttgtctgggtcccgaccccaaagattctgaattaaggattctaaagtcaagtctgggtgtatgtagtgtgagcaagtgccccaggagattccgatacacaccactggttaaaagtcagatgagtttcaatacctcaagctaagtattttcaaattctgtctatgacatgtatccttccccttccctcatttctctgctctttcttcatctccatctctcttttatgggattaaaaagcaaatttaaatgtctctttatactcttaagggatatacatatactgggtaaggcttatcaacagatcttttattggagaagatcaatacagtacagatggttgcaatatttctgaaggctagggtgcccccataaccaggtggtgacttgaggatgaagactctgttcctatactttgaagacataccctcagtaagataatgtgaaaacaaacaaacaaaaaacctagctagatggctacattaagacaggttattaactgtctagctgttggtatcatgaaggacctatgacccaccgtagtacattgttgaccttatgtcaatatttgaaaagtggcaaagttgaccatgggaaaagttcatgtgttcattgtctcaagagttctattcaatttaatataggtagttttgtaccaataataatttatagcaataatatcattactgtttactgagtatctcatatgtgttctatatgctttatgtagagattataaaacagagagtctgccctcaaggagctgttaatcaggtaggggaaaccaatagttatccaattaagctaacaaagagcagaatattggctgtaatagagcttcagcaggaaggaagcctgcattatcattgacatgtcattgacaatgcattgacatgcattgacatgcattgacatgagaatggttccctctatagccaaagacagcagtggtgaaataaattaaatgccctatttaaagtgtttttattatgaaaccacgctccctcaggcaccatcattgtctttggaggggttgtaagcttctggccttaatgaccaccacagggtaatgtcccaatcctaaggggaaaggatgtttttggactattctgtcagcactctgatatttgtttgcaagcttctttgtttttactggtaaattaagactttttgttgttgttttcctgggatgttgcctcattttctgtccatcacatgaatttttagatttttgtttcatttttaaaccgaggtaattttactttttcgcattggagctaaagatatctcactagctgatagaagactgatgcattaagctcaactcattgtcctatttattttgaatgctcatctttggaagtcaaaaatatatggtgtggtttgttgtctggatagcaattactatgtttttgtaaaacaaatgatacttggtggattcaaaagtgctatttggttctagtcgatgtgcagagctagactattgtcttaatttcatacgatttgaaatccatttaatgttttctactgagaaattgaatttgttatccaaccactgcatgacagagaattatagtatgcttgtatctcatgtaatacactgaggtgtctcacatttgtacagggtacttatttgtgattataaaagaggacttttaaagtctcagatatattctgtattagctaaatatggagtgaaactgtccaatttaaaatcagggagacgtcatctactttaaagataattcttcttgctttttaatttgagaatctcaaagagcatttcaagctaagttatttagaaagatgacagggacattaaattttggcttgagtacatatactgatgcattaaaattaaacgctgggtttgagtagattctgcgattcattttaaagtatcttatttttggttttttaaaaaaatgcatgcctataattcacttattgtataataattaagccaaaaggataaaaaattgaaaacaatgcttagcatctcatgagctgtagacaacccctgttaacatacaggcctatataaaattgggaccatattataagcactattcaataacctcccttgtttcttacctgataagatatgaaaagcaggccgggcgtggtggctcacgcctataatcccagcactttgggaggccgaggcgggcggatcacgaggtgaggagatggagaccatcctggctaaaacagtgaaaccccttctctgctaaaaatccaaaaaaattagccgggcgtggtggcgggcgcctgtagtcccagctactcgggaggctgaggcaggagaatggcctgaacccgggaggcggagcttgcagtgagccgagattgcgccactgcagtccagcctgggcgacagagcaaaactctgtctcaaaaacaaacaaacaaacaaaaaagatatgaaaaacaattttttatgttcttcccccggatatgccaatacttactcccttactagatttaagtctttccccaaatatcaccttggtgaggccattttcatttttttttctttaaaattgcaactcccaccaccaccctaacagtcccaacccccttacttgccctacatttcatcatagcccttctcaccatgtgatattccgtttgatttactttttaagcattattcttctttggagtataagttccatggggcttcgtggagaagcacactttgttagttctatttgtttgtttttccctggggtctagagtaatgtatgatatatagatggcactcgatgaataaatagttgtaagatgtagatcaacatcattattttggtgaccacacaatttcccactgtatgattgcaatttatttttcaaccagtaccctgttaatgaacattctgagtttttgcattacattgctttgtgatgaagtttccttaacatgctcctctgcatgttaagttacttctttggtaggataatttattaaaagtgatattgctgaattaaagtttataaatatctttaaggcttttgattcctcttgccaaattttcttgagaaaagtttagtagcagtagcatatgagaatgctggtttccctatactattatcaattctgtgttttatcaatatttttaatcttagtccttccttttaattaatttgttagcaacttgagtattatcaaaattaatagtaatgttttctagttaaatagcagaaaatacaaatggaagaaaaatagaaaggttaatttttctaatgtataaaaggaacctgaagtttaaggatatctagcatgataactaaaaaattaatgttcctcggtcaaggtcacatatcttatttacagaggaagatgtgtcactgaagggagatatattgtgctattttgatgacaatgaggacagagaacatggaatggccaagccttgccctgataattatccctctcccagagagttctcaaaggagtttcacgctgtagaaacgggagcaaaatgagaatccaggtgccgctttattaatagcttcataagtgcttgctctccctctgggacagaggtctgtgatcccactgacatagtgcagaggctttggctctaggaataagtagaatttgtatccggtatcttcctcacaccactgtatcttggaagtcaacatactcagtgagctgcagctcctgaagacctggcttgacattctgatcctttgctttagagtcaagaagtacaacattccagctggtctgtcctgggagccagatgctcagaggtctgaagcaggaagtttaagaaggagatttcctgggtattgctttctaaaactgagactttaacagtagtagctggatcagtcaaattaataaccccttccttgtcagagagaagggcagagtgggacaggaaaagagcttgaaaaggtttcgtctctaatagaaatagcatgttgagcaagtcagtgcaattgctttcatattgttagttccaaccagtgcactgtaaataggttgagaaggccgagaagtgatgcattaaatgggatgtatcctcaatttttctcttggcctttgctgtaatgcatttcctggtggtttttaaaaccttactcagctgaacaattggagatgacacattttcaggtactgaaaatttctgttttgtgcatatgtgttatttaaaaattataaatgggtaaaataatgacaggttaagaatttgtataatggagagtatttcccttctactttcattcctcagttgcaaaatttagcttcatagaggcaacttgctgttatcaatagtttgggactccatttaaaagatagtccgtgataatacatacatatatgtgtatacattattaaataaatgataacgttatacatgctgtcctaggccttgaatgctgcatttaaaaatatttcacccaaggtgctttctggtacagttttcttggtggcacacatattttgatgcagattgaggatggagttgaagttgaaattggaagtgaagtcttcctttatttagtttcataataaattgcctgtagtctgtggagtgtacattatagctgtggcataattcattgccttatggagatcatcattgctgttacctttgttttatcctctcactttttctctttaagggaccttgttcagggagcttggtctcctcctctgagtgatcaagtttagattcagttgccctcttgtgcataaggaaaaagaaagcattgtcatgtataatgtagacattgtactaatcacttgcacgtaatttagctcagttatgttcaaaatgtaaattgagacctatttctgggccacagtcaatttagtgggtcagaaccaattttttttcaaataacagagcatttcaatgtgtgttttatttatatagtaggtatggtttcatgaaaccctttttttctagtatacatgtacgtgtacatatctagatagcaatattaccacattatataaaatatatttttttaatctaggttgtggtcaaaaagtttcagacttactgtgttagctgctttgatccacagattgacactgtgaagtagctgtggttttcctcatttcataggtgaggaaaactgggtctgggactatagaattgccttgcctgaaataaagggtagagctggggtttgtgttttaagtttttggacttaaaatttcgtactattttcctttcaaacatatatttttttctgtattagttactatatagttttttgtttttttgttttcttcttgttttgagatggagtcttgctctgtcgcctaggctggagtacagtggctccatctcggctcactgcaacctccgcctcccggttcaagcaattctctgcctcagcatcctgagtagctgggattacaggctcctgctaccacgcctggctaatttttgtaattttagcagagactgggtttcactctgttgcccaggctggtcttgaactcctgacctcctgatccgcttgcctcgacctcccaaagtgctggggttacaggtgtgagccatgcacccagccactagttactattaatggaaatgaataaccgtctttacttgaaacttatgctttgctaaccatgattaaaaaagtgttcaccttgtgtgtgtgcgtgtgtgtgtaggtattccaatccagtctcttttgacttcataatttagaaagttaacttgtggagtatctacatgcttttatgcttaccttaatagttagattttcctccaacaaccaaaaattctcccctcaacaaagtgggagaagcaatagctgccagctagcagaagctagagacatgtcactgccagtgcagcccatgggtctatgtcagcaacacctgagagcatgttggaaatgcagaatctctggctccagtgtggacctgaatcagagtctgcgtttgatctaggttccccgatgattggaacattgacatctgagatgtacgagtcaaagacaccaggtcatttattaaaacatcagttaaggaattgaatgggtttttatttttcagtcatgcgacctacagttactgaggatgttctggcccaaacctgtgactagagatgggcatataaagataaatcatgagtggactctacttgtaagaagctgcagttctaaccaggagggagtgatcataacacacaaatacaatcaagtattacagatgctctgatagaactgtatatgagacgcaaaaagggctgctatctaaatccttggatgtgtgtgtaggttttatatggatatttagatgaagaagagcatgatgctttctttgttttctttttgtaccacagtaaatgaatccaaactttgttgatagtcagagttgaattgttcccatgtgtttttctaccacaattacccataactagtaatttacttactttgcaggtaaattcttgttatcttcaccctctgatgggggcctttgtttcataaagggctaagcaagctctgcgttaggtagatgcctttcgtatctgactgacgcaagtgttagggtaaccacagtggggaatagctcagctggtcccagctaaccatccctgcttctcaaggccgcatcctttttacccctagattaaaagggagagcttgagaaaatatgcatagctaggtcctccggagtctttcctcactccctttttgagttaacaatatgcctaacaggctgttttctgaagtaaattggcagtaagtagtgtttgggaatcagagatggaatacttgatttgtccaactcctcatttaactgtttcttgctgctacctcttgcacccagcaaaaaccttttgaatattagctgaatgatttgggttcacatggagcaaatcaagcaagatatgtctcagcatctctccaagagtgagaatccatttcctgctctgtatttcaccagctatgtaactttgaataaaccattttacatgaaaattgaggcataaatatattttgtatgtaggtaggatttggaggatgagtggaggagtatggagggaccaggtctgaaggcacgtgtctatgaccactctactgcttctaaaactggacatttccattttagatttgatacatcgctgccaattgccggatggcattttgttttgttttgtttaaaagcttgcctgtacgtctcagagtctgagaggtgagttgcaatttccctgtaggtcagagaatctgggaggtgagttgcaatttccctgtaggtcacagaatctgggaggcaaggcagagaggacagggcatgcactaatatgaaggtctacagcttagctgtgctggctggaaggtactgcatttcatttcatccaggggctttcctccagaaggatcaccacctaggaatgaaagccgcatgctctttcattctttcattgttttcagaaatctattagaatggagaagacctccttcccccttcttctaatcatatataaatacagttcttttcattttcccatttttcttaaacatgataattctgccttgtctctaaagctgaacttattttcactgcaacttagaggcattttcctttatttacttgtctatgaaaatgatgagctctgagttagaattctcttaaacttttagtctgatttaggatagttattagcagtttttcattgaaactctcccggttagtttatgcctctctccaagggaaccatttcctctccttttatcagatttgtatctgtttttgagacatttgcccgttcctctacatcttttgaaaacgtgagcacctctctaaggaatgcagtaaggaccctttgatggttaagcttaaagaactgaaaactttggtctgacttaataattgatctaaataaagcagataattatgtgtttatcacgagggcttttaaacatctgccttttcatgcttagaatatagaatccatcttttcaagttgtttcttaaaaaaaccaaaaacattccacttttcttttttgttcgttttgaccctcccaggattgtcagcagcctgtgcctcactgtgtctgagttctattagagaaacagagtaaagaaggatatatttggaagggacagacagttgtactttttaagacttacttgttgtgacattttggacttttcatgtagcttctttatgacatagtttattgaacctttccaattttgtgggtctaaagtaggaataacatgttgtggttctcaaagtgcgatctcagacccagtcacatcaatcacccagggcctctgtttgataatatgatctccaagattttgttcagttctgatactgtctgatgctctgaaaatttcccatgatgtaacagaatctgatgaagtataagaggggacccaggaatccttttataaaatgggtatgaagaagacatagtaatatggtttagctctgtgtccccacccaaatttcgtcttgaattgtaatccccatgtgtcaagggagggatctggtgggaggggattggatcatgggggtggttcctccatgctgttctcatgatagtgagtgtgttctcacaagatctgatggtttaaacttatatggcagttcccccttcatgctctctctttcctgccactatgtgagatgtgcttgcttccccttcaccttctgccgtgattgtaactttcctgaggccctctagctatgcttcctgtcaaggctgcagaactgtgagtcaattaaacctcttcttctttataaattgcccattctcaggcagttatttatagcagtgagagaacagactcatacaacatagattcagatagaacatttgaacttggaaattaggttgtgaacagcaacctaaaccttttttgcctcattgcctaagctctcattgtgagcactgttttcatacatatgacctttaaaggcagtaaaaaacttcttgacagttctttttaattaacagatatgaaatattttttcatgcagtctgtggccaaatgaaagtttctcaatcctggctgcaggttcgaatcccttaggttttataggtgtcctggtgcctgaccccctcactccctgtcttctatccccaagattctgattgaattgctgtgagatggaatttggacatcagcattttcgaatgtgtttctttggtgattctggtatttaaccaatgtttaaaactactgaatggaatgcatacagatttatgggatttataattgtcataaggatatgtacaaattatttccacagatttgtgcacccagagaataagaggagtagaaattttctttatgttgtaagttattgaacatttcttatcctgtgggtctaaagtagtaacaacatgcagtggttattaaagtgtgctgtcagacccaaaggcatcgatcacacagggatttattagaaatgaagatggttggagttctccccagacctactgaatcagaatctctggatccaggacccaaaaatctgtattttaaaaagacattccagagatattgatgaactctaaagtttgagaaccatcagctttaagggttgttgtatgattcggtggcagtgtatgaaaatcttagcaaactgcctggcatggtgcgagtctagtaagcggagtactcgagagatagtgcttttgattgcttagcagtctgaatttggcttggggctagacctgacagttcttggcttagctacactttgaattctaagactgttatttataaggcaaatagaggcaaactgaaccatttcaaaggtgtatcagaacaacaaaacctactcacagtcattctaatgtgctcactcttccattcttatacttctatttctcagggcctaaactgtgatgttttgataatatccaaaagcaactcacttaatgatggagactgctgccctaacccacaaagtgttgagcaactaaaatgcaaggaaaggctactcctccataaatagaaaagatctcttctccaacacatcaaaaacattatttttaataggaaaataacaaataaagaacaggttaaaaggtagaagtttctgtttccccaatacagttttttgcagactatttaaaaaggtttcattccaggaaccataaagctcttggatatatgtgtataacttagatcacagagatcaggttcactccctcaataactctgacagcagtgtgcttctcttgttggtaagagatgctaggtttttctcggtatcccaaagtctcattacttcttgcctggattatgtatagatttctaaattgggtgtttcttattcatttctcctaatctgtcctgcatggacttttacattagtctttagtaaatcgtattgtaaccaagtgtttctttctcagaaatccttggtggatctctgctgcatgcatgataaaattcaaaccctttttttgatgtgcaacatgtaaaaaccttaattttatcgcatatctaatctttataactcactggcattattttacattcctgtgtcccatgtttttcctatgtcatgacttgctttttattctctatgctctgaactttctgatcgccatgcctacattctcctgtctctctaccaaggatggacgtaccttctacatcatgtttcaggaaaattatatgatccactgagacttccatgatcctccactttatcttaatttccagaggttattcatgcatctttataaattacaccttgtgttatctttagttttgtacaatttttcttcctcctctatttgattgaaaatgtattgagggcaagcaccaaggtgtataaaattcagtaactctatctcccacccaagctcattcttcgctttgcttaatatattgacccctctagactagcttttataccatttctaaatatcaaatccgatactctttcttctgaaagttaagactactaattaaggctactaattaaactaagatggggaataattgctatacaacacaaaattatgtgtcaaagccaattataaaaaagtaaaatgccagcaaatatatcacgagtactataacgttgcatccttattaacttcatgttgtttacttcttttctgtaggtgattttcttccacccccacctccacctctagatgattccagtgcccttccatctatctctggaaactttcctcctccaccacctcttgatgaagaggctttcaaagtacaggtaagagctgaagttaaagtcatgttaggtaagagctgaagttaaagtcatgtttataagccatcctagggagctcatgaatttcatgagtgtttctgtgctggataaacatttatccagagcctattgagagctttacaacttatgaagatctaaggtactttaatgcaacatacccaactcaagcttcccagagttctgctggcttaccctctgaagccctcaaaatacttttgcctactaattttgtttcagatcccaaagccattttttttttaggaatactatttgagaaggcaacatttccttgttattttggaggacatacagccatgtctttttattgctatgttctctatcttcaaacattgcattcaagtgagtaaggctgacattttaaggctgtagttggttaatgtggatccttttggtcagcaacatttttctagcaaaagcaacatcaaatatccttaggattttctcttctgggtaagttcaagggtgcacatcatacttatcaattatatagaactcttgggttccagcgagtggtaattgcaaagtaactcggggctgggatcagatgtgacattagaagtggttctcagactgtgatcatcggtaactgccgaaagctgccaccatttaagctgaagaagtgctttatgtcaagaagaaaatctaataaagtgatagaattattgttatagttttaggtgtgactatgttcgcatagatacattgaagaaaaaaatgagtcttctttgtctttcagagaaacattggaaatgtttgtagataaaatggaatgggccgggcgcggtggctcacgcctgtaatcccagcacttcgggaggccgaggcgggcggatcacgaggtcaggagatcgagaccatcccggctaaaacggtgaaaccccgtctctactaaaaatacaaaaaattagccgggcgtagtggcgggcgcctgtagtcccagctacttgggaggctgaggcaggagaatggcgtgaacccgggaggcagagcttgcagtgagccgagatcgcaccactgcactccagcctgggcgacagagcgagactccgtctcaaaaaaaaaaaaaaaaaatggaatggtgtctggtaattattttcaaaataataagggttggaaactactgagtgagaacatgggtgaaatagggttggttatgatttgataactgttgggtgcatggaagtttattctgttattccgtctaccttttaaaaaatacctaatatcatttgtggaacataaaatatattgaattattgctcattaattttatcatttgttttacagtattattttttcattttaatttttgtagctacaagtaggatatgtatttatggcatacatgagatattttgatataggcatacagtcttttaaacatatacctttgtatatgtttaaaatatcctataataagaagtgtaaaagagaaaaagtcttagggaacaactgcttaaatggtttgttctattatttgcctttctttctcctaaatttgaggttgaaggagacaaagaaagaaatgattcattcgctcaacaaatattctgtattcctatgtgggcattattcaagcactaggaatgttatagcaaaaaagacagacaccactctgtcctcagggaacgtaaaagttagtgggactagtggaaataaacaagatacgcacattacaaagtacattagagtggataagtggggaaacagggagggggtcaaggcttacctactaggatgggcattatcaatatggccccactgagaaggcgacgcttaaatgaggacttgaagaaggagaggagggaatgagctctagagatttcttggggagtgtattttcatatagtagatattaagaagtagaaaaggcttttgatattatctatcatttgaaatcagtaaattgcagttgtaaccagtaagtaccaattcagtttctggagtctagatcttttaaggctattgaaaaatatgtgtattgcaaatataggccatgaatttcttgcattttattttggtgtatactaataaaatcaactatcagatgccagtgatgaatgagagtcctataaagtttgtatttattttatgtaacagatagaacctttggcaaataaaaccaatatgagtgatttttcttaattttagtcattttttaataaaatgaggaaatccttagctttggctttaatatacctttggtcttactttgctgaagttggttttttgcatattgtttaatatgtacaatttttaaagtcactgactctgtttcctctcttagattgtcatagaaactattttgttgcattttaaatctttagttctcacaatgttatttgaagtagtgacagaagactcgtgattgaaaactagttacatagattattctagttgtgtgatcttgcgcaatgcatgctgagtcccggtttcctcttcattagaaacaaaacaaatatatatacctcttacaattaaatgaaatacagatggatttgaaagtattaaactgaaagggctatacaaatattttgatgttatattaataatcactattaatatgtaagaagactagtaaggattttccagtgggttccattaaaaaattcaaccatggggctttcaaaagataatgaagaatttttttcaggtggaccttgttctgttagatgtactcaagccgtggctttgtttttgaagaggaaggaaataaacaaaatgcctgttgtcatgttggcttaagttctctgtaaaacagaagggaggaggataaaaaataaaatacggtttgccaaatggaaaaggacaaatctggtagggagaggcctgttatttttgagacgcttcatatggaagattgttgatacattcaaaagaaaacgaacatgccctccccttgtgcagaagtgacttagatgtgatagcggcttggtcctgctctggcccaggtttgtaccagctatagaaatgagccatggtagagcctaaagtagcatgatcactggagaaaattctgcgcagtttcctctcggctatggttaaaacctcatgttcccaagtccaaattatagctggtaaatgtgtgtttttatgcagaagactgtttatgtttccagccagattttcaggtcagagccaaaagaacgtctactaagagtgattataagagttgtaagattttgagagcagaaagggaccttagagatcatttagtccaactctggcgccaggcatctagttacagtcctttcaagtatttgctaaattaatttccttttttttttttttttggaaatggggaaactgagacccaagaagggatggatcctctggtttctgacagaggtcttattgaatttgaaaaatcttgactcctggccttgaccttcttcctgctgtcccagatggcccatgaacttggttttgctttagtcctctagcagacttcaaggctctgagattcattgcagagggttacacgtttttatttggaaggagcaggtgatgccggagttttgcttggctgtctgaatttttgatatatgctataagcttttatttcttcaaaaaaggcaaataaatatttagccttaaggattcttggtttaacagttctcattttcatgtgggaagatgcaacttggaaaacaggggaaggatttggtttgcttttctgtcaggatcaacgtgacctccatgcctgtgatgtttgtagtgacacttcagcaatcactttattaattcatttgttcttcattcattcagtgtaaattgaatgcttcttgtaagtagacatatatgctagtgattatagccttaaaacttggcatcataggtttaatgctctgagtctcagccttgggacggtcagttagttttatttatttatttatttatttatttattttgatacagagtctcactctgtcacccaggctggagtgcagtggcgggatcttggctcactgcaacctccacctcccaggttcaagcgattctcctgcctcagcctcctgagtagctgggactacaggcacccaccaccacgcctggctaatttttttgtattttcggtagagatggggtttcactatattggccaggttggtctcaaactcctgaccttgtgatccacccgccttggcctcccaaagtgctgggattacaggcatgatccaccgcgcccggccagttagttttattcttatctgaccccacagttggtaatttcttcctcttttcagccaggccataggcaagtattagtattatataacattgcttaaggtagttacaaagaagtcacgtgtctcagaattttggacttgcaagagaattagagttaatacattcaagttcctttctattgtttgaatcttgtaattttttcctacataacaaaatgtttatgggtaattatgataggtgaggcagtgctgcaggataaggagatggatcagtacagtactcagaatcacattcggaagatgcatatacacagtcatttaagtcattttatggtaaattatgctttggtcatcatacattgatcagaagcataatctaagtcctaggttagtggtggagagtgagggaagtaaattaactgtgactggagagaggcaagaaggattcatagaaacaatttaaattgaactgaactttgatggctgggtgggaccttaattttcagataggtgagtggatttttcagcaataaaataaaagaattaaaacacagaggaaggagagctcaaagtaagtgtggtaggccttgtgtttctaactgtggaacctactctttgttctgaaaccattgacaatttattgtaggggcttgttattattttaaatataagggtgatatccccagaactgttgttggatgccaagtgatactgttaacataaattaaggcaaaacatgttgcacttgcaggaaaccccatgcaaacaattctgagttgtctggtagacttccttcagatccatggggacttacctgctgacatctgatggctttgaattcaggggctcaatatttaacttcctctttttatgatatctttgttcgtcttttcttggtgacttccagttgacaacttctaactctgcttctctgtttgtttcccagtcctgtggcttgctttcatttgcctactattcagtatttgcatacctctggttttcatctttccttttctgtttggtcctgcaaaatggccaggcttgctaatgtaactccaggccctccacattagaaaacagaggggttttgtccattggtgattacttcaaatgttaaacatttctctttgttattgagtagaaatgtgtccctttatgatgtcctcatattggttttctttccccttttaaaaagtgatgcaaagtcagaggaatgaccaggccaggagagagataggtgctgtatgtctcaaggagttgatgagtaaagctactgaaagatgttacttttcaaaggagtgagtaagcacagagtaacatgagctatgcccagaattagtggaaaagtagagaaatgtctgaaattgtttattttaaagtcagcctccaaaagctcttgagcatctattcttgtgaaaacaattcaaagctcatatatgtgtatgatgaatagtggcttataatcttttttctttttttttgagacagagtcttgctctgttgaccagcctctgcctcctgggttcaagcgattctcctgtctcagcccaccgagtagctgggactttataagcacgccccaccaagaccggctaattttttgtatttttagtagagatggggtttcgccacacaggccagtctggtcttgaactcctgacttcgggtgatccgcccacctcggccccacgaagtgctaggattacaggtatgagccaccatgcccggcctcattttcctacttactaattttatgtgtttagtttaacaatgataatttgaaaatcaattcaagttttagcaaaactggcactggaatttttttttttttttttttttgggacagagtctcgctctgttgtccaggctggagtgcagtggtgtgatcttggctcactgcaagctctacctcctgggttcatgccattctcctgccttagcctcccaagtagctgggaccacaggcacccaccaccacacctggctaatttttttagttttttatttttagtagagacgaggtttcaccgtgttagccaggatggtctcgatctcctgacctcgtgatccgcctgcctcagcctcccaagtgctgggattacaggcgtgagccaccgcgcctggccggcactggaatttttgtcttgtgattccatgtaggactatcatggtctcaggtacagaacaacaggattttatttttagacataaggaactcaaacctacagtatggccacattcattcatgaactcacagaaataggcagctgaactggctttacgtgggttggaccaccttatcataaaagtctgtctttctgctgccggttagtgtgataaaggaggaggaggctgggtatgaaaagagatgtcggctgtggagattaagagtagaggtagtggacagtgttgccagggcaaaaacaacatggtcagcaagagctttaatgtattctaaaatgcttgttttcaaaagggtgagaatacaaggatatcttgatccatgaaaacataccaaagagatgattgagatgcttatttcttcctggccctttgcctagttccttttgggtcagcaaaccccagttgatttgtagcttgtttgtgaccctgacagcaacagtagcagcagcagcagcagaagcagcaatagcagcagcagcttgctttgcaattatctcctatttttatggtccacatatgtaggtcattgtgtgtttattaaggctgggtaggctcttagcatgtcactggctctggtcattgtgactttctagaagcgaatgtcacagttttcctggttgctttttgctcttaatcatcatctgattggttattcagataagaagatggacatttttgttgtctggacttgtaaaaacccttttgacagtagccgacctagagtccaggggagtattccaatatttcatttagcattaggaaacttttaatggaatatcatagtttctcttctttactttttaagaacttaaagaggtaaaactttcccctgggattgatagtggagtatgtgtacatatacacatacccacctactcacctatatcaacctgattaccactgccaccactaccttgaaataatttgtgacacatttatactctctgcagtgaaagattggttaactgctcgacaaaaaaaagtcttgtggggaattgatggtggttagttctgttgaatgtagggataaccaatgaggttagctttgccttagctcctgagtttctgtatagggagtaatatactatgcttgcatatttcagaacatttcctttgctcaaagttaagtgagactatagttggttctttttgagtcagtgaaagttttatcccaatttgtctctcccatcaagagtcttagtggtttcttcaaaggtgaaatgtacttattgttttttttattttaacttacaaaaaagtagtgggtctttttctacttataagaaagtaatgtcagccgggtgtggtggctcacacctgtaataccagtactttgggaggctgaggtaggtggattacctgaggtcaaggagttcgagaccagcctggccaacatgatgaaaccccattgttactaaaaatacaaaaatttgctctgtgtggtcgtgtgtgcctgtaatcccagctactccagaggctgatgcaggagaattgcttgaacccagtagacagaggctgcagtgagccgagattgcaccattgccctccagcctgggtgacaaaagcgaaactccgtctcaaagaaacaaacaaacaaaaacagtaacgtaaaaaaatcaaacgatgtagattagatattttcaaatttatttctctatgagggaaaaattatgatctgcttatatgtcctgctcccaataaacacgccaaatgatgcttgaacattcttttcttccctgctccatcccacattctattaaaataatttggagaatatgttgtaacatttttaactttatagcaaatctcttttgagaattgtttcttgcattaaattttataaccacatcagtaataaactgtaacttttacctgtttgctgtgctattttctatttactatctttttcttgtattcatcatcttgattcttctcttttttgttctttttttctgccatagtacttcattaagtaattttatgggaaggctacatgcttgatgtatttcctgagtctttgtatatctaaaatgagttgttattgccttcatatttgagtaaaagcttggctataagtagaattctcgggtcaaatttgctttacttcagtattgtaccaagatttgcacactatcatttagtatcatttagtattcagtgcagcagatgagaaatctgatgccagtctgattccttttccagtttagtaaatttttcttgtttggtctataggctttatttgtgggattcagcaattttactaaactgtgtctagacacagctcgctttttacctattctgctatttctactcaagtcaaggttttctttatgtaaatgggattttcttctttcttttcttcttttcttttcctttctttcttttctttctttcttgaactcctgagctcaggtgatcctcctgcctcaacctcctaagtagctgggactaaaggtgtgtaccaccatgcccagctaatttatttatttattattattttatttttgtagagacagggtcttgctattttggccaggctgatcttgaactcctggcctcaagcagttctcctgtcctgatgcctctcaaagtgctgggtttacaggtgtgagccactgctcccagtcaagattttcttataatatgttgaaaatatattttaatctttcattcacctttttcttctttatgaactcctactatatggaattggatttcttctctattcttcatattagttttctttttccaatagttctactacatggagggatttctgttgcttacttcccttttatattcttaatttttgtggtgatagtctgcttttgacttataaatgctctataaaactgaatttggggagagtatttggtaggagtggctctggatatctgttgttcagggtagctagcttgcacttaaacctttatcttttatctgaaatgggaatatatagttatttaaatgcagggtggccatagggtatatacgttcagtcttcaaccatatatgtaattaggggatgcaggccagcagaagaattgcccttagatgcacaggtcaagagcagaccagcaaggttaatctgggtcctcaaggctaatggtttggggattcataggcaggtagcaaagcccctcccttacatgccatacatgtatgccaggtgagggctgcaggagctgtggccagcgcttatgtatattgatctctagttgaattctcaagcccctttgatttcctccctcattgtgttttcatcggtgactttgcttctcaatgacacactgtcaccagcggtgctgggaattgtggcagagtcctttttgttagaaagcataaactcattaaatcacttcagtcaaatcacttttgactgactttcattaaatacccctaacgtccattctaaagagccttgccccacccctcaccctttttgttatgacagttcctggtgtcctgctcaggtcctggtgtcttttgctatgtatctcaaactcactttgctgcctgtgaggagttcatcacagaaaacgtgctctctgatagcattatctaagccaaagaaagcttcagagacagcataatgcgatggttaacactgcaagtgctcttccaggcttcctgggtacacatctggcttcctgcttactggctgcatgactgtaacgtgctgctcaacctttctgtggcccacttaaatcctctgtaaaatgggtgattgattgttgtgaggtttcaaagacataatgcacataaagaatattttatgtaattgacatgtcctaaaacttagtaaatattttcactgttgtgatattttgggctagcaggtctctgtgctgggttttgccatagttgtcactgacatttgatttgcaccatgcctcctcagagttaacccgtgatcccatcccttgctattataaggttcaggattttatatatatatatatatattttatttatattttattatatatttttatatatttatatttatattttattatatatttatattatatttatatttatttatatatatttataaatatataatatatatatttataaatatatatatatttttttttgcagaagaaatactcccacaaacttcctctataaaatgaatgattgaattaaataatcatgtagctctcttacagctctaaaattcagtgccttggtaataaaatatcacttctttgtaatttcatggtgatttataatttgcaaaatacattataacagcacaagtataatttaactaatgaaataaaaatgaggatccaagagttgaaggaacttgtttagatctcataattgtcatgaaagcagttacttatttttaaatagacaataacaaaatcatttcggtgactttttacaaatgagagaatgtggatactcttaaatcctcaaaaagcagccattgtcgtcaataatatatgttgatgtttagtaaccatgaacctccgaggtagttttctttgtaattttttagtggaagattagcacatcttccatcctggcctctagcatattttctgacaaaccccttgttgattgtatcacataccttttatccatggatttggtacgaaagccctattgggcccacaaatctttcggttcttttgtaatttacataatccaatcaacaggggcacagaaacaccttgttctgaaagaaggagtgaaagggagtagaggatgctgacaccaaaaacctagggcactaactcatattttatctctgaatatagtactttgaaaccctagtgtcttaggaaggttttctgttcatagctgatttcacttgatccattcaaaagtcaagcatttttgtactcttactatataacttaaaatatattatagcatggggtgtttataccaatccttgaggggttaagctattattatcattattttatcattaacttctgtgagtttgacttgtacagggcctcctagcctgcaaatttcaaaattgacgtcttttttttttgagacagggtcttcttgctctgttgcccagtctggagtgcagtggcatgatctccactcactgcagactccacctccagggttcaagccattctcccgcctcagcctcctgagtagctgggattacaggcacgtgccatcacacctggctaatttttgtattttttttagtagagacaaggtttcaccatgttggccaggctggtctcgaacacctgacctcgtgatctgcccacctcagcctcccaaagtgctgggattacaggcgtgagccactgcacccagcaaacattgctttttttaataaaagactttcatatactttatctcacttgaacctttagacaacttctgcaaagggaaaggtagggaggattctccatcttgtatcagtgaaggctctggggctctgaggttaagcagcattccaggtttccatggcattaactgtcccaggcagggatgaagctctctgagacgtgccagtccatttctctctccattgccatcgctgctgtattgttactctccctttatattcatttttagtgaaggaaacaaaacagcagttgtcactttcctttcccagtagtttcattatttgctgtcaccagttctgttgcaggatcctctattgtaatattgtcttcagattttaaaaaatgtatctctacatattggaagaaagcactgtggtggaaaatacaggaaaactgtgtacagacctgttaaatggaaatgttttcataatttttagttagttttatttgtattttactaatgaaatttagtaaagatgtcaatgtcaatctttcttactacggaaataagttaaattttgccaactagtggaaaaaaagtttctgtggcatttttttttttaaggaatacaggattgatacaagaatgagagcattcatattataagaaatataagttttgtggttttttttgaaataaaaatttggtttatgagaggcttaaaaaatgaataaattcccttctttcctgatagtttctgtcgttcccttggggattaaaggagtgtgaatctatcctacagccacttcctctctgaactgtagatgacacatcaggatgtgatttggggtagatcaagcctcagagtcgaatctcagtgtctagccgtagaggtggtatgatagtatgataattccacatgtcctgccttctgggctttttgacattcatagcatttctaaacaagtgaaggatttatcttaaaaaataaaattttagtattttcttcattattcgtgagctttaattctttccattagaaattatgtcatccccatatttagagcaatgaataattgcataacttttaaattgtgtatttgatggtatggtgtatattgaaaagagaatgagaaactatcccctgaatagagatttagtgattcaagccatcactttctaaaatatacgcacttcagagtgaaagttcagtgtcagaacttcatagagtgtctggccagctagagttaggtatttcatggagagatgatcaaacaattgaacagaaaatacagcaaccagaagagtttttcactgtgcatgttcagaagacttcatcatttttattatcattttatatcaagccattttataagtagagatgtgtctagaggattgttttcatttccttttagctcattgaaagtcatacagtgtcactttagtaattctcttcttgcccagtggggatagaaaccagttttgggccacggcaactatatagaagtattttcatagagttacagattcattaaatgagaccctctctcctccccttaacacccactgtgtttctgctataatgaggatttaagcaacagtcccaacatgaactagctcatttcagtactagggaaatggctgttgcatgggtttaccacctctgattctgcaacaattgttctttttctgacagcgtcttctacctcctccaggcaggcacaactcttgatgacttgaacctcctatgttcttttttttcccccccagcttgtaaaattatggtaaaatacacataatataaaatttactatcttcaccgtttaatgttctgttcagtagcaatatgatgaagtacattcatattgttgcaactgtcaccagtatccatcttcagaactcatttcatcttgcaaaactgaacctctataccgcttcaccaataaccccccattccactctcagccagcccctgaaaccaccattctactctctgtctctaagattttaacttcacgagcacatggtaaaattgtaatcagattgtatttgtcttcgcaactggcttattttacttaacataatgtcctcaaagtttatccatgttgtagcatatgtcatgctatatatatgtcatgttctgcttatccgttcttgttaatagacatttgggttctttccccattttacctactgtgggaataatgctgctataagtatgggtgtagaaatcactcttttggaccctgctttcagttattttgagtatatacccagaagtgaattgctagataacatggtagttctatttttaatattttgaggaacattcataccattttccacagcagctgtactgtttccattcctcacaacagcacacgagttctgatttctccacgtccttgccgacactgttttttgtctcgataatagccatcctaatgggtgcagagtgatagctcattgtagttttgatttgcatttctctaatgattactgattttgagcatctattcatgtatgtattagccatttgtatatatatatcttctttggagaaatgtctattcaagttctttattcatttttgaatttgacttttttttctttttgagttttgtaaggtctctatatattctgaatattaatcccttatcaggtatgatttgataatactttctcccattttgaagattgcctttttactccattgatactgtcttttgatttttaatttttatgaaattcaatttgtctcttgtgttatttgtgccttttgtgtcatattaagacattcgttgccaaattcaatgtcatgatgcttttgcatatgttttattctaatctacaattttagatgttacctttaggtcatggatccatttcgagttaacttttataattatgctaggaaagagtccacccttactcttttgtgtgtggatattaaattttcccagcaccatttgttgaaaagactgtccttcctgtattaaatgatcttggtgcccttgtaggcagtgacttgaacatatatctgagggtttatttctggactgtctcttatgtgttattatgccaatagcacactgttttgcttactttagctttgtattaatttttgaaatcaggaagtgtcggtcctccacctttgttcctttttactcaggattgttctgcctattttaggtcatttcatattccatatgaattttaggataggtttttctactttttaaaaaatgtcactgggattttgatcgggaccgcattaagtctggatatcatattggttgatattgacatcttagttatattaagtcttgcattctatgaacatgagatgtctaccatttatttatgtcttctttaattcctttctgaaatgtattcaagttttcattgttcaaggcttttaactatttattcacgttaatttctaagtattttgtcttttattttttgatgctattgtatatggaatgatttgcttaatttcctttttgaattgttcattgttgatacaaatgtaagtgatttttgtgtagtaactttatatgctctacttggctaaattcactatttagttctaatagtctttgtgtccaatctttagggttttctacatataagattatgtcatctacaagaagagatgatttaattctttctttttaattttgacacctttatttttttttcttccctgattactctgatgaggacttccagtattacactaaattgttatggcaaaagctggtattcctaatcttagaggaaaagctttcagtcttttatcattgagtatgattttctctgtgggtttccatctgtggcttttgctatgttgagatagttttcttctattcccagtttgttgaatatttttcttatgaaaggatattgaattttgtcaaatgcttttctgtgtcaattgagaagataactttttttccattctgttaatataatatataaccttgatttgtttgttgagtatccgttcgttacaataataaatttcacttggccatgatatatcaaacttgtaatatgctattaaatttgacttgggatatttgattgaggattttgcatcaatgtttattagggatattgttctgtacttttcatgtagtatctttgtcggactttgatgtcacagaatgagttaggaagtgtttccttctttttaattttttggaaagatttgaggataattgttgttagttcatgtatcaatgtttggtagaatttactagtgaagccatggttccagattttttcttactcagattttggatactgattcaatcttcttagtattcatagcatattcagattttttatttgtggtttagtcttggtgcattttgtgtttcttgaaaatttccctgtcatctgggttatcgaattttttgccacacacttgctcatagtactctcttaaatcttttttatttctgtagaattgttagtaatgcccctacttttatttttgtcttttgtagtttgagtcttctctctctgtctctctctcacttcatctagctaaaggtttgtcaattttgttgatcttttttaagaactgttggattttgttagtattctctattatttttctattctccattctacttatttctactcttatctttattatttcttcccttctggtagatttgggtatggttttttctttctttttttccaagtttcacaatctgtagatttaggttgttggtttgacgtctttcttatctttaaatttaatggtgtatagctataaattgcctcgtttgcactgttttcactgtttcccatacgtttggtatgttttctttcatgttcattcatttttaagtatttttctatttcccttgtgatttctcctttgatccattgtttgttaaagagcatattattggctggatgcagtggctcacacctgtaatctcagcactttgggaggccgaggtgggaggatcacgaggacaggagtttaagactagcctggccaacatagtgaaaccccatctctactaaaaattacaaaatattggccgggcgtggtggctcacgcctgtaatcccagcactttgagaggccgaggcgggtggatcacgaggtcaggagatcgagaccatcctggctaacgcggtgaaaccctgtctctactaaaattacaaaaaattagccgggcgtggtggcgggcacctgtagtcccagctaatcgggaggctgaggcaggagaatggcctgaaccctggaggcggaggttgcagtgagccgagatcactccagcctgggtgacagaggaagactccatctcaaaaaaaacaaaaaccaaaaaacaaaatattagccgggcgtggtggtgggcacctgtaatcccagctactcgggaggctgaggcaggagaatcgcttgaacccaggaagcagaggtttcagtgagctgaggtcgtgccattgcactccagcctgggcaacagtgtgagactccattaaaaaaaaaaacaaacaagtatattatttaattactgcaaatttgtgaattttgcagttttacttatgtctatttatttctatttttatcccattgtgctcagagaagatactttgtatgacatctactttttcaaatctattgacccttatttagtttatgggcttattcatgttctatcctggaacatgtcccatgtgcacatgagaagaaggtgtattcaattgttgttcaagtcctctatttcctgacttacctattgtttggctgttctatccactgttaaaagttggacgttgaaatctctattattatacaactgtctatttcttccttcaattctggtaatttttggtttatatattttgatgatcttttattaggtgtgtatacatttacaattgttacatattcttgatgtattgagcctcttattaatataatgttcttcatctcttttttgtcttttagccttttttgacttaaaatctattttctctgatattttgctagtctgctttttgtgggttactatttgcatgaaatggtgttttctgtcctttcattttaaactgtttgtgtctttggatataaagtctcttgtagacaacatatatttgggttatgtgttttaatttattctgccaacccgtcttttgaccagagaatttaattcatttacatttaaagtaattattgataagtagagaattacttcttattttcctacagatgctccttaagttgtgatggggttatgtcccactaaaactgtcttaagttgaaataattgtaaatttaaaatgcatttaatatacctaacataccaaacatcatggtttagcctaacctactctaaacatactcagaacacttgcattagcagacagttggaaaaaaatcacctaatataaagcttattttataataaagctttaattatcttatgtattttattgtatgttctactgaaagtgaaagacagaatagatgcttcaagtatcgtgtttaatgaatgtgtatcacttttacaccatcatatggtaaaaaaattgtaagtcaaacccttataaaatttataagattataaaaccatttatatttattttctatatgctttatagtttctttgtcctttatttcctatataattttttttgtgtattcaattgattttttgtagtaaaatatttaaattcctacctgatttcttttgtgtatattctgtagctattttctttatggttacaatgggggttacatttaacatcctaacgttataacactctaatttgaagtcataccagcttgacttagataacatacaaaattctgttcctttttcagttgttgatgtaacaaaattacatctttatacattgtgtacacaacaacataagctaataatttaatacactcatttcttaaattgtagaaaacaaaattgggcttaccaatcaaattacaataatatgagattttaaatttgtaatttaaaaaaatattagtttcttaaatcatgtagaaaacaaaaagtaaagtcacacatcatgattacaatgatgttagctcttataagcgtctgcctatttgccttttctgacatctgtatttctttgtatgatttttgagttactctgtagtatcatttcttctcaacctgcaggcttcctgttagcatttcttgcaggagaaatctaacagtaataaagaactctctcacctctttttttttttttcatgactggcattttgattttctttctcacttttaaaataaaattttgccagatgtaggattcgtggttgataattttttttccttttagcactttgaatatattggccctctgttttctggcatctaaggctgctgctaagaaaaccggataattttattgaggatcccttgtatgtgatgagtcacctctcttgcaactttcaaaattctccggttgtctttgtcttttgacagtttaattagaaggtgcctcactatttgtctgtttgagttcatcttacttgtacttttttgagcttcttggatgtttatactcttggctttgatcaaatttgggggagtttttggtgattatttcttcaagtattgtccctgccttttctctctgtctcatacttctgggaattccatgctgcatactttggtatagttgattgtgtcccacaggtctcttaggctcagttcacctgtcttcaatcttttttctttctgattcttagactaattaatttactttgacctctcttcaagttttctgattctttcttttgctgttaaatctgtctttgagttcctctagtgaattttttatttcagttattgtaattttcatttccacaattgcttttttttctttttctgtattgatattcccattttattcatgcattgttttcttaactttctccttgcttcctttagttctttcagcatgtttaagacagtagttttaaagtcttcgtcaggtagatcccccatcaggtcttttttagagacagtttctgttggtttatatttttgttttgaatagaccgtgctatcctgtttctttgtatgtcttttgattttttgttgttgttgaaaattgcatatttgaaactaataatgtagagccctggaaatcagaccttttctcttccccaaggtttactgttaccgtttgtattttgtggggttattgttgccagtctctgtgctaagtattagctttttttgttaacttgtggtcttaagtattttctgagcctgcatgtttccctggttatgtgccatgactttctcatttcctctgttgttttcaaatgccctggttatcaaggtctgtctcccaaaatgagaaaaagtaaaaaataaaggaagaaaaaaaaaaaaaggactggccttttgagtcccatggaagtcacttcagctggagtgagaggggcaacactaatgatagttgcccctttttctttatgtgtgtgattaaaagcagcaattaatgttcagtccacagatccttgatatatggaagacaggtcctttttgcccagcttggatcatgtaagctgtatgcaagctgcttcaagtacatgtgcacagatgcctgccaaggatctaagaggtggggtataggtagttgctattgtgctgagatgtaaactttacctaaattaaccacaacttaccatctaaagcttccctccagaaagtagactcctttaatagactctggacttccaaaataagttgttgatatagatggtggcagtgcaatcgttgtctaggtggaaagacagatttgtggtgcctcctgctttgccatattctcagaatccctttcacttccttcgatttttactaagcagaactaacttccttaattcctctgccatgcctgcaactattccttttctcccttctttaccaccccctcctcctttctccctgtctctaaatttaggttcccactcagagttctcactttgaccttccgttttctctcagtagatgtcactactctaataagatcaactttgatctttctttatctaattatttgaactgcttgtgacttggtactgtgttttcctttgacaagttttgtttcatttatccatgagatcttttcatagataacacctgccttttcactttcaatgtatccctaattctactcatcatcttactcaaaggcttacattctgttagacataccattatattttctagtcttgccaactaaatcgtgttcattgatgatatatcttgctttctttgtatatctatcaccaaggcttacaggattatttcaatctctttattttcttgcccatcatcctagttcatatcttctgggttacaacctactcattgccttcattctatctttttcacattccaactgcatatctgtaaccacttagtggtttaaaaaatattattttcttcctttggcttttccacattaaatttctcctcttggtttatttttcagagtactctatgacctacctcatcctatgtagcacactgtatctcccactgtcctttttatacagtccttgctcttttgaagctcatatcgtcattgtcagcttcatatgccaagccaatttttcttgtgtctttctcaatacctgatgaaccctcatatcctcatttttagaagcctaactctactattttactcatacgtgtctgacaactggatcatcttgatctctctcttctctgcatcctcagtcttttgattgagtcatgtgatgtggtggcatgagcccagggtttagggctaagaaaccctgctctgttgcttatcactgcatttcccatctttacatgcaaaaatgaggatattaataacaatttttagaaggttattttgaggactaattaagataatgtagagtatccaacaactgctggttcagagtaaaggctactatgagtcagttaataaatagatttattaatgctgtttgattttttctgccacttaatatatacccttttgtggggtaatgtaatcattgcatgtacattaatcttgccaccaaactttattttataagccagaatcataaaataacatgggagacttgtagaaattatttaaaatcacaaatcgtagagcaccagatttgacatggtcctaacccctctgccctttcttgtgatgaggaaactggagcctaaatttcttaagtgaactgttcatggtgacacagttactaggagagctggtcctaaccacaactagagatttctggactcccaggcctctgctctttccattaccttcttgttcatttattttagcaattgcctgaaggcaggatcacaacccatatttctgtatcacccataacctttattttcatttcattttattttttttgagatggagtcttgctctgttgcccaggctggagtgcagtggcgcaatctcggctcactgcaagctccgcctcccgggttcacgccattctcctgcctcagcctcccaagtagctgggactacaggcgcccaccaccacacctggctaattttttgtatttttagtagagacggggtttcactgtgttagtcaggatggtcttgatctcctggcctcgtggtccacctacctcggcctcccaaagtgctgggattacaggcatgagccaccacgcccggcccataacctttattttattgcgagaagatagaatagctacttgattgatatttgtggcttgattgatctattctttcttcgactgtgcaataggaattctctgggaaaggactatgaagtctgtatacttatcacccttttgatgcttttggggttgttgtaagcatgcaaagggttcattgtgcactgcttctgtatactgactcagggtggtggggagaggaaatgggagaggaagttatatacatcttgagcaaatcaagcttttctatttttagtccttgctactgtttggaaagtacagcctctgttcatggcagtctggcatgtgtttccttagtgccatttcgaaagggggaaaaaataaatatgggaattttttttttttgtagtgaaaatagttactcagtgaaatcacataagtttcccgtttttctcttgatgaaacctcaaacccactaggcacagattcctcaacctcaactatgcatgtgaaaggctcatgcagaacaggagaccagagtcagcaaaaccttgtatagcaagataagctgtggtgccccagagaagcgcggatgggtggcggaggtggggaaggcagggaagggaatggtgatgttctttcatatttagtggggaacttggccaactaccagatcgttgccccctggaaaaggctgaaacctgaactaagataaagagacacatagctttgcagctttttgcttaagctgttccttttgcttcagtttctgtccttggtaaaagtttccctgactgctttatagctactcccccaattcaaataaataatttttctttaatagttgtgatggcatttgggagatttttccaatctaaggctatatcattaggacacgataaagagccttttatgctagtaaataaaatgatttgatctgtatttagatggattgctataacatagtggtactcaagtgatcagaaatggtgatgacagagtgtcttggagtcaccttcaggggtccattgaggcagacaaggaccttaaccaaggtggtggccatgaccatggagaaggggaacaagaatcaaaagcaatttggaaagagggggcttatgggaaagagaagagtccaggatgcttggcaggattgtgactttcttcagggagaatacatatccttcctgtcctagtatgtggcaaatggaagaatcctttggaaaaaaatgaggactttgaagcaggtgtgatgtgaatgttactagaggaaatgttgataccaatgagcaaatattgccctttgttaatgaaagggactatacagtctccagacataaacagctctgcctagacaaaattgtagcagtagggtgagaataatgcattgctataattaatgctaatttgtggatattgctgtattgttgtcattgttttttaattgaatatgtattaagctccaacagggtgctatgaataatgccaacttatagttgatttatgagaacactcagaagactttattaacaccagtaaatggaaactcgcactccttcgaggtggtaaacgtctttgccatttcgacagatgaggagaagtgaagtagattgtgttttctctgttggcactgcgggtgagaacacagaaactgtcgaatgagagaaaagtattttccttgtcccctggaattgggttagaatacattagtaaagaattctttaatgtgttcagagttgtgggattttaattaaattgttccagttattgttagcacttggattagcaactggcaaccaaattctaggccagcagatttcaaatttagcatggacaagaattggggtgaggccgatgggtttgttaaatgccaattattaggccctgccttcaaaggtttagatttggtaaatctaggagggggcttaggaaaatcttatgttcatggatatcgaaggtgcttctgtcctcaaaggttgctagcttcctttcaaaactccagtattttcttattttaggacgtatctttggccaccaaaatctagcttcacctgagaccaagggctttttatttaatagctgcaaattctcttataacacaccaagtataatcctgtaatcctcttttatacacaacataccaccagaaaacatgtgcagaagacttaccgtatgcttagcattctagtggacacatgatttctactaccttatttcacctggtctccaaaatatccctgtggggttggtattattgctcccttatttcataagaagacactaaaactaagagtatacgacttggtcaaacatcacatccagtttaatcctttctatcttaacctggttaggcatatattttactttaagtttgaacaacaggtgggattctttttggcactgacagagtttgcagttgacagtagagactgtaaactcggcttaagtggacccgtcccataaagaaaaacattcacattggaacaagggagaggtgaaaaggaaagttggaagtgagtaattcaacttttcatttttttttgtccccttccttccttccttccttccttccttccttccttccttccttccttccttccttccttcctctctctctctcttttctttttttttttttgagtctcactctgtcgcccaggctggagtgcaatggcatgatctcggctcactgcaaactccgcctcctgggttcaagcgattctcctgtttcagcttcccaagtagctgggattacagttgtgtgccaccatgcctggctaattttttttttgttgtttttttttttttttttgcatctttagtagagatggggtttcaccatgttggccaggctggtctcaaacttctgaccttgtgatccgcctgccttggcctcccaaagtgctgggattagaggcgtgagccactgcaccgggcctgtctcatttctttaatacgaggtactaaactgtcactgagtaaatagtagacatttgattattatttgactctgaatattttttgaaaaaaggaacatttcataagaaagcctgaaatgagacatgagcagaattctggggtatagaaatgatttttaagttgagacaagaatagtgaagcttgagacgacattattccttgcctcctttagactttcttcagcctccacctagcaaagtaaaagtcttgtcatagcagtctgttgcattgtattccctgggtctaaggcagaaatgtgtacgtgctccaataacccttgtttgttgtgctgtggaatcacgttcatttctgattaaggtgaaatcagtagctttctgatacggtctctcactcactttttatcaatggcaacctttttcctaaaaataggaatttctgctgggagtgttttaatataaattgtctgtgctcagcctgaaatatgtgtgattcataccatgtgtttgttcccacatcaacactaagtcccaagatacaattacccctgcccactctctccttcgtcatggggaatgtgtttatcctttagatatcagcaccttgggtaagagccaatctccttatatgccttggtttgcacacctgcattgtctgaccacagctgaccctttgagtctgctcttactctatttttaccttaaagaacactcgtgtttgccaagtacacttgcacattgcagagttccttctatatctttatgctcatgttgtaaatatgttaaatacttgttctccatttaaggccttctcaattctgtcgccatatagctctctctgatttctctattcagctactttctctctttcctctctctcattttgcttttttctcgaacatcttgtgtgtcttacctacatgtagtctgccttctaatatggacatttgtggataaactagtttcttcaatgcaactgtaagctcttggcagagaacccctgatccattctctttccctccctccccttccttctccctctccctcctttcctttctttcttccctccctgcccccctccctccctccctccttcctccttccttcctacctgcttccctcctttcttcctacctgcctccctccctccctccttcctttctacctgactctctccctccctccttccctcccttcctcccttccttcctcccttcctccctccctcactcccttccctcccttccctccttcctttccctcccttccctcccttccttccctccctgccttcctccctcccctctctccctccctccctcccttgtccctcttgcctgaacttcatatcagtgtgtcttgaatatttgaaaaatatttataggaaagtgaatgaaacctatcctaaatggagaagtagatggcaaaaaagggtattagagcttggcttttcaattgtaattgtagccatgacctaatttttggtaatctaataggcccatataatctctgcttggtgttagaagggaagacctttcaccttttgtgttttcttcctaatgtcatgcaaagtgctagagctttggagcaaaatgtttgatttccaaattccaattcttccatttactgcccgagtaaccctagaaagttctctttttctctctgatccttgggctatcctcttttgaaaacaggaataataacatctactaatctctaggattgctggaatagctcgatgagatcgtatatatgaaaatgcttttctaaacctgagcacttctctgtgataatggccgtacagagggagctatgatattttccctcttgttttcccagtagtgactatgtcccaggctgtgtgcagtggactgggtagctgcctagtaatattgctggcttgtaggatatttcctgttttatatgttcttaagaagatcagttgaaatgtacgagatgtcgttttggaaaagatgtttcacagtgggaggtgttaaagttttagtcctacttcagccccttcactatacaaactaccttacctttttgggggaattgtattatctttaaatgaaaatgatggaatagcgacgtaaattccccttctagttctaatattttatgagccttatttccattttctatgcttatcaactataaatgattctcttgcagttgttcaaacatcttttatctgcacatcctcatcaatggtatttaacatatagaatcagaaccacaaatgtttgaagaaaattctcggccagacatggtggctcacacctgtaatcccagcactttgggaggcctaggcgggtggatcgcctgaggtcaggagttcgagaccggcctggctaacatgatgaaaccccatctaaaaatacaaaattagccaggcgtgttggcacgcacttgtaatcctagctactcgggaggcttaggcaggagaattgcttgaacctgggagacggaggtttcaatgagccaaggttgcagtgagtgccattgcgctctagtctgggcaacaagagcaaaacccggtctataaataaataaataaataaataaataaataaataaagttcccaccctctgtacgtttccatggcatgacgctttgctttatatctctgagtacatgatatggaatatgggacatgggaattgaatacttttttatggtttccaattttggtaacatttaaggggtcaaacaagagttcaagaaaaaaaatacttgaaaatgatgagctaatgtataaagttaacatcacatttctaactatttgaattttggggaatgtgagaaagtggcttttgaaatgtatcatgcctgagcttattaagcctgtgttaccaaaatgaaaaataagaaacatgtcttccttgaggttttaaaaaacaaaatcaatagcaaaattacctgacaagttctgtttgattcataaatccacacaattgttgcacatctccagccccctcaccacatatgaaagttttcttaatgtaaaagtaaaccttttctcccctacctctaaaaacttctgtctaccaattttattatttcatgttattttgttatgcaaaggattcctggaaaaatatccatgatcctagatgatcttatggatatctttataggtatttcaatgtagaaatttcaaataaatgtatttcccttttatgcacaaacacagagttcagaaaagacagttcatttagagtttgctaaactgtgtgtgtggactaactggtaaggtgacgctctaggatggcacagcttgcctagataatctgtagcagtggtttttaaactattaatttcttagaattgcttcaggaaatattactaaaggagatgggggataaagcagctctgtctgtatatgtttcatacaatgggtttccgtgtctgatttcattttaccaggggatctgctgcttaaaaagggggtgccaaatatctattttactgtcaaatagttcatcttattgtgattattcttagagttcctgttttattgatgaatagataatatatgtattgttccttattattatctatgcaaattgacctttattttaattgtaaggggttactttaaaaatatattatttatattatttttattttataaggattggaattcagtagaaatcattcaacgagtaggtaaatattgtgaaaagtgaggggtttttgttgcatatttagttttgctttcttatttgaatagaacagtgaacagtgaggctacttgtgtatacccaagttcagatcactttaaccatgaccctgcccttacttataaaagagttggcttaaactcggagttggcctaactcttacgggtttagtctgatggcttttgaacagcaaagatagtgacaggcaagttgtgaaatgtcattatagatctatgcagtattagaggttaaaaaaatagaaaacgacctggaaggtgcataccctcatttttgtagaggtaaaagttgagttccagaaagtcaaagaaactgcttgataatatcagcgggacttggtcttgtttaggctgcttcagtagggctgattgtgtgaaacagaggccccctggagtagcgctgaatcatggagtttatcttaaggatggatctgaatgagatctgatatcaggaagctcagggtcagggcagatctgtggctgaactcttccatctatttttcttctcattgttttttttccctctctcccttcctcttttcctctcctctccattcctctgcttctctagtgttcgcttgttcattgttttcctccacccaatgatagacttcctacctcctgttgtatgtttggattgttaataattaaccatgtacatcatctttttggttgatcacagccatagctcatccctgtggcaattttttattttttattttatttttttttttattttttgagtttcactcttgttgcccaggctggagtgcagtggtaagatcttggctcactgcaacctctacctcccgggtgggttcaagtaatttttctgcctccagcctcccaagtagctgggattacggttacccaccaccacgcccagctaaattttgtatttttagtagagatggcgtttcgccatgttggccaggctggtcttgaactcctgacctcaggtgatcctcccgcctcagcctcccaaggtgttgggattacatgcatgagccaccgtgcctggcggcagttttgttacatgtttttcagtccaaacgcataagagaaggagatttatttgcccatctaatctccttgtcactgtccaaaagttaggttcaccagcctatttatggacccttggttctgtgggcctcagtgttctgaaatggagtcgcatggttgaaaacatggctgttttggcaacaaagaatgggggcaggaccatttcctttaaaggagatttgggttggccaaacattgctaacactgggtgagtgtgttagggctgaaaaggatgaaataatgtaaattgtgaggaaaaaaaattcaagcatttatcaagcgtagcatttatgttctatgttgacgtttgatacggcttggatgctttttccctccaaatcatgtcagaatgtgatctccagtgtttgaagtggggcctaatgggagatactcgatcacagaggtgaatctcttatgggggtttagtgccatccccttggtaatgagtgagttcttcctctgggttcacacgagatctggttgtttagagagtgtggtacctctccccaagccttgttcctcctctcgccatatgacatggtagctccctgttgccttcattcatgattataagcttcctgaggctctcatcagaaactgtctggatattgacaccatgcttcttatatagcctgcatagtcatgagccaatttaacctcttttctttataaattacccagcctcagctattgttctatagtgatgcaaaaatggcctaatgtaacgtttttgtgctttatcatgaaaaactcttgtcttctgttgttaccttatttcttgtttatttaatgctgtgttctcagttgtcaagccagtattgcacttcagattatggaaatgtattcccccttatgaatgctctagtgtttgctcccaagacagcttttgcgacaacttttcccactgcctttaacatgtggagaagatgtccttctcggatattaataagacttgagtttaggcctggttttgcatattagaaaagttgaattgtatttctgttggccattagataagaaggattttagggaaggggactgtttttgtttttaaatttgtgtctcttccacatagttttacaaagagtatcaaataacatagtgaatttgatatctctaggcaaaagtgcaagtgatatttttcagtagaatacatatatataaactcctcaaggttgggtatcatggcttttttacactgcatactacttagcataaactattttctagagcagcatgggagaaaagccatccactcaaatccatcatgagagttaccctatgaacattggtgtcatggaaaattagacaaagaggagtcagttatcaagttagtgggttatttgtaagtcctcctcccctggagaagggtacatttggggagatagataggtaaggtttttggaaagctaaacacttcaactgaatgactgggaaagaggatacacatcccaataggaatgcattcattttttccctaacttacaacagtttgtatctctttccataaaatgatatttctattagataaaatagatcatattttctgcaattctcactactgaatacggcctgtgtccactgaacattaccaggatccgtttggtgaggctgctcatattactatacagcatgagagattatattaaatagaaatgttactgtcttcatttttatttttatccaaatacctcttagctattatttggtgtgtcaattggtattttcatggcatcattaaccatatatatgacataatataggttgtttttaagggaaataaactataaattcactcagtacccacccttactccccctgccccacacacttaaatgttcattgtgttagaaatccacttagaaaagtcattctcaaagtgagaacacctcactttgagaatgactcagaccagcaccatcactggggatgttgagaacatccccataccagcgccatcactagcacctacgaacttggtagaaatgtaagttcttgggcctcacccaagatgtacagataagaaactgtggcaggtacagcctggtaatctaaggtttaataagtcctcctggtggttctgtataggctaatgtttgaaaaacactgatctaggattgtgttctttatggttaattcctggcacccttacacatgttcagatgcatagaagccccatctactgaagcctctcagtaacttagttttacttttgatcaaagtactttataaagtcacatactcaattgcctgactattaacagaagcatttattttgagactattgtcaaagtaacaattaaatagctagcatttattgaatgcttattatgtgaatattacttgacatgcataaacctatttaatttttacaactgcatgagggacccgagagctcaggtgaattgttgaaggtcacaaagccagcaattgggagatacaggtattacagcctgactccaaagctttcaccagtattcttttttattagggatactttgaggaaattacttaatacaaatgattatagacaaataaatattgattgtttccccaatttcatcaaagacagatgatggaaaaaagattgatctaacttacaacaaaatgattacactttcaagagaaactagatagaaatagtttggatatctgtcccctccaaatctcatgttgaaatttaatccccaatatttagatgtggcctagtgggaggtatttaggtccctcatgaatggcttggtgcctgtatgagtctgttttcacactactaataaagacatccccgaatctgggaagaaaaagaggtttaattggacttatagttccacatggctggggaggcctcagaatcatggtaggaggtgaagggcacttcttacatggcggtggtaagagaaaatgagggtgatgcaaagcagaaacccctgataaaaccatcagatctcgtgaaactttttcactaccatgagaacagtatggaggaaactgcccccaagattcaaattatctcccccttgttccttcccataacatggggagttatgggagtacaatttaagatgagatttggatagggacacagagcaaaactgtatcagtgacctccccatggtactggtcatacagagtgaattctctgttagttcataggacagctgattgtttaaaagagtatagcacctctcctcgctctctcttccgctctctctcaccatatgacatgctgcctcccattaccttcctccatgagtaaacgctttctgaggccctcaccagaagcagaaggcagctccatgcttcctgtacagcctgcggaaccatgagccaaataaacctcttctctttataaattacccagcttcaagttttgcattatagcaatgcaaaacagactaacaaacatagtgtgttttgttacttaaaaagcacacactttcaaaattcctttagttatcaccattttcccccactgatattagaaagaagagagtaataaacattactgaccataatagaaaaaaaatacagtgaaattcctgttgtattattaaatttaaatgaaactaccattgaaaagaaaagttgtatgtaaacacaatgtaatttttgtattattagcctcttaggttttactaaattaagacagttttatattcctaagttatcagggaaagcttttctaattaatcacaaaaggaagctcaagcttgggtagggtctgggaacctctttgttttccatatgggatcagtggtaagacattccttgagctctgtgaagcacagttgaaaaaaataggattatgtggttactttctcaggtctgtaattgagcagtcacattcaaattccggctttttgaactcacaatctataatgtgtcagtatggttgtctacctcagagattctgaaggttgttgaagattagttcatggtcatgtatgttttgagtatgacgctgggcattggatctaattctagtatataaacatccaagggtggagactgtttcttaattaaatagaccattccccttggccttttgtttcctttaatatcctggataagattttcctatgtaacagtttttacttgatgattaagtttctgatttttttttcatagcacaggacttttcagttagtcctgctcccctaccttgaaaccgaaatgaatactgaacaaataaatcgttaacgtattaggcaagatatgtttattttcatcccgtttcacaatcattaaggccatagttagttcaggcaaagatcatctatggacactaaaaccactgggtgggtgaaaggtttttgactagtagaatactcacagtgccccaaaatatcacctcacagattatttttaatttaaaaatcatgcagtcatgcttaaaatggtgaaatctggtacacactaccttaatcgagtcatcaaactcagcatcaccaagcatgggccaaactgacccttgagcttcctgatgggatgcagcagaagggatgtggcctcacgcatgtgatattcctgcctgacttatttaatctgaatccagtcatcaagaaaaaccagattggttggactttttataagacacctgaccagaattattttaaaagttggctttataaaaatcaaaaatcagctaggagcctgttctaaattaaaagagaataaaaagacatatcattttatgatgtgatccttggatttggggtgaaaattaacagtagataaaagaacactactggcaccactagtgaaatgtgagtatgggtgatattagataatactgtttctatgttaaatttctccagtgtgagaatggttttgaaaaaattagaaattcttaggagatgcaaactgaggtgcatatgggggatgtcggggggtggttttgcaacatcttacagatggttcaattgcaacagcaaatctaatttatgtagacagaaagctagtgtgatgaaatggtggccactgatgaatctgggtgaaggatgggtgagtggagtttattttaatagttgttcaacttctctgtgaatttaaattttttggatataaagaatgaaaaagtaaataaatacaaatgaatgctctttcataaccaattgctggtactcctcgtctatcacctgtagttagtgggttagtgatagttggcctgaaatatgacccattcaaaatcagactcttgataatggcctaagttcatttcattcacacgctgtacattttggttctgggctatttattggactgtctttatgtacttacagtgggggagtcatcatcctataattctgctggcagcacttattatgatttgtcaagtcataataagtcccaactgtggtttggtgagctttttatcacatatgtattcagataatgcataaaaataaatataaaaataacatgttcgaatggtttattcataggatttttgtggtccttggtaaagggacgctgtcagtagacacctttggtgccccacctcgcatcttcccctcccaccttcgtgtaccagcagctgctacagcgatcagctctgcacaggtgtgacctggtagcacttggcttcaactgcaacacctttcactcactttctgtgccgggccttctctgcaaccatttaacttctgagacttgtgagacttattcacaaccaggagaacagtataggggaaaatgcccccgtgattcaattatctcccacacggtcctgcccacaacacatggggattatgagaactacaattcaagatgaaatttgggtggagactcagccaaaccatatctccttccttctctgcttaactccttctagtccctcagtactgtttctcagaattgattcccaaaataaatggccaacatgcgagcttttctcacaggcattgtttttcttggcagaacacagactaagacgatgtaatctttgaaatctctctagtgatggttaaagagtgtggggattgttataattacattaactactttataaaagtttgtggtggtaactagaaaaagcattagtcaggagaatcttccttgttgctggcattgggaaggtcatttaccagtcaggtaactagcacagctacaaagatagggagttaggagaaagacatgttggtaagtctataggattctgttgcttggttataggactttggatcctggtatctactataagggattgagagtagcaagatcccctaaatcgaaaggtaaatgaatatctacagattcgtggcaggacttgggcaggacaacagttatttgaactgagatataaaattgagactcaagagtgaaaaaaaggcctattctaattcataatggaattgaaatgtaggagtaaagctactatagtatttgcacaatcttctcccctctcaccccacgctcccctgttatccagtttttgtgcaaaatcacacagcattagactggaacttgtgataaattgcatcaacctaatttgagaaactgaaaatagggagcagtctgaacttagagggtagggagaataaggaccctggaaactaattgatgtcttacaagcacagactggttgcatatcataattacttgttttattgtgtagttcagggtaattctgtgacttgttgagtctcagtggttagatattgcagtgacttcaggcatagtcagttgatgtactttctgcttcagtaaagtacagatgtagaagacctgattaaatcctgtctctttactaataccccaagggaacacttaatgaatgatgcttccctcaagaagaagaataattaacaatagctatattattcatattaatttatagttactggttgctataattaatgctatttaggaaaatcatcataattatagcactttacaacttacagagtattttcccatccattttcttatctaaatcttataacatcaccctggcttagatagaacatgtgatattctcttcattttatagatgagaaaactatggcccagggaaagatttaagcagacaacactctaccacccttgccaatatattggactatctaagagtatgtggaaatacacttaccaaatttatgtctactataatattttatatctgcgcacaagaggatcaactttactcagtttttagttgcattccaaaacaataatgtcctgtctttccttgtaccaggacccccattacccagaatgttcacatgaattttaaatgttaaatggaatttttcttaataataccacagtgtttcatagttattactgccctttgatataaacatgaaatctcctctgatagagggattagcaccttgaaaacatctgtttccagtatacagacctgctggccttaaacagtttaatcagactggaaattcagactcagaaaagtctaaatttcaaccaacctgtcatgtcactctttttctatttttggctatgacaagagagttgaagaaaatctatcaatttcacaaggctagccttcaaatctgggccgtccagcttgatgatacacacatagttaccagtgtgagcgtgtgtgtgcacacacagatggacactgaacctctttggttccgtttttatatcaaattctagagtatccactgcttattgttgtacttctaactgtgtttacccaaaagatagtgctatgagaaaggttactgcctgtgtcacagtctgtcattattcactgatttatttattcaaaaatacttactgaacacttatttgggctaggtcttgaaagagagtccaaggaaacaggaacaaaacagacaaagcttctcatgaagcttatatgttctaggggagagactgaaaataaacagaaaaatacacatggtggcagatattatttaaaaatggatttaaaagggtaggggaataacatgacgtgatgtagaggggtcataataatacatccagaaggagaaaatcataaggtggctgttttagataatgtgataatatgaaatatatatatatatatatatatatatatatatgtgtatgtgtgtgtgtatgtgtgtgtacgtgtgtgtatgtgtgtatatatatatgtttgagacatatatgtgtgtgtgtgtgtgtatatacatatatgtatgtatgtttgagacagagtctcgctctgtcatgtaggctggagtgcagtggtacgatcttggctcactgcaacctccgcctctagggctcaagctattctcctgcctcagcctcccaagtatctgggattacaggggcctgccaccacacccagctaatttttgtatttttagtggagacgggtttcaccatgttggccaggctggtcttgaactcctggcctcagataatccacccgccttggcctcgaaacctgctgagattacaggcatgagccaccgcgcccgtcctgaaatccatgtttaaagagggctcacaaacaaggaagccaactgcctcttgaagtaggtttggctccaaggacctgggccacaacttcatagacagttgatgttactgtgcttgagagaaatcaggcccaggaaggattaactcaagctgactaagttcccaaaagaatgaccaaaacaccagatccctttatgtttcttttacacagatagttaaataagctccaagactcaggtaaggtggtttggtgagtaagctactagggcatacggaactagtggtcttcacaggccattaccctttacgcttgcttcaacatattcactaaaacgacagattgacttcaagggttataagatttagtgctagcctgtcatggcacgctacttgttgttgttactgaagatattctagtttcttggttggttaatgctttttctaaactcttttgcagacactagatactctcttgatattttacgtccttagacaagtccagtagaattgattagattattgtaactttccactattgtattgccattgagtcttgctgaagatacactttggtctcttaatgaagttttaagagcttcttccatattcatatatgatcattattaaattgtcactttaaaaggttatttttttacttcaccctgcctccaaatactagggtcatctcactttataatccagacagattctttgcttctttttcccaaacctgatcataattcctggaaacaccctgtgtcgatgttgttgtcctctactctcctgttgattctgactgcaggtaatacgaggttctgacataggaaatccggagatcctgacttcattgtccatgctcactgccacatgcttcccctgcagccccttggcagaaccctaagaggtctctttccagttcatgttctaggtgcatctcttgggtcttgccatctctcgcacacatgcatacctaataccccctggacctgagacttccaagcactggcatgctccaatgtcttcaagtgctgattcctctttctggaatgtccgtgttccttccctgctccttgctactccaataaatattattctaggcagtggtgtctaaacaccaagtgcttgtgagctctcttcagctggttctgttctttaggtgcaggaatggagacatttattttcctttacttgtatacttattttaaacaacaacaacgacaaaactgctaaataagtgtgtgacctgagaaaaatcatcttttatttttcagttttcatatctgtcataaagtgataattctatctcagcctacctcactgagattttatgaaagcttaattaaaaaaaaaagaggtgcagaaaaacttggacaaagccacattataacttgagaaatttgaacttataatgatatcaagggaaatttcctttgttaacatgtctgtgttgcttccaacaggggaatcccggaggcaagacacttgaggagaggcgctccagcctggacgctgagattgactccttgaccagcatcttggctgaccttgagtgcagctccccctataagcctcggcctccacaggttagtgcagcccacaatcatctccacacagccattcccagatattctactcttatcagaaagaacatgctgcacctgagagcttatttccccttccttccttccgtccgtccttccttccttccttccttccttccttccttccttccttccttccttcctctctctctcttctttctttctctttttttttttttttgatggagtcttgctctgttgcccaggccggagtgcaatggcacaatcttgtctcactgcaacctccgcctcccgggttcaagcaattctcctgcatcagcctcctgagtagctgggattacaggcgcctgccaccacacctggctaatttttgtatttttagtagagaccgggtttcaccatgttggtcaggctggtctcgaactcctgacctcatgatctgcctgcctcagcctcccaaagtgctgggattacaggcctgagccaccatgcccggcccttttattctttcttgatcttcttagagtcaatgatttaagttgcctttttatttaatatcaacatgtattagtcaactggcagaaatttcttaaattgactctttgagtactttctttaaaaataacacaacatcatacaaaaatgttatataaaaaagtaaatctcttattccattgccttgctcttcttacagctttgtctatatggatattttgttacatgttgttatagttttcacaaatatgacttagcttggctatgtaaggttaaggtgaagggctgtgtcttttgcaaggaaattagttttgttggatattaaggtgattttcattatttttgtcatggttttaaataatgctacaggggacatatttgtgtatattttctttggggttatttcctggcctcagatttctaggagtggggttgctacattgatgaatgagaccactttatttacttttctttcctaaggttgtgaatagttgatactggtaccaccagttagtttgaatatatcagtttctcctcaagttcactagaatgtgatggttgcaattaatctgtgttttgtaagtgcaaatggtgccttgttagtttttctttgctttttaatttttttatttttgcctactttggagcttggctatttttcagcatcttcacttaatatctgcattccagaagctgatcttccactgctagtgatcattccctgcctctctaaagtcttgaaagggttgtggcaaatctgtttcagggcttccaattcctcagaagacagccatcagaattgtagttgcaaacgctagagaagcagtattgtcactgtgctgtttgactcttgcgtgacatttgtttgactaagtgagagtgcatagagcctctgagcctcactccagttcttgagtggcagcttctgtatttacagtggttcctttcttaaattaagaaccagtcttgtttctctgctgtcagttatttcaatacttaactgctcataaggtggcagcactttcttcttcttcttttttttttcttttatgagatggagtctctctctgttgccaaggctggaatgcagtggcgcaatctcagctcactgaaacctccacctcctgagttcaagcaattctgcctcagcctcccgagtagctgggattccaggtgcctgccaccacgcccagctaatttttgtattttagtagagatggagtttcaccatgttggccaggcttctctggaactcctgacctcaagcgatctgcccgccttggcctcccaaagtactgggattacaggtgtgagccactgtgcgtagctgctgtcttctttagatacattccctgtaccttttcttaacatataatggaattgttagccatgtgggattcatggcaaaatatactaccacttagctcttcctcactgaccctgctcttggctctatccatcctgtgagcagtaaaaatatactttgtccctgtaaatgtgtactgaactcatctgtagaaggcactgtggtcttttgggggaaccgatgaggcaaaaaaggtggatagttgagaggaagagaaataggactccgttgtaatcttctaatagcctgtaatgttatatgtgaggatatggcctatactgcaggagcacaaagaagatagtgatatattcttctgaaggtgacacagtctgataattcttatcaaaagacttgcattttcatctggaggggtgagtggaattgtatcgttcgagacagcagcagggagtagcctgagccacagggctgcaagcaagcaccaaggctgcatttagagatctgtaagcaaccagatggctgcagatgaagcctttgaaggcttggagtagaatataggtctgggaccagcctggccaacatggtgaaaccccatctctactaaaaatacaaaaaatagctgtgcgtggtggcgcccgcctgtaatcccagctattcgggaggctgaggcaggagaatcgtttgaacccgggaggcggaggtttcagtgagccaggatcacgccactgcgctccagcctggggacagagggagactccatctgaaaaaaaaaaaaaaaaaaaaaagagagaatataagtctggtagtttcctacagacagcgtgtagacacgtttaaatgccagattatgattttaatctgtcttttgtagataatgggattatttgaaggttctcaatcagggaaatctaaaattcattctgaaaaaggaacataggaaataagaccaactctagaatgatgcaggaaatgagcccaggtcagaaaaatgttctccagcaagccactcttcatactttctgaccattgcttgatgttcagcaattttttttgattccacccaagcaaatgccccaaatctcatctcatatctgaagacaggaaggccactgactttgccactggactcagcagtatcatgcccaaatgcttttttgtgctccctttccttttttttttttgtaatgggttttcactctgtcacccaggctggagtgcagtggtgggatctcggctcactgcaacctccgcctcctgggttcaagccattctcctgcctcagcctcccaaatttagggaggatagcaacagtgtttctggctgcagtaaatttggggtaatgactttagcttacatctactttataaaaaatcctccatgacactgcatggatttatgcaattgaactaccttaatatttgaaactaaaatttctaaacattttaaaagtgtttgtcagggagtagttttagaataacagatgagaaaagttcagacatattcctgtagtgaattgcagataaaatgtgagcatagagtatcagagctttagtgggccttccaggtcatttagccaaacttacaggtgtgtgccaccatgcccagctaattttttgtatttttagtagagatggggtttcactatgttggcaaggatggtctcaatctcctgacctcgtgactgacccacttcggccttccaaagtgctggggttacaggcatgagccaccgtgccctgcccctccccgccccccagctttttttttaaacggagctttcatttaaatcttttttttcctcccctaaatccttataacctaatagacactgaggagatcatgctttgaggtctattgtttaatacaacctttattcttgaaggttgtgtctatacatgcctctcataaaccattgcattttaataggtttattctgcagctacgttttgtttgaggaatctttctgagcacacaaattcatcatcactgatatttggacagtactgattgtgaagcactttcacatatattctcacttgagtgagatatagatatctcagttctgagatgtgcgtgatgtgctcctttcagggatgatgaaactaagactcaccaagaagattaatggtttctccttggccatatgtttgagcactgcgtgagcacaactggactttgaattttggcttgtgcttgattttaagttctaaacaccagattgagggtgtcaggttttgtctttgtttttgtaatgattttaccatcgatgaaagctggcatcagtcatctgagtgacactgtcccttgaatgttgctttcccataaaaagaaaaacattcagaaggtcaaaaaaaattaattgtaatagccattaagtagaataagttcataattatggtaaaatacactttcgatgtgcctgttccattcagaaattaaaggatgatccattctaatttttttctattactatgatttaacaaagcaagagttaattgggagatatatctcatccttttgaattatcttccctctggtggaactgaattagatgtgttaatatttattggttaacataattataggctgtgagaacaataatcacacacttaaaatattaaaagtatgtgccaagagaagatgatgtctatagtagacggtgttgtgttataattgaaaggtacttgaaaagtcctagaaatgtagaccgttaatgcccaacattgatgtttctatttttgttcaaagcaaatttcaaaacctatagaatcacctgactacttaaaataggctagtaggtctgtgatttctcattagtcaaacatgtgttgtaagcttttttgaatccatgtctctatcatctttggaaggctgctttgactcatggtctaggaaaaatgatatatatgtggaatgtttatatggtaagaggttccaaggagctccattctcaaaacaagtctgaaaaatgtgagctcttgaaaataggttttgctaaagcattttcttccttttattctagggagtattttccgctcccaaattttctgactttagttatgttcacttactaatccctatattgattttggaaatttggcttaattccacatattcattgattcattgattcattcacctaacatttgatgagatcctcctctggatcagtcattggagatttaaaggttagtatcaacaggtctttcctttagagtgatatttaatcttacagaagagataagcccgtaagtaacccaaagggacacaggagaagggcttcaatgtgctacttaaattgtcacgtaaatcaccacgtgtcaaaattattgggagataaaatacaggaataccaacattgtaccttatacctttcagtgtcagagaggactgcgtagagcaggcagtatttgagctaacttggcttaaagtgttacgggaagggcatgggattcaaggtgcaagaataacaagagtgagaaagtcaaggaacgtggaaagtgaatattatttgaagaataagtttgtctaatggggtatgtaaagtgtaaatgggattactgctgaaaaactcaaacttacttagcagtacctaagtagcccttttgatgcccaagggctttcattgttagaaagagaaatttacagggggatagcaacagtgttactggctgcagtgattttggagtaatgactttagcttacagctactttataaaaaaatcctccatgacgctgcatggatttatgcaattaaattacattagtgtttgaaaccaaaatttctaaacattttaaatgtgtttgtcagggagtagttttagaagaacagatgtgaaaagttcagaggtgatcctggagtgaattgcagacaaaatgtgatcatagaatatcagagctttagtgggccttccagctcacttagccaaactcttattctacagatggaaagcttttgcccagagagggaaagaacacactcaaggaggctcatttagagacagtttcagtgattctttgtattttccccgaactatgacacaaaggcccagcttgatgataaccacgaccaggggagagtttggtttcctttagtatcacaattggtttattccaaaaagtctttcttttatggcgtcttctttaaaataagtctcaaacacataacaaagaattaggcatatcaaagacgtacttcaatggtaaacagaaaacttatgacgttgtaacatctttaagctagtatatatctaaacccaacccattaggtaggcatgatttgttagtataagtacagcttagcctctagaagctatgcaggggttggaacgaaattctgtctatttcttagaagacaagagatcaatcatgaactaatgacttttgtgttccttcttttatcagagttagggtacagtattcatcttctagtttctagtacagggctgtctttttttccccaagtaagtttggtaggattggagctgatgactgagtgacttggaacacttttcaaataaactgtcttacgttaatatttcatggtagctggagatttagtaatttgtgaatcaagttgcttttgaattgattaaatgggctttcactatcctcatttagactagtgtgatactgtgaaataataagaaataatatataaatatatttttctactccagtttctgaatcagtgtttgtaaatccttataatttcctaggtgataggggtgctggtagcatcttttgttctaacattattttgttattgaccttggttcctgactcagagctactgaattctgtggaatttcctgagtgatggaaatatctattgttttgatgaggcaactcttggtgggctcctggattttggctggttaccagaatgaccaagcaatgatttgaagcttggaagtttaatcttcacctctcatcctctggggatgagaaaggggctagagattgaatgaataacaaatcatgcctatgttttgaatgttttgaagtctgtataaaaatccctgaagtgcagagaggtttcaggttgttaagcacatctttatgccaggagggtggcataccccaactctatggtaacagaagctcctatacccaggacccttttggatctagccctgtgcacttcatcatctgcctgtccatctttatcctttatcgtatcctctataataaactagtaaatgtaagtaagcatttccctgagtttcatgagtaattctagcatattatcaaacttgggaaggggataatggcaaaccccaatttgtagtcaaatcagacagaagtctgggtaactggtgaccacccctactctgccccaccaccgcagcttgtgattgacatatgaagtggaaacagtcttgtgggacttgaacccttaacctgtgggatctgtaatagtaactccaggtagattgtgtcagaactgaattgagtcataaaacacccatctgataccatagaatcagttgatgtatgaaaaaaaccctcacatttagtgccagaagtaaagtgttctgtccaggcatggtatctcacacctggaatcccagcactttgggaggctgaggcaggttgattgcttgaggtcaggagtttgagaccagcctggtaaacatggcgaaaccccagctctactaaaaacaaacaaacaaacaaacaaacaaaacttagctgggggtggtggcatgcacctgtagtcccagcaactcgagaggctgaggcaggagaattgcttgaacctaggagacagaggttgcagtgagccgagattgtgccactgcactccagcctgggcaacagagcaaaactctgtctcaatcaatcaatcaatcaatcaatcaatagaagtgaagtgttctgtgagtagcatagaggaaagaggtgagtttttcttcttcaactaatatgaaaaatttggagatattttgaaaataagaatagggtggggcatagtttgatagcctcgtctccaagtttgccaacgggaagagcattggcttcttgattccctgaggtcccctctctgaaaggagctccatttgtgtgaacctgtccatgttaccagtttgtgcttccttttggttatttcaaaaatgggcagggtaactacactccattcccccttttcaaaagatagaatagtattctcaagctacaagaaataagatgatggctcaaagcaacagctcacacagtcattcccatttcattttgggattgttagcttgtgtctggagtttgttttaaaacttcaggcctttgaaggttgggggctggtcctttctgaatgctgttcatcctataaacgatatatttaattcctcactttaaaaactattctaacttcttagtctatttggaaactgagtactgaaatgctgtgtggtcatatggacacatcgttagctgcagtcccagcactcccacactgggttcctttcatagagcaataatgtatgaggcaacctgagaaattatttcaggtatatgtgtgttgtatttagagctttttataagaattcatgtggtctgagggcttgggtgcagtgtaatcagggtggagtcttgtggtgccctggatcttcccttctcatgtgttctgtgttctagcttgcaaacgccatgaggagctgcaggggagattaattagtaattaaaatgtttaatgcttcatattattcaatgcaagtcaaacatgtaggctactgggagatgaaaactacaacatgctgatactgtgtgatgagacatagactgtccctacagactagaaactttgctgtttctggcaaggctgcttgggacttgagataggaactgggtaataaatactctgttgaaaaagaaaataggtgtggatagtggcatcttcctcctcctatattctcttaggaaaaatttaggagcttttcatgatttgctgagaaatagatttgtctatgtattggcattgtctgcttaataataactttctttgagagctatggtaaaagttgaaaccttgtagaaacctctggtatgtgatgttaagtggaatacagtaaaataaaatttgcaaaacaccattttaaaagagaaagggatcttattcttcacaatgcccatgttttacttagaggatctgtgttgttttgaattagcctgtacccgccagaaaacttcaacagttaaataacaatgatttgggggtggaggagtggttagctgactcagagttgcatgccatgacttttatgacaggcaattaatttttagatggtatataattgcatttcaataacatttatacctcatcatttttttagaagatgatgtgtttgtgtcatgcgtaataagcataatcaacgttagctttaaataaattttgttttgagtgccatgaaaatgtaacattttcagagtggaaatttagcctaaaaatctaccttgcattgcacctctacaaagcttttgcccaaaaatattcatttcatttgtcccagtgtaagagctggctctgaatgtatcttagctcctagtggggataggggagggcagctgagcagatagctgctgagtgccatggggtgttcattcagctaaagcatgggagggggttgtcttctgtggttctctagccatggtccttgtggtagcctttaactgtgatttgtttgtttgaccttgatgagtccttggctccaagatgattatgttacattacactgaatcactcaatccaacattggtttgaaaagaaacgaacaaagctgcctgttgagtttctctattttacaacagtatctcagtggaaataattagtcctatgtctatgcagaagcacacatcacatttgcaaaattaaagagtgttcttgttaggactggtttctctgtttctttcttcctctcccactgtttaaatatctattttggtggtagtgttagtatgaaaccccatagttcctttcttttcttttctgatttaaaaagcaaataaacaagaaaacacaagtctagctatgttttttaactcaagatgactagatataaccacagcaaatatgtaggattgttgtgttttaagagaaaaagccgtgtctcagataatttgtagtcattgttttgtccattttgacatctacttctttatatactttatagccaaactagagtatagtgataataaggatgatctctagacagaaggttggaggtggttaataactcatcctacatatcacaatttttcatggtgagtaactggtttgccctccacacaaaatatcacattggaatgtaactgctaaggttcttcacactatggaaaaattaccagtaaagttaaacactgcctttcagtgggtatattaattataaagacaaaactatagtttatgttgcataatttgaacatacatatttccttatgaatctgtaagctggaactattgaaatgaaatatacaaagtgagcacgtgttgctgttgagccagcagttacagttttcatttacaaatgcggacagaaccatttgcgcattttggtctctctgctttgggtcctgcactcacactccaatatgcacctaagttatggggtcatgttgaggttccagactgcagaaggggatcgaattatgtttcattgtattgagtcacaaatatttcaatgtaaagtaaaaattttggaagttttacgtaacagaatataccttacaggaacagtagataggtataaaatgacttcggtttgcataacaaagaaataattgtgatgagtaccagactgtgaagtccctgaggcaaggttatcatttgttttctggcacatgagaggcatacaaatttatttttgctgaataaataaatattgtcttcaaatctttacatttccattctagaaatatgctaaaaaagctaatctgtaatagatatagagttagcacatgacaaagttatagctgctttgtgatttttttaaaataaagaacatgtatttgcattaagaaaaataagtgtggccgaagtgaatatttttttataagagcaacctaatggtaaccaatgtttcatccaaaattttcagctatactcttatattgccttatatcacttgatgacaatgtattttgttaagaagatgatgttatcatgaggtataattcaatattatatcaattctgttactgttgagataacataagaaagaaatatcaactctttttctatattctccacagaactgaagaaaacagaggactattatgttactatttcctaaataaagaccaatatgataaattccttatattcagtgagaggaaagaagttgcttaccgaatgtactgatatatgcttccttttttcagaaaacaacaacatcaaccaaaacacctgtataattattacatgaatttttttttttttttttttttttgatatggagtttcagtcttgttgcccaggctggagtgcaatggcatgatctcatctcaccgcaaccactgcctcccgggttcaagcaattctcccacctcagcctcctgagtaactgggattacagggatgtgccaccacgcctggctaatttttgtgtttttagtagagacaggttttctccatgttggtcagggtggcctcgaactcccgacctcaggtgatctgcccgcctcggcctcccaaagtgctgggattacaggcgtgagccactgcacccggccatattacaagatttttttttttgcgtttactgccaggaagctctgcttcattaaaagaagcctctaagattcacctcttccttcctttaccaatttatttctgatacttcttgacccagtatttcaaatgtgataaatatatgccaattataaagcatgtcaaaaccaattaattgtctaaatctaagtcatgctttttaagtggaaataaactttgtgtccatacacatatatttgcctataaacatcttaaaaatatatctaaacttcggacaattttaaaaagagagtattgaattttaaatggattctttgcttatattgatggtaaacagtggatccattaaagtagcatattctgctggtgtaaataaaatataagatttaagtgggttaaaaagatataatatttacttgttccttttaagaaacaagttgaagaaacaataaagcttgaagcctgtatagtcagatatatgaacccataaagtaaatcatttgtgaagtgtcttgaactctttctaatttcatcttgatgttgtactgcttatatgaaaatgctgaaaaatgttacttcttagatactgctagaggtgctaagcttcttaccattcaggaatcttcttcttggctctctccgtcacccagccaacacagagttatgttttatttcccaaatggccaacttatgttaacttgatgcttaccaaggcagtccaagccaggaaacaatttttataaacagcatcctggatgacttaatattctatgtaatattaattttagagctttttctcccatcatctagtctagcatagctaaaattatgatgtttaactttgttgatctacagtcacttgtgaatgagatctcccaaccaggaaggaaggaaagataggaaaatcagagtggtctgtttgcagctgtgctagcacatgtttccttgagtgccttctgaaggaagagtggatagagatgtatctttcagggccattgcctttctagcattattgatcgtatcacatgggcaaaagaaaaagaaacaatagattttatgacaaaagttatgtaaaaaggggctgaaatcagtattttgaaagttgtgactaattaacagtggctttctgagaagtgagatgggattcaagacagtggccattgtgtatgtatttctaagagccatctggatgctcctttttatttgtgtttttggcttattcactcatttattcctttattcactgattactaattgaatacaaagtctctgtcgatttgttcaaagatattaaagaagccctaaatctatggaaagacatcttctgttgattagttgcaagatgtaatattgttaagtgggatactccccaatttgatatatagatgcaaagcaatccctatcagaatctaagctggcttctttgtaagaattgacaaacatccttaaattcacggatgttcaagagacccagaattgccaaaatcatcttgaaaaagatgaggaagtttccgacacacacttcctagtttcaaaactttctttcaaatgacagcaatcaagcagtgtgatattggcctaagatatacataaagatcaatggagtagaattgagagtccagaaataaaccattatgtttatggacaattgattttcaacagggtgttgtgacgttcaaacagggaaaaaatagttttctcaacaaatgatgctggaaccaccagatatctacaaagagtaaagctggactccctacctcatagtgtaagacacaaatgtaaaggataaaactatacaacttgtagaagaaaatatagaagtgaggttcatgaaattgggttagtcagtggtttcttaaacatgacatcaaagcacaaacaactgaagaaaaaatagatgagttggacttcctcagaattaaccaaatttgtgcttcaaatgacaccatcaagaaagtgaacaaacaatccgtggaatttgcaaatcatgtatctgttaaggggcttatatctggaatatattaagattcttacaactcattaagaaaaagacagcccaattaagtaagaaacaaagtatctgaatagacatttccctaaggatatacaagtggataatatgcctaggaaaagatgctggacatatttattgatcaaggaaatgcaagtcaaaccacaacgagatatcacttcacgctcactaaggtggctataataaaaaaagacaacatgtgttggcaatgtggtagagaaattgaaaacatcatacgttgctggtggattgtaaaatggcatagcccttttggaagcaatctgtcaattcttcaaaattggtcatagttaccacatgaccaagcaattatatttctatttatgtatccaagggaattaaaatatatgaccacacaaagacctgtatagagatgttcatagcaacatgattcataacagcctaaaagtgggaacaacctaaatatctatcagttggtgaatggataaacaaaatgtggtgtatccatacaattgaatattactcagccataaaaaggaacgaagctctgcaacatgctacgatatggatgaacctgggaaacattatgctatacgaaagaaaccagacaaaagcgaccacagtttatgattccatttatatgaatgggcaaatccagagacccagaaagatgagtggttgccagtggccagggggaggggacaatacagagtggctactaatgggtacaggatttcttttggaaaggtgattaaagtattctggaatttgctgcacaattctttgaatatactaagaatcactaaattgtgcatttttaaagggcatattttatggtatgtgaatcatgtcttaactaaaaaatttgttttaaaaggctctgtattgaataatttgcctagaatacacacatggcattgggagtggcctccactctgaataagcttacaatctcttggggaaaaatgcaatctaacagttatagtacttaagcgtacatggtaagaaagaagcacatggagggtgcttattgaatgggaaaaggaagaaatctacctggatgatcacagaaggtgtttggtggatagggagtatttgcaagaagaatccgactctcgtgtagcttgagaaagcagaatgaaaacccgtatctaggaactgaggaaggcagtcagcaatgtaaggtcaatatttttctaaaagtaatggcagctgaagtacaacttaggctgcctgagaagagagcaagttttccttcattggagcatttgaaatgacactctggtatttacaaggtgaattattcacactctttaaatctcagtgttctgagttgataacacatttcagagttgacatgaggaccacaaggaataataagtgtgtgtttaatgtgaaaatacaatatcttgtacataataaacagttattactgttggtctcaccaccaacatcattatcaaatgaatcttggcagtaattctgggaaaggaatttaggcaacagatgggagctcatttgaatgatgctaggatttcatggtactcccattgttggttacagaactccaagaactctcattcttggagttttctgtttcctcatataaaacttggaaggaagaacagaagaccttcattctgttccaggcccttaaattgattatttctgtgcctaaagcaaactgctcagcctcaatcatgactttgcacaatttgctgtgatacctggtatagatgtttcatttgttaaagttgttactgacaagaacctccaatgaccttggaacatgacctggcccctgtgggtatcagtagaattttggtgaacactgagaagtctctgagtttctttcaatctgggcttctttcagttggtttgcaaactggacttgtggaattagatgatctctcatgcccattctatctttgagttggtattatttttgccccgtattaaagaaaaactatattgatatttctttctttgcttttgttatttcactatagaaaattttgttttaacattcggttggagttgatgatatacaacccaattatatggatttgttatatgcaaacataaggaagtattcacaaatttaaagaccaagttcatgttgttcaagataatgtgaacccaaattcattgtgctcaggataatttggaactaatttcatagagtttaagatatattatagtaattaaaatcatggattttgggagcacactcccctgactctaaatatgtggcctgggatgtcacttaaacattttgtgcctcagttcttttatctctataatgaagaccattatagtatctatctcccaggattgtaatgaggactaaatgagtttccatgtataaagcacttgaaacagtgtttgacatatttagcaccatatgcattagaagatcttattgttagctgcgtgcttattcttaaattgtctgagttactgcttttatataagaagattgacttataaatttggcccatgatgtcccatccaactctctgaaatagattatctacctcttttcagctgggcatcttacttatgatatctgaggacatctctctgttcttgtgctttgcccagccccctttggtttctaatgcatggagccaaaagctacagctagagccataatggtcttgtcctaccatctgaaagacatgttgattgctagaatgtttctgtggttaacaagataattcctctgataagtgaacaaccttcacttaaatgcaaaaattatgactcatagattattaatttgtcacaatttactaaccctatcattggcctattgatgtaagttattcttgtcacgcttcacctacccagacgctaaagcatgtaaagcaatagttaagtttattgttcatctgattgacctggagggcttgttaaatgccattactgggctctaccttatgttttcaattcagtagggctggagtgaggctcaataatttgtatttcaagtgttgctctggtgtggaccacactttgtgaaccctttaaagcttcttgtcagtcacatgtttgtaagcagcactgtcttcctctgttctcttatttctatagctgcacacccttaaggcttgccctagtgtcaaaagtggatgctagttttatgtcttttttctagaggaggaaaaaccataacctagagaagtatctttccctgcatacatagtacattgacagaatctggaagatgccctttaaaaaaaaaaaaagtaaagatttgtacctgccattctgtctttcagaattgtaaatttatgtttattgatattaaatatgcctgtaatcccagcactttgggaagctgggaagggcggatcacctgaggtcaggagtccaagaccagactggccaacatgttgaaattctctttctaataaaaatacaaaaattagctgtgcatggtggcgggcacctgtaatcccagctacttaggaggctgaggcaggagaattgcttgaactcaggaggtggatgttgcagtgggccgagattgcacccctgcactctagcctaggtgacaagagcgaaactccatcacacacacaaaaaaacaaaaacaaaacaaataaaaattgtatagatttatggtgtagaacatgatgtttgatatatgtatacattgtgaaatggctaaatcaaactaataaaaatttgcattacctcccatatttattttttgtggtgagaaaacttaaaatctcccaacaaatttataatacacttgcatctgcaattcttgaaagaactattaggtttggaaaactagaattccgaattcagttctgccatacctagaaacgtgaatgtcaactgtttgatctctctgaacctcattttctttgtccatgatattaatacctcctctgcttatcatatatgatattgtgagaagtaaatgacacattgtacattaaagtgctttgtgaactataaagcgctatacaaagattattttgcattctcatcccagttgtcacacacaatatcttgttaaacatcatctgttttatgataggcacatccttctctctctcagctagggtaaatattgacttttctaactgttttcaggaaggaaatagtgcactgtgaactacttgccttgtgcacagaatccttttatttccctcctgtgattattttttcttttctagtctcttgctttttaaagtaaacaattaagaagcttgtcatttagccatttatgcatctaaacacttttgtatatgtgagatgtggtcacaaacataaacatatattatgaatttttctcataacatccttttatgcaagacatcctacacaccacatgtattaagaatgaagtgagttgctgttttgcctgaaatgcattattttttgtttttgtttttgacgtttgacttggaaaagggagttgagttgagccaagagcaatgggtcctcttcccagttgtgtaaccagcaggttgtgttaggtaagtcagctcctttcttgaagcctcaggtacatttgtacatagatcgaaatctagtcttttctcatgccttccactctcaatgtctgtgttctcagtgttaaaaggaagtttcagaagatgaccttcaccttgatgaagaagtccgaacagagtatccccatttatctatctctattctgctaagatacttttcttttcatgcctcaggtctgactgctctttgcaattcagcctgttgcagtgaagctctgacatgtctttcctttaggatgtgactggtcttcactaggactctcaatttcttagggcttacgtttctgttagtatgatcggaaatagaagaggccatgtcctgcctttaatcccctgggatagagatgttggtggattgggggattgaggggtggagaggcttttatatttttagtgagtctttccctttagtgattttcagagcatctccctattagtgcacagtaagaagtatttgttctttttgccatgcaacaaattgcttaaaaaccaagcagctgaaaacgcgtattttctctttgttcttggtgagacaggaatctgtatatagcttagctggaccaccaacttcttggtctttcacaaggctgcaatcaaggttttgactcagtctgcacttgtatctgaaggttcaacgggagaacgatcagcttccttgcttaggtggtttttaatttttttatatggttcgatttcttccaggcagttgcataaagtgctttagtttatatctggttgttggctggagtctatcctcagttatttgtcatgggagcctctccatgtggcatctcactacatcaaagcatggaagctgagcaagcaataggtagagtttgattacaagatggaagccataatcatttgaaacctaaatgtggaggggacagcccatcacacttaccatagtctgtttgtttgaagtaagtgactaggattagcccacactaagaaagatggcattgtaaaagaatgtgaagcccaggaattaagaatactagggggaatcttataaacctgccgatcacaaaagagagtgaggttagacttactgtccacagggatttagtgcaaatgtaagtttatttgtagaatctgtcaagtcagaaagcagaggaggcatgtggggtatcatgagaagaatagaatctggaaggagtaacaggtaatgaaaggtactaacagatgtaggaagaactccagaatttaagaaagttatacctgaatgtggtttaggaggtcttttgatctaaccacctccatttctcaaggagtccaaagcatatagagggccttactcaggccagaagttgtggctgaacaatgagttggaacaaagtccacaaactcctgacttagtacagattttcagcttgatgtaatgaatatagctctggatttggagtgaaaagatacacatgttcaacttttgatttgcctctgagtggctgtgtcaccctgagcaagtgataagtaaaggaagcttgatatatggttacccagtttataacatgaagctatcattatcatgtatattcatttatgtctgatgaacatattaacttttctttatgaaaattctttgtaagctgacatgaacagacacttctcaaaagaagacatttatgcagccaaaaaacacatgaaaaaatgctcatcatcactggccatcagagaaatgcaaatcaaaaccactatgagatatcatctcacaccagttagaatggcaatcattaaaaagtcaggaaacaacaggtgctggagaggatgtggagaaataggaacacttttacactgttggtgggactgtaaactagttcaaccattgtggaagtcagtgtggcgattcctcagggatctagaactagaaataccatttgacccagccatcccattactgggtatatacccaaatgactataaatcatgctgctatatagacacatgcacacgtatgtttattgcggcactattcacaatagcaaagacttggaaccaacccaaatgtccaacaatgatagactggattaagaaaatgtggcacatatacaccatggaatactatgcagccataaaaaatgatgagttcatgtcctttgtagggacatggatgaaattggaaaccatcattctcagtaaactatcgcaagaacaaaaaaccaaacaccgcatattctcactcataggtgggaattgaacaatgagatcacatggacacaggaaggggaatatcacactctggggactgtggtggggtcgggggaggggggagggatagcattgggagatatacctaatgctagatgacacgttagtgggtgcagcgtaccagcatggcacatgtatacatatgtaactaacctgcacaatgtgcacatgtaccctaaaacttaaagtataattaaaaaaaaaaacattaaaaaaaaaaaagaaaattctttgtaagctataaaagcctttagaaaaaaaagtaagctttgtttaaattattaatgtgtaggttgaggcaaaacaagcactcccttttgacagaagggataagtactggttcatataaatacaattttatctccatctgtatctgtatcagccatttatttctgcttgataaattatcccaaagcttagtaatgtctaccttactcacatatctgcaattttgatagtactccatgaaaatagcttaactctgttctgtgaaatgagcccatgtgcctcgatttgggtgcagaggattcactttcaagatgctttactcatggctggcagtttggtgttagaagtgcgactagagttgtgtgtcaggaccttagtttctcttaatgtgagttcctctacaggctcctagggctttcttacagcatggtggatgagttccaaggccaagtatcacaagagagaaaggtagaaatgccagcattgttatgacttagttttagaacttacacagagtgtcctttctactatacactgttgattgaggtccacctgggctcaaagacagggggttagtctccacctttgttgttggggttgtagtaaggctccagacaagtttgtgggcaagagacactgtcgtgaccatctgtgtacagtacagcctgccattatattgtattttattgcattgtatcacattttactacatcatattttaatgttttatgttgtatttgtttccatttgtggaggacttaatatctgccagacatgtatattctgtattaaagttgacttaattctcacaacaaccctgtgatgacgtggtccttctcattttcaccaacgagaaaaccaagttataaagatggtaagtaacttgcctaaggtcaaaccagctcataagtggcagagttcaggttcaaaaccaggcaatctagttctggatcccatacttttcaccactctgccagattatttctatgttgttatctgtttttatgtcttaaataatatttatgccatgctgttactaatcaccatttccatccctgtctctgtatctcagttagagaaagtgggtagataaggactggatatcagactggatagggaggaaacacatgcaggagtatcattacctttgagagaggtgggtctgagcttgtccctaagtgctcctggaccagttctaggagatctcaagaaaagaagcaacgtaacatttcactagttccatacagagtttatattggccttaatgattttgcctttaatttaataagacatatgggagtctacggaatctagggaaggcagctgagtaagtaacgatatttttaaaaaaattggaaataggggccaatatttgaagactaatgaaattcaggggcatctattctcgttccacaaaagtttagctatctggtattccatctggtgatctattcaatcaattaactcttccatattgggatgtttgtcagagtccagcttacaaattgaggaaatccacagtcacttgtgagctagtttgtatcagttattaaaatttacttatttattgtaaacttcatcaaaccaacaattgttaagcccctactgaatgcaggacactgcagattacaatcaaggggaacacagtttataccctttctcacaccacaagggacttctactgtaagaaaaagatgtgtaaagccataacgacaagaatatgtgataaatatgataatgaatctatgaacaaggctgtatggatgcctagcggaaggtgctccaatattctcctggagaggtcagagggggcttttcagagcatttaagcatatatattacaggaactggaaatgttcagcccagttggagcttagaaaatgtagggcaagtgataagcctggaaaggaaggcacgtagatatgtttctgcaaatgcattccctccttctgtcttcctgtctgccttatatacacaatgatgactcagtaccaggaatctcaggaaacaaacaacacacatgcacaatataaattcctctacaatccctctatttatcctcagtgcaaaacctcaattaactaatagctcatctgaaaactgtcagggctagaaagtcccataacccctcaggataaaatcacaccaaccgtaagttacttaggctctccaaggtcagcctccttttatctagcttccctctttttataaagctgcgggcctgtctctaacaggatcatgtggtaacattcatgatttgcaagagctttactgctacaaagcacatttgcaatacactgtctcttttttttacttggcatttgcgatttaattgttaacccacctgatatatagtgaaattgtggcccagaaatgtgaaatgactgctcttaatttttacaaaaataaaacaaaataatctaatccttaaagtcgtgtcttcttttgcaaaatcctagtacatttttagtacatcagttgtgttccgtagctggggactctgttcaagtgaaccttaataagaagtgtgatgtataaaatggcagagtttgaggtgttctgactgaaataaggagtctgggctctggagcgtggctgagcatcttcttgctcactccagaaacggccctgaggcttcttcatgtctagtgttgtgaaaaccactcaactgcagtgtgcttattacctatgtctaaccttggagcactcagaaaagacctaatgcttattttactgtctgaagtgggaagacagccattgttaacgtgggatctcccctagcattctccttctgatcctagcgtaaattcctgtggatcaaagcccagcccctgagactgtaacagagagaataaaagaacaagaagatggtgaaggcgatatggtgtggtagatggagcatgtgaattctcctagttctgcttctaactcactttttgatttttagcaggcaagctatttcacttctcttgtgccacggtttccattcataaactagggaactggacttcttgtctcctcaccgtctgattaaaaacattccgtggtgattccttttcttggtaagacacatagcttagtccacctcaggtcccaaaaggaggatcaaccttagtgttttacgctctctaatatgacctcttgcggtcgatgttttagaggtatctatcatattgcatggattgagggagtttgacctgttgagctgggcgagttatcaccatgcagcacttcaggtgcttactctctttttatccatgcattggttcattggattcaaacatttcattagacttcctgccttcttttggggggatattttgaatttggggataataagtttagaaatctttgggatgaagaagaggaaagagaaggcagaaaaggagggccatgactataacatttatcagcaactgtgcctcttccagaagaatcaggatggactggatttgaatataaaaagtaggaagagaggcaaggcagaaactgggagaggccgcagatggtagtgattgcagatcctttataaaatgctgcatgtttcaactttcctctgcccaacactatcaagtgagatggatccttggaggtctttgggtccagtcctcaaggaatcaaaattacatctaggtagtaggaataggttctagtgttctataccacgtgggataactatagttagcaataatgtgtgatgtagtttcaaataactagaaggcagatagttaatgttttcaacacaaaggaaatgataaatatttgagatgatgaatgtgctaattaccctgatttgatcaatatacattatatgtatggaatttcactgtgtaccacatgaataggtataattatttttaatttaaaaaaagcagtttctcatgtaagctggatgttgctggatagtttaacagaagtctgtatagccttgttgtattttaatcattttatctttttttttggcctggaaaatattaagttagaatggctgtgctggaatacatcatccccacctgtatattaaagctctgtgttatttaaaaatttgtctaagaaacctataaattgatggagcctcactgtggtggttctacttctctattttgtgtgtttgtttgtttgtttgttttttggtctggtgccattgagccactgtctataggaataaaaggatgttagcatgactgatagttcagtgacctgtaagtagcgattttaaagaaaaattttataggtctttgttagttccaaatctgactacctgttaattctgctttatagtcatgctctgactttaccatgaaggctgtagcattgtgctttatctccttgtctccagagtacaagatcttggtaagagaaaagagtgataaacccaaaaaatacaaactcagtttacctgagactgagtagcacagaggtctccactaccactcatttccctcttcacatggcaatggaacttttcattaaaaataaattgtatttactcatgtatattcttatgctaaactgataccctttttcacaatggataaaacaacaataaatgtttgcagcctcgcacatcaattctcgaaccctgttctgcaatttctggcaataaaaggccttgcttagtgtgcattaaaatcttggttctaaagtcagtgtctactttcatagaaagtatagtttgtgacctctgttactatattttcaccagcaatttgcacacttgtcatgaggctttctctttgtatgggtcttagataatgcagtatcttgacatggtacttctatggtaagacaaagaggatgctgtttttgtattaatgcgaccaaaatatttcaaagccaatcttacagaatccccctattggacatcccccataaattttttaatggaacaaaacccctctgtgagaaataacaatttgtatacgatttcaaaggcataattcaaactatagctgaataagaaaaataatacaggatctaacaaggcaacacttaatgaaaaatcaagggccaggtgcagtggctcgtgcctgtaatcccagcactttgggaggccgaggcgggtggatcacaaggtcaggagatcgagaccatcctggctaacatggtgaaaccccgtctctactaaaaatacaaaaatttagttgggtgtggtggcatgtacctgtagtcacagctgctggggaggctgaggcaggagaatcgcttgaacctgagaggcggaggttgcggtgagccgagatcacgccactgcactccagcctgggtgacagagcaagactccatctcaaaaaaaaaaaaaaaaaaaaaaatcgaacaagtctttggatattaaccatagtgatcatgccctaagtatgtatttactttaggtaaatcttagtaaagcaggaattagctggttagctgcacttactggctttaggttgctggttagttaactggaaaggctgttagtttagaggtgatacgacacatagattatggtttaaaaaggttgcagcccttatttctagaatgtattcaatggtatctgtgctgcctaacccatagggttatgttttaaacgatatgatataaatgtgttatactacattttgaaacgttagttggtgtcactatatcttttggcaaagagtctccttatgaacttcagggagcttgtttctacagaaggagtttggttcataagatgttttccataagaattatataaatttttatataaaaaagtagtgcccaaactattaactcatggagagagatcaaattctggtctttttaaaattaagctctattagtccattttcacaccgctgataaggacataccagagactgggaagaaaaggatattttattggacttacagttccacatggctggggaggactcagagtcatggcgggaggcgaaaggcacttcttacatggcagtggtgagagaaaatgaggacgatgcaaaagcagaaacccctgataaaaccatcagatctcataagacttattgactaccacgagaacagtatgggggaaactgcccccatgattcaaattatctcccactgggtctctccctcaacatgtgggaattatggggtaaaagtcaagatgagatttgggtggggacagagccaagccatatcacaagcttagtgagaaacctaattgcttatatactatctattattttcaaattcattttaatattttggattcttatccaactaagagatatagggaacaaatgctgtaataatcacccatctgtaaaatatggaccttctcatagggaacttacgttttagtagggaaaatataacatatacactaatagagattacagagtaggaggtcctttacagagtaaaaggagaatggagatgtacagtttggtgtgtactgtgggttgaggaagattgtgtgttgcggaagatggtgacagctactgacgagtcactttctgccatagagatcaattttccattggtcaattgtggacattcactaatgtaggttggagtgatgcttcaggagcagacatggcataaactatttcaggaaaccataaacagcttagctttatcttcagagtagggtatgaaaagggagagaccaatggtaaaaatccaaattagaatgatgtgatgccatcttggaggcccttgtaagtcaagcaaaggagtttgtgcaaaaagtttgaacattaacaacaacaaacaaacaaacaaacagaaaacagaaaaaaatattgcattgtatctgtgggaccttcccatccttaggttttaattttcccctctgtcaaatgagagattttacttgataatctccaaaattgtgaccagctctaatgttttacaattcccagaattattacatcttaacttctccctgagaattatttactgatcacatagtagaactgaagtgatttctacagtagctctatagctagcaacccagcattggataaactcaaggaatgaaaaatctagtgtgtgctggggttgggagggtagtcatatattactgatttaactgtcatctggaaaactttatgggaactaagtagaggatgccataaggaccattaactgctcctaagatatgatgagcaaagactggagaataggagtgggcctagtctacagattagttttctattattgctgtaacaagataccacgaaattggtgtcttaaaacatcacaaatttcttatcttacagtgctgtaggtcagaattctagtccaggactcactgggttaagatgaaggtgtcagcagagcttcgttcctttctggaggctctagtcatagtcattacctttcccagcttctagaggctgcccatatttcttggctctcggactctgtctttctagtgacattgcatttctctgaccactctttcatagtcatgtctctctgaccacagctgggaaagattctttgcttttaagaactcatgtgattagatgaggctcacctggataattcaggctaatctccctgtctcaaaatctttaaccttaatcacatctgcaaagtctttgtaatcaacatgttcacaagttcgaggaattagagtgtgtacattcttggcggggtggggagggctgttcttatgcttatcacagtctgtttttaggaaagtagataagttcacaacgttaatgcatggaggctgagattgtgagaagaaatgaagcagccagtcataaagtgtgtttcgtgctaatgtaaagagttctgaagttattctgatggccatagagagctattcaattctacctagtagaggaatatttaatctataatgatgtcaaacaattgaagtgggtagcttgtggtacccaaccatccttcgcattttaaacatgggaaaatgaagactattttttgactcagtatacttgggacacatattagtgccatgtacctatcattattttcccatatcatgtgtttttctaccctttcctcctacttgtttttcctctagcctgtgagaatgccattcatgatttataatgttctgggtaaaaagttcaggtagacctacattaagcaaaggtaactcagatttggaagactgaagcttggtagcagggagggggttacttaggacagagagatgccttggaatggccgcacattgagctcgtgcatgttggagctggcattacccatgtgaggaggtggatgacctgtctatatattcaacactagcttttctttgagatccccacaaaacagatctaggaaatctaatgaaagaattatccctgctacaccgtgtttttaacataggaacggacagttaacttgtgtgtttgttcaagaatgattcataatgcagaagatgaactggtgaatagaagaagcctagtaaattggaagattctcttgatgaaacagagaaattgagatttattattcagtcacttccaattacactgttgtgttgcagaggaaagcagctaaacaggatgttggctggtaacaccagcaaagtggaatcaacctcaaaggagatggtgtcagagtggtgttcaatgcctgagcttctaccgagtgagtcacttgtgtgaaaatgtcttgacacagatagaattgaggtgcccacactatatctgatcacagaaatgttaatgcagaatagcaaactggctttcatcttcatgggattgcaggctgggggataaaagggggtgcatttttaaaggtcatctctattgcttatgagaaaacaatgtatcacatcccatgcatctgtgagactgtatatcaagaatcagaaataaatacatttgaaggaaaactgcaagttgtttctcacgtgtgaatttgatgcttttttttaaaaaaaagaaagattttctggaagaatttagcctcctgaaaacttgtttcttctgtgttgtagttgataatatctaccacccactgtggtgcatggagaggaaaaaccttctatcccctactttatgtgttattgatgtgacataatttttcagaatagccacacaatttcaaatgtgacttcttttctaacttgcaaatagagctgacaacagcaagatatgtcctgtaaacaaaccccaaaagaatatttttgaacaagttgtagttcaatttataccagattatggaacactagagatttacagtgatgcgttcttttatttagatggaataggagaacccatagagttgaagctgtttgtctgaaggtttgcagcagatcagtggctctgccaagcctgcaactatcatcacctgactccaagttactctctttctagtccagcacagctgcctcccaagtttaatagtctatgactcacaatccaaatctatggtgacatataatattttactttgattccaaatcaacaagccagttttagaagtgcttacactgctgcattactttttatactattgggttcttcaagttgagtcttatttctagaactccaataagaataaccagaggagtcatttattttgttattatgacatatttattgaagacttattgggtggcaagctgtcttatagagggtgagggtacagctatgcataaaacaatgtgtattttcttaaaagagtttatattactgtgggagaggcatagtaaacatgttaggttctatagagaaaaataaagcaagataaaagtgaaagagtgctttgggttgagtggagccatagttgctattctgcacaaagtggttaagaaaagccttaagaggaagagatatttgaggagagatctcaaggaggtgaggaagtgagctctgcagatatttgggataagcatgttatagacagagggaagcacaagcgtgaaaagtctgagaagatcatggctggcatctggcatttttaagaaagagtgaagtagccaagggtgcctgaagccaagtgatcccaaggaagtgaggaaaaataaggttagggaggtagcaggggccctcatgatcacatagaacctcataggacctcttattcttagtttaagtgagatggagagcatttggagtcacattatcaggcttatgttaaggatcactcaggcagctttctgtaggctatgtggtaatccaaaccagaagtgacaacacaaactagaaattacaatcaaactcaaaatgatagttggttggacttggtaggtatagttggtgttggggaggggataagaagtagtgggattctggatatatttccattgcagcctcaacaactattgtgagcagatcagatgtggaatataagagtaatagaagagtcaagaatggctcctaggtttttaccctgagcaaggagaagaatggaattgctatttagtgagatttctggagacaggaagattaattttgcttctgtttttgttgtttagaagagaaaggagaaaggatgatcagccatttggctttgaatatgttatatttgagctatcttttagagattcgagtattggttgagtagacagctgtatatttgagtctggggtacaagggcaggctcttgacttgatataggtgtaggtgtcagcagatatacatttagagctttgagcctggatcatatcacctaaggtaatggaggaagccatgaatattttgatgtcatggagaaaatagaggaactattaaagaatgcttgggacaagaaacactgaggtaggaggaaatgcaaaggacagtggtgtccagaaatgaagtgaaaaatgtgcttcaagagtgagtgtgtgatcaaggtatccacaccattggatcaaatgccatgaggattaaaagttggaccaatggatctagatcttagttgaggattgccttgataagaacagttatcgttactcttctgagctatttgctcacacttgccttactttttgtcaaagtcgaggcccctctaaatattggttaaatacaagggctctggagttgccctgtctgaggtcaaatcctagtttcatatttactagttgtttgagcttggaaagtttaattaacccttctgtgtgcttcagttttttttgtttgtttgttttacttttgaaaggaaagaaatgatatgttttgtctcataggtttattgggaagattgcaaaaattaaacatataccatagtgtctgtcatatagtaaattaccaataattgttagctctagtgattaagaataaaatgatcactaacatctataaaattacacctgacttatatttccttcttaccctgaaaatcatacaaactctttctagagttgtgcttgagtcggttgcactattttctgcctttttgtttttttggtttgattttttttcagtttttttaatcattacatgaattaacctcattatgatctaattacttccacatagttctccagattgtgaatgctctgcgaaaccatagcttgttcatatcttagaaccttatgcaagggttggcacttttggcacttcaggcttgaaatccaggtttctgaatgccctggtgattgattgacatttcaccttcaaggtcattccaatacttaatgtagaagtgatagggtaaactcttaattactggaattacctataaataaataaatgacttaaatttcctaaaataatagttaatgtcttgttaatctgagttccttttctctgtaaattatttcacaggcatgaccctctgtaattttctcaccttttaaagtgatcctgaggtatatcatgcaggatagttgacctttgggattggtgttcttgccctacggtagatagctttgtgaagtcttccctccctttctatttctgggacctagaacttaaaatggcctcttatgttgaattcttctcattcatatttctataaactcaaataatggtgcctttaacatcttcagacgtgccttcatgcgttacaaaaaaaaagatggtttgatatttgtttcctttatcttctttgaaatgcacgaataaaggtaactatttacaaacctgaaataaagcaaaactgtgtttattagattcttgaaaagcggttttgcaaatctaaatcaagcaccgggctaggaggactacattaagcaacaacaccagcaatgagtggtatattttaggaactgtgtccatggacagaatgagatatcatgagcaaatatctgttgcaattcctgtgccaattcataaatggcaacagctgattcttgccttgctcacatagttgtagtctggatggtaaaaggtaatattttcaactccttggtttactttgtcaggagtaataagtttctaataaagaagctatatttatacttctcacctagcctctctctctctgtgtagtccatgccacaaacactgtacattggctaacatatttgtctgagtaagggtgagagacaagaagaacatgagggaaactagaggttgtacaagtaaattctattgttgctaatgccataatttattccagatattatctagtcccagaatgtgcatatgaatgttctggcgctctcttttctgtacttgtaataaacaagacatcagaagacacaagagttgagagggcccagtttcagtacctcttgttataaatcatcaagcaggtaaagagaagatccctgatgttatcagtacttttgagcagaaagcatggatgttatcagtatttttgaccagaaagagaatggatgttatcagtatttttgagcagaaagcatgcgtgtttgtacaccttcttgtttactccacataggcactccgacaaaatagtatctctacctcaaccagtaagttccttatctgtctctgagttcttttgtccttctacagaaacaagagtgtttctcttaaactaactccctcattctggataaactgatataataaaaacaccagaacgaaaacgcatgtattcataccatactttcccacctcactgtgctgtactctgtagagttcatatcctctcttcttttacacctcttcagtgagctctataattttctagctcttggttgtttctctgttcgtatcatctacctgcaatgccattcatcacttcctacctgccactctcacccttcattttttacctgaggagctgcctcctaccccgtatgagttgctgtacacgtttcttttgacacttgtcacatatataccctgttatggttgtggtcagctgtgtagattcaacttccttgacaaggctggaaaattgtgaattgtaggaagtgtgtttgagtgtgcttccgtttctgggattcccactgtgtctaaccctgtggtatctggcatgggttaggcaatcaacaaatgtttgctgaacaaatgaaaacaaatgggtaaaaaactcaaacctttaatattcattttttaagaaaaatagtaaatagcattaccatgactgacagaccacagttaatttgccatttctacctcccacttgctgttctcaaaaaaagtggaataaaaccacagatttgccaatggtcaaaagatgaatctaaagggcaatgatgttacaacttattattaacttatttcatttctgcctaccaagaaatgtgtatgactcagcttttgtccaagcagcactgcttttgttctattttgaattcgtggtggaaaggatgagtttttgataaagatcttgacttttttgtatcaaatagaggataggacggtattatagagattaggtaatgaaatgcatgggttctaatgcctgcactgcctctacccctgtctagctatatgaccttgaacatttccttgcctctgtctaggccttagtctccccagatgtaacatgagggagctgatgtagttaattgtcagtggctcttgcagccaagcatcctagactggaattctaggtgggattcagagtaattccttgtgatgacatatgactcaaccttcagctgttaactggctcaccatcgtgacaacaggcaccagattattcacacatttttgaatatttgaattgcataaggctgctcaatgatggtgaaaattgggtcctaaatgttctatcagatatatatgtagtgtaacctgttcaggatctcgtgtgagtgtaaaatgatgtgtgaaatatgcaccaagcaagaaacactttgcacattatgataaggcagtaatacaatttgatttttatgagttaaagatgatggtactataagagctctagttatatgaagcctggaactatagtatgtcttagtctttatagaaaggaaaacaattaaaaatgttgtttctcactcttgtatttccgtgttcgtagagtcaatagtttcactcaaggcaggaagacaagacctgatgttagcccctctgtccgagtcattcaacacctcaccccctccagttatatttatatttatacatattttattattcttttactatgccagtaccacaatgggaaatatgtttacttttaaaaagctacccagaatcctccaatttctcgtccgagaatataaaaacacttacctcacataaactcacttaagaaaatgtgaatgtaacactgttcccccaaaccgctttcttctttgaatgccagcttttcacatagcagctttcctgacctcctacttccaggacctcagacccctctgtctgtgggctggcacttggaatgtggctgtccacttggcaaagtggaaagagcttctgttctcactgtggcatctggggcctcaattctggttccaccactcagcagctctttgaatgctaggaggatatttcacttctccagatcctaatctcttcactggtaagagaggaataattatatttactttttgacatggctagaataattacagagaatgcatagagagcatctaacacagagactgacaggtagtaggtgcaggtttacttccccttctgtagatggtccagggtctctgacgcatctctgcttcttcactggtttatctctgtgctatgctaccaccaaggagtcgtctatgcacagataaagagggaaaatggtctgcagtcatcacttgggattctatgcaattcagtgaggtctcaaatcactactcaacaaccattcagcagcaatgcgatgtcaatgtccttatctgtttctcatgctactactgtttcatatctcctacgtaatgtagtttaggagaaagagtcatgaagtgggttccagtagtcctggcttccagttccgattctcagataaacctactctttgacccatgccaagtcatatccttccacatatttaaatgacaatcctataccttagttctctccagagatacatagattgttcaggctgatgcacttatgctttgatttactggatattcaagtaatgaagcctatctttttctatgttttcttctttttatggaattcaaagtctatgtgttcttgccattgcccctgaagtagtaacatttctgagcctggctgatctagaacctctacaaaggctgtccttccttcttgataataagtcagtgcatttacctaatatctgggagtttacaaagtatcttcatttattcattagtattgaagtctcagtagtaactcctgaagatggggattcttacccacattttagagatgaggaaacaggatgggagatgaaaggatgttctcaggagtcccacagtaggtgttagttacatagcttggatttcaagcagcatccttctcccaatcccaggtcctggcctgaatgtaaatgtgatttccaatccaagtttgaatgtctgtgcactcattagtccctagacaaatctggtttttcttgcatgagaatgaaattgaactttcaaacattttcttaagcctgtaggatctacattctcttcattttctaatatacttgtaactttaaattccttattaagcccgaaggatatttcacttcattgtagaaatttaccattgccattggcttctgcaaaacttggcagtgaactttttttaaaaaacgtggccattgagagtggtccccttgatacttgagtgtgtattgtcccaaacattgcctcaataggtagttactgtagaagaaaatgccgtagttttaatggcagccttgaattttctcctctctcctttaatggaaatccattctatacttattaatccactgagcttgtcagtacacatccctgtcatttctcaaaaatgtaaggaaacagcatgtatagaacaagcactggactaaaagtcggaggagcagattttagaccttccttttctaccaattatttggaatgtggcaaatcgctttacttctgtgaacatctagttcatgttttataaagcattgaagtagatcatttctaaggttcttttccaccctatttggtaaattgtctagcatgttctacttcccacttgattaaattactctgcttcattttttttaattttgcaaggaaatactcattacatataaggataggagacttcacttatttccacagatatttattgagcactgactatgtgaaacataattaaagtgtaatgggcatttggaggagggagacattccagaagaggaaactgttatgagtaaagataaagcagtttgaaagtgcactttctaatgagaacctggagattcatggagaatttgcagcgcatggacttgtgagcagttggcgttaaggttgagaagagggcagtgtggactgaatgtggaggcttctacagtgtgtactatttataatcacgcacacacagacacacacagacacacacagacacacacacacatacaaacacacacactcatcccttttcagggtctcctgacgacctatactgcctgttgctctttttacctcagccagcaaagagataaattgtcaagattaagtagatctgaacatttgagaaggagttccataaaaaagacaatgaaaatcaagtgtaccagcatctttaattcatacaaggatcattttcagtttaacagtttatctccgttgttggttgtgacttcctgcaggacgtgacttttgatatattcattcttgaacttccaccaagcacagtttcaccatagttgatgctcagtaatagatccttatttgttggactgaattgctgcctactgaagtcaatcctagaaaggagagaagatagcttttttacatagaataactaggaggggttttcttcttttgaatgagctaccaataacaaaataaaactgcaatgaaagaattgacagcctggatctgtaatctgcctgacctgataattgtaaaaactgattactgtgtcagcctgccagatggatcttctccttgaaatgtaacgtgcggcacttctgaatgtgattcaagtgcaagcttccttttctctccccttcatgtttgttagtttgggaaagaagcagttttatttgaactgaacccactcattttaagtgtgtttaatgacagcagtatgtgacagataaaataaaatcctacggcctcgtttgatgtttagtttcagaccttagtgaaaggaaataggataaaacaatgttgttcaaagggagaagttgaaaacaaatgatttgttattacacacttagccatatctctccagggaaatttgggaagtcaaataatataaacggtaataatagtagtacttgagatttgtggagtgcctagcagtttgtcgagtggctttatgttcattatcacatcaagtctaggaggttgcctggccagaaatcatcatcccactattacacacacggttgagtgagttacgctaaatactacttctaaaatggtagaactgagcctcactcttggtcctgttgattttgaatggaatagttcctctaattctctgtgctggctcaccaaccaaacatgtgtgcagtacattggaccacgttgtggaaccagcctgttccttaactttactgaagcatatatatgctggcaatatacaaataaattatcacaacggatttcagcagtgagaagtatatgaagttgaacataacagccctccctcagtacccattcattttctcccctgccaaccccaactctttttccaaagagtaatcaccattgtctttttgttgtgcatctttccaagcatgtatctatacatttatgtatacatttacatatatatgtgtgtgtgtgtgtgtgtgtgtgtggtatattatctatttttttcagttcttttcctctggatcttttcatgtcagtaaaaaggatttgccatactatttttaattctgtatagtgctccatagtgtaagggttcatcactgagtctcttttatagtggagagcttcagcttttctttattacaaacaatgttaagatgagcttccttgcatatgtatctttgtgtacatgtgaatccagaattggaattgcttgtgtttttttttgttttttttttgtttttttgagattatcaaaattcagtgtgggccatcatcgcaaatgttagaatcctcatcttagctcatgttatcgacctgggtttccacttagttgcttggggatgtgttgttcagaccaagccagacacttctctaaacagacacttgtggccaagagagtaaatgttggggaagttattttccatggcactgtggtttgaatacaggcactcaccatggaagaagagtagggtattcttgtaacagtcttgtttacttaaaacagccacgactcttcgctgagatagaataaggtacttaacgcaataaaaataactaccataatttaaaaatgcaaatgtagcaatgcactaaaaaatacctttagcttattttttgttaagaaacaagtgttttgcataatcagactttaaaaaatataattgaattctctatactgattctatgataggaaggtccagagtcaggtccaccttccatgccatactccttctttccaccattcgcagctggtcctactgagggtaattagtaggggataatatctgaaaatgtaggtatgtaagagaatagagctaatctgcctagcttttatgatattacagatcgcagaggagcatcctcacggataattcccaaatcacagataatgtgttgttgtgctttataagcagagagacacaaaataaactctctcccctatccttctcttttatttatttattttccttctgttaatagatttagtcattttttaaaaccataatataccaggatgagccagaattatgtgtgtctaagttcttttaaaataaagaaatcgtttcttgggtctgttttagttaggtcctttcaggttgcaggaaccaagatgtgcttaaagttacctcagatgactttagatgatgggaatttatggtaatatacagggagaaggaaggaagtccaaaaacccatgtcagcaactagacaaccaagcctcatggagacttggaatatcattgaggacacaacagcagctgattttgtcattcctcagaaataaacatccagtgtttccttgtccggtgggtctttgttggacaaggacttagctttcttcaattttccttctgttttctgtggcagctcctgttagtgattctgtttagtcttcttctgaacactaggatgttcgttatatgatgtcctcctgcctcatggcctcctcatcctacgccgtgtgtctctggcttttgctccattccatctctgctcccagcttttctttttctgtatccttacactgaaaagcctgaaccaacaggaccattattttagctggttcttctccagtacacatggaggaggaattcttcctccaacacagctcctgggtatctagtctggtttgggttcaatgtctgatccaactagctgtggccagagtgcagaattacctgttacaaaactgtggcaatgtagttattaaaacaagcaactttttgagggttttgcttaaacagagtggttggtgtggtagagacaacattgtatgtacttctctatcacagagagaaatttataaagtcaaggcaaaccaaatatctgaggctgggacttcaccccagatgtttgcaagtaaacaagttgtggaccttagagatccgctcctctcactttctgactgcctcttgctttggtctgtagaccaatgttccactagtatttagttttcattctggttttaaaacggtttatctgtaaacctgtaatttaaacttctgataagcaaaactaacatagtaatgagcccattagaaagcaatcgtgagatactattagactttgataactttcaagaagctttattctatttttgcccattcaaagctaacatttttggcagttttaaaactgaacggggtttttgttttttcctaaatatgtttgtctgatgtatattatatcttattatggcaaagaaacttaaagtaccaaatagaatgaagacatatttgatattaaaataatgaaaaacattcaatatttgataacttcagagagactttgactaagcttcaaggttatttttataaacatgtactactggacaatgtatagaagtttcttagctcacagattttcactttggtagatgaggactaatgtgtttgccagaatgtgcacctcttctctatttaccgtaaagagaggtgtgggtaggagattgcacagtgtcacttagggcttagaggtgagggattttggaatagcttttagtttaacctgcgtgtgagaaaagaaggtttcatcgtgtggttaataggaattttcatatgataggaaaaggattaacaagatttaactttatattctcaataacttcccaattaaccagtgtctttgatgaggaaaaatttgaaaattatacagttgtgtttcttttcaatcttcccttgcacgattacaagacgatggaaaagtgcttacactttgattgctgttcctaataaccatgttagaatttcacaggtgatctggaatatcatatcttgactttcatatgtgggagcaagagtcagcaaacaacctttctgtgcttagagatgattttatacataaaataatattgttttgaaaatgaacattgatgggaactgtgtcatattttctgtatcatatttcatgttagctttattagttagctctcattacctcaccaaataactcagatttaaaaatatgtatcttaactgtgatcagcctaaggactctattcgatgatcaagtcatagtcaaatcacagtctcatctcttaatgtgttcctttgatcctcctcccaactctccctccaacattcataccaaatccttggatgtttctgcttagttcaaaaagccatgttctctcactatgtaaattataccaagaataccactaatcatatacgagaagctaacaatctatgcttgagttgtgtgttttttaatatcatgctttgggatatgatgccaaattggatctccaatttgcctttaattagtcagcaacacttatttaatgcccactaagctcagagcaaggcttggagggtggagaaggggagtaaggagatcgaaaaacaaatacactatcatttccagaatagttacagtatctttatgcatacagaaaacagataaatgaaaggatttagaaaacttaaaagcaaaatccaaatgagtgcaaattggtctgatacaaactgagctatataaatgcaaagaggatgcaaattataaaaacttgaagagtttaaaattgctatctttctacttttattttcataatactttgccatgagaattcttagatctcaggacaccatacccttcagtgaggaaagtttactggttcaattgtatgatttagagaaacaaacctaattcttagcattttatgggcttctgagagatgacgctgtaaaactttttgagtctctgttaaacttttctcgtcattaaagcttttatgtaaccttgaacaagttccttaacctctctgcgcctcaacttccacatcattaaaatggggatgataataggacccatctcataggattgttaggactattaaatgtattatactctattacttgtatcctataaaatatctttctcacagtttaatttcttgaaaattgaaacacatcctatgattgatgtggtaagaaaccattgtaacacatattaagtgacacctgttggttctttgttagtaggttagtagggaaaaaaaaagatgcagtttatagtcaaagccgtgtgtaaagtgtgtctaaagtgcttaaaacaaagcctgtcatacagttggtcttatagaatgatgctgttatcatcattgcctgaataccatatttgtggtatgtaaaatatttgtctccaatttcactggcttctgtcctatgaagcagatatacttatagttcctggtctttgagtaaatagagcctagaaggattatcagatattacacaactgccaaataatgacttacatcaaaccaagagtttattcctcttctcatgcatatcaacacctgtttaatctgatcatgttttcaaaaacccactagtgatctatttatttctagctatagctttcatcacctgtatttggtgatttgttgctggcagagtccatactcataacactaaatctgactactgtgattacaacagtctttctaagttagataccactaatgatattgattagggagaaggcattctttgtgatcctatttgcacgatctcgggtaattcacttactggacccaattgttagttgtgaaatgtgaatgttgaaagcagtgaatcttccagctgcttgatttgtgatatcactatcaatttacctactgaggagcttcatataaattggtcatttgtagaaagtagttcagtggctgagaatctggcataatattttatttttatgaaatttcagtaaacattattgagcaacttgtaggtttcaggctccacgatagggatgcaagcatgtaagacctctgtccagcaactgagaggtaaaactacaatgagaaagatagactggtaattcagatttatttttaaataatagctttttgagatataatatacttacccttcaatccactgactctggttttaaaggagatgattaatacattcactcaaccgatattgagcatctgatatgtgccagagacttcctatgtgctagggttatggagattgacaatagttatacaaaactgagcctgtcacaaaatgtgtatcgacagacagtcttccatttggtgctatagaccagtactcagggtcagcagagggtactctggaagcatattcagggacaaagcaaacctagtcttggaagatctgaggaagtttcctatgatcatgtctgtctcctgccataacaccctgaatgcatccgatctgaactaaactgaggtctgacaaacttgtaggagtttgcgaggtgagtggcttggggaaagtagagaggaagaagtttttctggaagagaaaagaaaatatgctgtggctctgaggtgaatcacatataatgcacaatagcttagtattgtgataacatttgggactgtgtgggcagacagtggctgcagggcctgaagggtggagagggggaacttacgcttcagtaggggtgtatatgtcttattatgaggtcacaatgaagattgaggtcagctagaggatgtgacattcgagttgggtcacaaaggatgtacaggagtttttcaaggctgaccacagtctaggcagaagaaattgcaattgtgaaaggaagatttgcgtgaaagaatggtgtttttggctgagtgaggaatttgaagtatctggaaaatggagtaagtggcacagagaaagaaaacagccaaataataataataataataataaattggtgagggttcggagagccgcttacaattggattcggtgcaatgcaatgactttatatgttctgtaccttgtccttgtaggcagttgcaggcactagggacaggagtctggggggaagacaggagcattgaaagtttgaggaaaaaatgagaagcatgctttagaaagataatctgaatatacttgaattggaggggccctggattgtgaatgaaaattagaagtatgtcatctgtattgtgtaggatagtgcttatctacaaagaattttatgtagaattccccatcagattaaccctttgcagcaatagccaattatttctgatattaaaaattataattaaataaaagatatggattggtaactaaacatttattgagaagttactgtatcacttccacaaatcaattcacttatttttcttagtaatccaatgatgtagcctgtcatttctcccatttttcagcagaggaaattgtggcccagaaggttgtatgtaactcatcgaggcactaagtggcagaggtcatgtttcagcctcggccatctggctccaaagcctaaatgtatgaattggccactaaaggcacaactgaaaatactaacagtccctgtgttagtgaagagggatatttggcaaaaagtttttattttgcttttttacaattcagtgatttgtaatttatttacagagtcatgcaatcattacctcaatttaattttagaacatttaaaaagtccatgctcatttgcttcccattctcactctaaccctagataacctcaaatctactttagtggtagtcagtttgtatgaatggcaacttcagtttaatggctttttttttttttgagtagtcacaatctgatagccttaatcactaattcaggagaataacattgtttgaccatatcatttctaacttctgcatgcaattagtgtactctattcataatttgatgcagagaagggtaaaagtgacaggccttgtggcagtcattggtcaaaggcatatgagtaagactgcctgagaccctaccctggagttctgtcttgcaggtaaggcacatagacaaactattaagcaatattggagaaagaaattattgtagaaatcctgatgtttttggtgaatggcttatgttaaacttctctctcctggaagtcattgaattgtttttaaaaacttagtatgtatgaagcatttggaatgcttggcattttgagaataaaatccacatcaatttaaaataaaataaaactccccatccagaatagagtagtaattgcaaggcataaaatagcccagctgtggagtggcttaaaggacaattggtctcaggcagagagtaccagataggacacgctacacaaaggactgtaatgtctcaattagtgtacctattgggtagcacatatatctgaaatggcttaaaataaaaattgcaaatgcaccagatttaatcaatcttagtatttccttctcttatgctctcagtccttagttaaaaataaaatttgcctgcctcattctcctgtgtgctagctagtaggattaactggagttctcaacaggaaagcaatagatctagtagacgacattgtatggtgggtgaaagcccgctagagataattatacagtcactcccactatattacccttcaaagaaactgagcctaatattctcctcctaagcaatttaaccaacttctaaaaaaaagtataagatattatttagagaatgaaatagctactgtatataatcaggaggaagaattatagcaaattatactcatttgataagtgtataaagagctacgctcaaagctttgtattgtacctcccaagtaattgttcagttgtgctaactgtccttaaaaaaggagaagagataaagaactgctaaagaaaaaaaaatcaatcattatacttgttcaggaagattttccttctgggcaaagattaagtcttatttcatgctccatgaggatcaagcacacatttggccctcccatgtttagtagtggtgatttctttgcctttctcacattcatgttcatgtataaacatagacaccaatataaaactaaatgcaataaaagtgtgttttaagatctaccacatgtatgtcctagtaggtatagatagatgttatatatctgtgttcactgcacttacatcccaatattttcagaagataggactgtatgcaaatgtttccaatatctctttctaggatcacaaaaaaaaaagaacccctgaggtctttctacttgtttcaaaaatgagctggtagtaatattagagccaatttccttttggtttgctttaaacaaaataaacagcccattatgtaaactgtataagacttaagtgtttgagcacttcccttagagtttgtaagtcttatgcccccaccatcaaaaagtaaacaaataaataataaaaagccaatctaattgttattatgagaagtcatacagcgtatttgctaagagcagctcctctaaagatgtcagactgccttagatggaacactctgtatcctccgcttgccagctgggtaacattcaacaggaagcttaatctctccatgcctcaattcctgacttcaaaattattgtagtaatacaatgcctacttcatacagttgcggagacatcagttaggcgctgttcctctcacatatgtcatcaattctgagaccgattcacatgcttaacatttctgactaattactgttacgtggtaatcatgacatagcggccattgtctgtacttgtacatcaaaatctgctgtctatggagattagtgacttggaagaaaatcctggagtcaatagtggaccccttttttattaagactcttgatggcccagaggtcagtataatgaggaaaacatagaacttccatgattttgacttgaaaagtaattcaaagggttgaaatttaaacgtaaagaaatttttggaatgctttcatttgttgcacttatattttgctttttatgtatgtagaggggtgacatatgataaaaaaactatggataattttaagccatttatttcaacaaacatgtaatatatattctaacgacaaagccctatgttataatttaaatggtagtaatttttgtttccggttttgtaatagctaatggtgtattttataatcagtagcatctttgatttgatggggtagtgtagtaagaactcaataaatgttagactcctcattaggatttgggtagaggttaatgtcggtagacacattattagagttaagggtcctaaggctttttaatgtgagcagagtgcaatgaaagaatattttggattgaccaaaagtctagagaacctgatttgtaactgtatcattatgacttactgaatttcattcagtaaatattgcatgaaattgagctgaaattcatgtctgctaaatatgtgtactctgcccttttctcttcattatgaggattaaattgaatgataggggtgtaagcactttgtaaatccaagtaagaattattagttaggatagttcaggtagtgctgtagtaacaaatacttaccaaatctcggtactgaaaacaagggtttatttcttacttatgctacttgttcatcataggacagaaggagttctttgcagactaatagttgtcatttccaacacttttgacctccatgccagagtaaaagagctctgagggtctcaaactggcaattccacactttgacctggatgtaatacatgtcacttcttatatagctccttagccaaaactattcacatggccctacctagccatagggttgccacagagcagagagctggaaatatgtggagaacagtgtcaataagtttgtaatagtaataatggttgacaatcattgtgtgcttcttagtaccaggcactgttgtaagtgctttagatgggtagagtcctttagtactcatcaagtgggtatgatcatgattcccattgtacagatgacaacccaaggcacaaaagggtagaccaacctgcacagaagagacagagcagggattttgcttgtgtgacattgatgtgtgtctcaaactataatggatttgaatgcattttttaaaatgtaaaaggaagatacaaatatagttgagaatcttctgttctgaaaaataagagatgaggtttggtgatccccaagcctccctaaaatttcacctggatcagccccaaatgacctacacttacaatgactgctgtgttcttttggcgcctcatcttcagaaaccaggggccctctcctggccactgacttacgtcgtagcttagcagaggggcattgtcccagcgtttcggtagatacttcctcctttgacttatttaacctttctattttgggagttttctaacgtgtagaagaacagtagagtggccacagtctactccattatcaatgatcaatacacaattaccaatacattctcaatcttgcttaatttcactttgcaagttaatctggctgcttgtcaagctgagctgtgaacacaaactgtgttcttggggttgcggggtatagagctcctaaaacaggaagccagtgaccaggggagggccagagaggacatgtggaggacagaattgaagggcttcaactggaaaagagggcgtctctaatcaatagtttagacaagtttgcaagtggaagataaatgatatgacaatatttaatcattcataggacattcttgtaatgtaagggggaaaaggagaaatatgttgttaatagggagccagaattattacctttctccgtagctccaactgtaatcttgcctgctattgaggtagttaataaaccaaagcctgtgagctctgttcaatgggacagcaaccagagaggcttctttccaagccctcccaccaggccaagaagcagctgagctggatagaaagcatgccttcagcaccctgggtttcctcttcagtggcatccagaggaccctgggtcacttcacctctctgtctctttctgaaaaacgtatataataaccgtctgggtgactcacaaatctattatagcatttaattaacaaatgttcctcaagtgctttgagctccctgtttggatagatgtgactgaaatgtaaaatacctttcactgccttatttattgctccagcgaacacgctatatgctggcaccatttatcttcattttaattttatctcccacaaatataggcattaatttaaatcacatacagaacataacagtttttatagaggcaaacttattccagtgtgctgcattttaatatcgcactttaccatcttttctcacttgattcaagaatagtatctcttcctgcctcagcatttaatcttaggacaacagaaacttttttgtgtgtgcatgttcttgctctcaaactttgtttctcactgctttgctgcttgttgcctgaaagttgttctgtcagtgtgagcacaggtgtaagtaattccatttctcttttgccagcgtaatttcctgtgtgtgtgtgtgttgtgggggctaaggggggtgtgtaacatgatggattttacagctgaagcttatactcattcatcttcagatatcttttctaatagaaataaagacaataaaagtgataccctcctcctgaaatttacacattaaagaccccttcaaactgctcactttttttctgtcttttttttcattcagaggcaaaatttccccctttttttcatcactgttacgtttgcggcagatgagtctcttccttgaggggaatcgtggtaaatgggcctgctgtatttacagctatgaaacattccagttggctgtcacaccctaagcaaggaaggtttccccatccttaatttgcggcctgaaaagctgtggctctcctcaattaagactttccaaattgcctctgacatggcagcatattcccaggagtcaggtcctgggaggcagtaataacatgagcactgctgtataacaacgtagttttacaagccattttgtgctcttttcagaagctttcaggatgctttttctctgaagttgtaaattaaaaagaaaacaaaacttattttgattttttgtttttagttttcctagtctctgaatgtctaggtttagggacatctgtcatagtcttatttatttattttacgtttagtctggatttaaaatgtacaaattaatgtttaagttctctgttttattcctgtaacaatcctacaagaacaggttccattattgtgttcatcttgcagatgaggaaacaaggcctagagaagttaaatatttttttctgaaatggtacagctagtacgtggcagggctcagattttggatccggtccaccttaactaaatatgcttttgatgtagctctcttcaggctgaattcttgacctctcatttgatgctgactcttctcaaacccttagtctttgtgctactaggtagattttatctgtggcaagaacacggttaccctggaaacccactagctagaatggcaagccaattatagcaccaccgctttttttaaattaaattagcgctgctgatgacgtggacttcttgattgaagcatgctgagaaatgggttctcaccagttgttcctgcctcttaggatcatgtgggatcattctcatctattctatcaagccaaacaagaaaatgcctctatgtgattgactggatttgaggaataaaatgtgatgatcttttaggaccctgagctttcagtagtgagtagacatgcatggaaatgtttggaaagaagccctattggagaagaagcctgtcatctggatactttccacccccaagcacacaaggtccactgatttaaagccctgctcttaactactgaggctaatgttctctattttagtatttcttattttatttaaggccattggtttaaatccagacttgattcaggaaaggtcgtagccctttgatattctttggtctttgcacacttctaatagggcaggaatttgctttagttcaaaccaattggtgcatttcctttaagtacacagaatttaaacaattgaattgatatggccactgttgaactgagtggtaccaggttggaggaaaggacattcattatatgttagtgggttgtgggctcactctctgagatggtaaacggtaggctggtagaatgttgagtggttcattctgcataacacacatggcgccaggcacattacctagtacctctatgattttcatccgctttattttctgttttgtagagtaggtaaaggtaaggagacgggcttgctcatttgcaaggctattctgtgatgcagggttctgagtacaggattccttatttgcagtccagtgctcttcactttataccaccaagtcaccagagtctcagggcctgtcttctgtatcgcagaaaacaaatcaaggattagcaacactgaatcttaattcttgaagttctaacaggaaaattatgttagtcttgctacatatcgtaggcatattttgtccaaaatgagagtaatcagggaggagaagaggctgcatcttactgtgtcctgatgggtgatacttccgtgactatctccatcaccagtgagcagatttccagaagtcacagttcaaaacgatgaagagaattacacattttcagaaaacattgtacattctttgttaacttttccacttgtaaaataatttgttttcagacatccaggtcctttctccatgatttactgcgttggtgacattaatcagcgtggttatcttggagcctcatttccccttgggtaaaatggaaggataacattggcaatcatacagacgtgttgtgtagaaaggagtaagaagcattttggaagtggcaaagtggcaataatcccctgtaagacagtagctgtttttaagatcactgagctctcaaacactggctttttctgcctcacactttctagatttgtaagacttaatctgaaaatatctttgctattcattatgtataattgtagggctttggatttaaaaaatcctaattctgttatttccctgacaataacaaattattctcatctaattttctcttatgtgaaataagacatacaccctagttacttccatgcctaatatgattgacaaatctatatgttatctgaattgtgaatatattttcatacatatagaagtacatgtgtgtatttcttgaaatctaatggtcaatatacactaaccagttatttctgggattttgggaacaggcttctttctatacttctctacttatctttaaattttctctaatgagcctactttgcttttgttttacatacagtaattaatatatttataaatgtatgtatactatatattttaataaatttatataagtatatgtatgtatatacatatgttttgcaagtaaaaaaactttagtaataaatatctacaaaggcaaattaaaaactattacattttttctccctcccttcctttctactgtttccctcctctcctctctttggtttccttccttcctttgttccttcgttccttcgttccttccttccttccttctgtccttcccttccctccctccctccttcctcccctcccctccccttccttcttctttcttgccctttctctctctctcttttcctctcccccttctgtcttcctctccccacctccatctccctctctctctcctccctccctgccgccttccttctttccagaaagtcactaaccagaatctttcacagaataaactgtgaaacctagatcttaaatgtactacagtagaaaaagagatgagatttttgaaagatgatggcttgtccttgtctctgtacttgaatctatctcaaaacaaagatataactattgtttttaataataatttcaatatagagtgaccatccttgcctactaccctgaagagagagagcatttacacataagactggtggttgcagtaaacccctttcaagtggagtggccactatggtccttcctcttcccttccttcctttcattcccttgccctttccccactttccttctcttcctttccttttttcttttaaggttcataaaatcttgattggcctccttcctagcagccaggagtttgggtccctaatagctaaagcttatatactttattttcttctttctccagatggctgtggctatgaattttactccccatcccaggactacccctgctatactgacactaattttcattttataatactgtcttcatcagtccatgctatgctactagttttagttattataatattaacttaatccacaatgaaggcgacaggtttttttgtgtgtcttactttttaaaggggaaatattatctctcactttaaggaaactaactttagcaactcattccctcacttttttttttctttcaacttgatttgttcaactaaggagaccacatttagtacttgctagctgagacttctgttctacaattctgagttagttcctcatccgtccgaccctctctccccgtggtgcactgagtcacaatgtgatcaccagctgcatgtgctgctattacacacaacacattggctagcagaggagccaggattcagccttggaagtactttcaggcaaaggtgaagaccctttccccactctaagcatctttcagtagtttagtgtagctgatattaatgttataaatggtcattcctaatcctgtctcagttccagcccagatggagttttgattttagaaaatcattcagtgaaatgtatttcctgtgcctggtagtcattgatcacttaccaaaaaaaaagggggtagtgggagactaaaaataaacttatgataattcacatacacttaacctttactgactaataccaaaaagggaatgaagcaggctctgctgaccagcacttgcagatggattccaggaacgtggctagagctgccaaagccatcgctgaatcctgccaaaagcatcccaggggattttactaagggtggggagagcagggaacatggaggtgtgtgtgtgaatttgttttaaaactctcttactcaacactgagcagtgggaagaacactgggaaaaaaggtcggaaagtgacattctagactgggttccacccaatctctatgacactggaaaagtaatgtgtcctctttggaacttcaggtatcatgtgaacaataagggtgtcatattaaggtcttaacatgttgaaatgttaaaaacattctgtaattacttaaattatttcaaaacagaaagatcatacatgttcatcatgtttctgtgttaactggacaaaactacactaaaattaaagagcaataaaagcaatcgtgttaaaattttatttttaaatatagtacttctagtaactgaatatctaactttattaacaattctaaatctcgcttttttttttttttaaaccccagtgaggctgggcaccgtggctcacacctgtaatctgagctctttgggatgctgaggcggtatgatcccatgagcacaggagtttgagaccagcctgggcaacatagtcagatcctgtctctacaaaaagttttttaaatagccaggattagccaggcatgatggcatgcacttgttgtgtcagccactctcattgggggttgggggggttgggggtgggctgaggtaggaggcttgcttgagcccaggaggtaggaggtcaaggctacagtgagccatgactgtatcactgcactccagcctgagcgacagagcaagaccctgcctctaattaaataagcaaatacacacacacaacacacatatataaaataaaataaaaaccccaatgtgttaagatctcaggtttaaacctcggcttatacaaaccatagtactaccgtgcaataactgaattgacaaggtaccaacacctattttaaccagaaaaataacataattgtgttatattttccatgagagtcatactcttgaaattaagtattttctcaatagaattgtttctcaattaaaaaaaaaaacttactcaaaacatttagtatttaattataattataggcagataaaatttataaaagattatcagtaagatcaagaacctctgcctctttaatcatgtttttctctaccttttgctggtctcttcctgattttgatgacctcattgtctatacgagtattaagacatttggggtagctttttatgttgtgtactttctttccttctccttatgagatggctgacaccttctaaaggattcagagagtttccatcttattgaaaggtccttatgaaaattcactggtagtgttctcagcttatactaggaaggcatgtttcttcagaagcagtatttgttgtatttagggtgggaatcattatgtagcaagagtggtctacatattggtcttgcagcaacatcagcaccccttatgaatggtttgtttcccaccaaaagtcaaagattagcctatatgatggatgatggctacagaaaatagtgccagaaaaacagaatcagtagaagatatatattaagacattaattgggaaggagtagcttgcatgattttgtgggctggctaggcaatctaacatctacagattaggcaattaggaagggcaggctgtaactccgtggcatgagatgaagctacttgccacaatgagaattccttcttctttaaggaatcctcagctctacttccaagacctttcaactgattgaatcaggctcaaccaggttatctagtgtactcttcattacttaaaaatcaactgattagaggctttaatcacatgtacaaaacaccttcccagccacatctagattggagtttgattgaataaatggagactttagcctgaaaaaattaacacacaaatggaccatcacaggagggtagtctttttctacagaatttaaatctgtggtagagaagcaacagatacctcagggcaaaaaaagtccaggaagagcataaaggttcaagcagaaccatgagaatgccagcattgtcgttggagatggtgactggaagtgatgataggtctagggaacagtaaatgtggacagactggcattttacctcgggcacacttggacctggataggctccaccagtctgccctggaaacagaaccacagtgggtcagacagtcttttgtattagttttaaatacagagttgattgtctctcttgcattcttaacttgcaatttagtactgtttatattctgcttgaaggttagagacattcgactaaatggtcttttctccacattgctgtcattcattaatgtcctggtcctggactttactcattgaccacaggacaagtggctcaactctctcctgccactacccaggctgttagtcctgttgggaggctcagggcccaactcactcatctgtaactctcatctccattcagctgcagcctctacagcccctggttataccctggatcttatcattgcttcgctctattttacctcctaaatcgtaaaaattaaaaccagcctcggaacacaacccctcattcttccagcactctctctcattcaggtaactcctattctacttttcttcagcatatttaccttctattacctttctttttcctcaccagtctcttatatttcctttattatccaacttacagtctgtggttcaatacttcagccgactcttccaacacatgaccttctttcggtaggcttttttcagagtttcccttttgtacttgcccttatgtaaatctgtggcacagtcaggccatcttgccaacttttcacagttattgcacaccacactctgttggttttcttcctaccattctgaacaatttcacttcagggctctccttagtggctcttcgtctccctctccttgaatgtcgttttacctttttctttttcttttttttttttttttttttttttgagacagactctcattctgtcacccaggctggagtgcagtggcgcaatttcagctcactgcaacctctgcctaccaggttcaaacgattctcttgcctcagcctcccgagtagctgtgtctacaggtgtgcaccatgcctggctaatttttttttcttttttcttttttctgttttctttttattagagatggggtttcaccacgttggccagtcttgtctcgaactcctgacctcaactgatccacccacctcggcctcccaaagtgctgggattacaggcatgagccaccgtgcctgggcttgaatgttgttttcctttggtggggcttggggaggggtgtctttcctagggcctgctcttgtttcacttcccacatttggttaagagagcctttaactactatggcctcaactatcagctctacaatatgatataaatttgtttcagtaaacttgctcttcagattcaattgtttctaactgcttatcgctcaggtgcatttggatgtattgcagaaatctcagcctcaatgttttcaaaataaactcatccacttctctcaggaattttttccactccaatgttgttcggtatgtggcatcaccatctaaccagtttcctaagccagaagtttaggtattatttctaagccctctctttcccttattatcaattttacctcctaaatatttcacaatctttctacttctcctcatttctgctgcggtacgtgatttcagatcagcatcatctttcatggaccattggtgatatccccctaacgggtttccttgtatccatttccccaccatcgccccaatctatccaccaaggctttcctaaaatgcaagtctgactgtattactttcctgtctaatatgttatctccttattcctgtagtataagacagtgattaggaaaacaggctctgaagtcaaatagaaatgagtttgaatctcatataactatgtgatcttggacaaaataaccttttttggtttgttttccacgtgcgaaataggaacagtaattgaacttttctttttagatgttgcatacctctctggtatacatgaagaagatgtgtagtatctcattcccaccccgcttatgcaccatgctatagtcacacactgcctttgctctgatccccagagacattgagccaccactggagagtcacatgatattgtttttagcctggaacattgttcactacctcagtcttttattgccttgtctcaacatagacgccatttcccttaagacattttcagcacactcctctggtataatttagtttaaatgtccttgctgtgttctcctgtgtttttctccttgaacttcctaatccttacaccttccaccctgcaaatgatcattatctcactgcctctcccaaatgataacctctttccacccattttaagttccatgaggacgatgaccattgacccggaccgcgttgttaaacttcttagtctcagctgccaagagcttagcacagtgtctagcagagatcggacactcagtaaatatttgatgaatgtttatagtgtgactgtctcgccagtgcacatacaacaaagtgatcccatctttccttctgtatcataaaatagaattttcttacctctgtaatttctccctaggaaccagactgcttctagagagcttcttcacaaaatcaaattaattggtattttacaaggagggaaagccccaggacaagtcccttctcttgaccacaaagttctgtgtttctcatctttcctcttgatgtcttggtttcagcaaagcaacatttctatccctgccccctgctcccccataatcctacaaatgtactatagatatgtgtaagtactacatccccaatcaagtacagcgtttggcctcgggtgggagtcaaacagcaagctgatttttaacattacttggaagaaattttctaggtatataactgacaaacattcatggagagctacttcatttttctgtcaagcttttgggggattttttttaatagttctgcactttgaaagaaagttcacaatttttaaaaggaaatgtggcccttttcattagctccttttacctcatgctgagtcatggatgagagagaatttgtaggcgggtgagctgcaggaaaagtaatactgtcatttacacttgcaggctgttatgctttccagaaaactttttccgtaggttgcgaaagtgattaatctgctgttaaaactgacaaagaaggttctctgataagagaaagaattaaatgaggaatttttctttaaaaagtaagcgcttctttcccattttagattagaaaaataagtttaaatgtttcttttaattttagtcgtgtgtgtgtgtgtgtgtgtgtgtgtgtgtgtgtgaagttggccatgacttaatacaatctcaagccattttctatttaaattatgtttttttacttattggcatggcttattcctcatgctgtatatctaaattattcatttctacatcctgttcccttgcttgtctctctttcttcttctttttttttcctttcattttctttatttgggtcttttcaatactttcaacatcatcttacttcggagccccagatctcttcttttctaccaaccttttttgaaacattaaaactggtgaagatggcctgagttctctctgtgatataaatttatccctccctgaaaaattccattcatgtaacatttttataacactttttaaaactaggatgaaagttttttcatgtagttgaaatgaagcatcactgcctaaagcgtttagaaatttttttactgttggttttaagaaattactctaggatttccactgaggactggcaagtattggtgaagtttgatctctcagagctcatgtttcagatggcaacttaaagggacaaataaataagtcaatcacacggcataatctaactttaatatgattctgcagagaaccagtgactcatttagagaaatcagagtcctcagaaaggtggaaaacatgttagaacttattaagcttgttgcctttagcatgtcaatgccttgtttttataagaagattcaatgggttgttaaaatgcactgtcttaaccctctcccctttgtatttttctactcttaagatgcatcattttatgttgggatctatcagtttattttacttgtttttccttcttcctctccttattttgaaggctgacttctgagcttgagccatatccttggcaactgaatgaattcatggggagtatagtagaaaagattttctcacaactctgacagcactgccccctagtaaaaaagggaagagacaaagagaaatggtcccttctgcaactgaagggaccagcacaggggacttggcattcttcttttagtcctaaagcttagacatacatactgctttcgcccctgggctacaaatacatgttttaaaattctgaagttgaaaacgtcaaaaccatttacaattaaaaacctgctattactgtatatttatacaggtatttcataagggaaaaagtagaaaacatgtaaatgtatttgttttatgtctgaagttccaagattatttctgtttctttactgaatgtgtttgaaatatatgcaaacacacatgtaaacatacctgtatatttatgtacagatataagtctacatggagaccagcatttttagataacactgttttacaggctgtgcatccatctttaaggtgctatagcataaggtctatgactgcattttgtaataaaagatggcaggctttctggaaagggtctctttggggcaggaagaggtgtgaagatcttttgcattctacttttaaagtacaacaagttaaattgctaccagatacattagctttatggaggtttgtttccatttttatagcaaaatcaaataacttttaaatcagaggaaaaaaatattcttttgttgtttttatttttgttgttgagattgcctgttttacgttgagtgcagtgtttttcaggtggaaacatattggtttgacattttaagaggaaaatgttctatatgtaatatgaaagagtctttttcttaactaaatgccagcaacaaaatttaaaccaaaaaatgtagtaatgaaacaatggtaatgagatatgattatggtttagtgagagaaaaaagccctgcagggaacagtacaagcacagtaaattatgaattgctactaaataggcctcattagtccactgtggaccatgtttaattgatattagaaaggagtctggaaaactttggaaagtacatgtaagacaacttgctgttaaactaataaaagtcgttagagtgtctgtttcaaaaattagtaattattaattgtgtgtgagggtcctcaggcagcacccattttactaaaacatgcttagagaaaagatatttctatgagaaatgaaactgcagaatgctgagcagtgtaatatgtgacagttccctgggagtttctcccctcctcgtaggtatttttagcaaaatagtccttaaacattgttttttttttttttaagttggagtctcgctctgtcgccaggctggagtgcagtggcccgatcttggctcactgcaacctccacctcctgggttccagcaattctcctgcctcagcctcccgagtagctgggactacaggcacgcaccatcaggcccagctaatttttgtattttttagtagagacgggggtttccaccatattggccaggctggtcttgaacacctgacctcgtgatcctcccacctctgcctcccaaagtgttgggattacagacgtgagccaccgcgcttgccccttaagtgttgttttaaagaaagttggcgctctggccgggcgcggtggctcacgcctgtaatcccagcactttgggaggccgaggcgggtggatcatgaggtcaggagatcgagaccatcctggctaacaaggtgaaaccccgtctctactaaaaatacaaaaaattagccgggcgcggtggcgggcgcctgtagtcccagctactcgggaggctgaggcaggagaatggcgtgaacccgggaagcggagcttgcagtgagccgagattgcgccactgcagtccgcagtccggcctgggcgacagagcgagactccgtctcaaaaaaaaaaaaaaaaaaaaaaaaaaaaaagaaagttggcgctctactgaagactggagcccaagaagacatttatagggattgtttattttcatgttgttactacactccatggtctgcaaaaccagagtgccagatgttaaattctatcagcataatgcatctttaattaaatattatatacgccatacaattaataatgtggtctgtttccaaaactttattaagaaattaccataattttgtataataggctaataaaaaggcactgtactttgaaacagcctttcgtaaagtggttatatgatttgtatctgttgaatttggaatttagattaagagattgtgggccagaattatctgatgcaatgtactcaggactttaaataagttgcgaatcttgtagggtctactattatttggcttcctttaaaataaaataggtttcttatttgtcgatgagctcactctttaagaggtttagggaataatttacctactcgctttgtgtcccccaaccctactttgtaaaaacctcaaacaatacaaaacatgataattccaaatatacagtacattgggctatgatatttcttaatgaatggaaagtcatgcatctggttctgtggtcatcattgatgttttaattttcacaatgtgttaacctgatacttaaattcccctagttgtcctgtgaagaaagaattttaaattcacatttcacatgcagacaaactctgatatttaaaaataatagttatcttttaaactgagatcctatgtggatatggaatagcgtatacagctctgacaatagggcttcagtaaaataacattttgcaagctgtgtttttcaagacaaaatgtcaccctcagctaaacagaagtaatttgcatcagaggtgtgtgtgtccttactcttaatgaaaaaacggtcccctctcttcagaaagtatttgctatctctacaatgtattattttcatcactgtgtccctcccctgcccttcttatgccctaatatttgtcccttaattctattaaattagttgtcaactaaaattaaaggtagatgttatccttcacaatctgtcctggtctaatttttcagtcttgattcgtcttctttactttatggagtgtagaggtggctaacagaacaactctggagccacaatgtgtagattcagataccaacagtagcttatgctgaaacctgggtcaaattacttaagctcacatacctcagtttcctcatctacaaaatgaggataataataggttcttcctcacttatatgtaaagcatttaaataaggactagtagattgtatgtactagctgttattaaattctgccacatttgtttgttctccatacacaccttagccttttgtctatgtctctgttcacattgtttgctggaaacaggatccacccttctcctccaaggccagtgtatgtgtgtccacaaacacacagccatccatgtgttgtgattccacgcacctccgaagatacggctcagagagccaccctctgcttgccagattgagcatagttcatctggaactttcatacacttctctgtcttacttagcatttgcaactatactttatagttattttcaagtttattttgcctcttttgctggtgtgtggacttcttgagtccatggacttcctgtgataaatttctccctactacaaaaagctcagtgccttgtgctgagctgctgtgcttagtaatagataggggagagggtgtttttttatatctatatacatatatatgtacatatatatgtacacataatttgatatacttttgagtgtacatgatgtggttccttatttttgcattaagcctatcacttccgggcattggcaaagatctgaaaattaaaaggaacacaaataagaaatgcatttagtccatttaagcaacatgtgagttcctcttattgagtttcttccctaatttagatctcaagttttgcaaaagaatgacaaattcctttatttaaagaaaaatgaaagcagatctgttaccttctgtcctatgaatgccaattctctatcctggataattagataaataagatatgtataagcgtatggtttatgcacatagacatgaagctctcaatgcctgcatgattttcctgtcatgctcatgtgggttaaagcccaatagatgtattttgaaaactcgaatgccagtatgtctttaaaaagattatatcctgaaataaagttttaacatcctgtatcctatgataaaagttattttgcatttttttctttaccactgaaaacttgcgaggctcaaagtagtttaatttttatatattgaagctactcatttgccatattttaaaaacaaatcataaaacatggtaattggtaatttcacaaattttatcagggaatattttattattacatttttaaaataaaacctgtagatttatttaaaaagcatattttgaactaaagacctgaaatgtgtagcttgtgtagctccatttgaaaagatgaaggttttgctattgtttacaacagttttgcctgatttttgttttccccttttgctctgtttttgtagttcagtttgttgcagcattgttgtcatgtctaatttttgtttacgttgcactgcacagcactctttcgtatacttaagtaacctttcttgttctgcactgctgaatgacagctcatttattctagggtggtaattgcagtgtagcagacccaggtgagcaatgtaaaaagttgaagcagataaaatgtatgatttcttttataatggtattgtgtgctgtgttctcctcatatagatgctttttgtttacatagagaatatctaggaacaatctacatgttcttcaagatcttttaaaataaatactctttcatttttaaaaaagatgtattcttggccaggcgctgtggctcatgcctgtaatcccagtactttgggaggccgaggcgggtggatcacttgaggtcaggagtttgcgaccagcctggccaacatggtgaaaccctgcctctactaaaaaatacaaaaattagccgggcatagtggcacatgtttgtaatcccaggtactcaggaggttgaggcaggagaatcgcttgaacctggcaagcagaggttgcagcgagctgagatcgcgtcactgcaatccatcctagacaacacagcaaggctgtgtttaaaaaaataaaaagacataattgcaaaagaagtatttcacttcaccctttattataggacagaccacagtgcaagcaagaagataaatggttaacttacaactgacctctgattggagaatactagagagtggtgaagactgtggcaagcaggagggctcaccaacctcccagatttaacccaggctgcatgtaggaatgcagacccagtgttgctaggtctctggaattaagttatatttaactagcctgtgatctctaaggccttcaattatgaggttcagcaccactggaaaactgagtcagtttagtgctttatttcacaaaggcaaattgatggtcctttctgaccctaaattcccagttttacttaaactatttagacaaatctaagaagtgtgtgaaataaatacagtggagcttgaggatttttgttgttgattttctgtccttttatatttcctccttccctctgagggttcacataggagcctccacagccagaggattactttcagaattggaggcaagattatttcttggaattttggtctgaggaaaaattatttaggtcacttggacacttatgttgtgctttcccacaaaattgtctagcattttctttaagacatatgcatgaccactgcccaaacgaaataaatcaccctttctcttaaaggatccagactattaaatatgaagaacatcaactaatttgactagcagaatgtaggccttcagtgttaacatagcctttttctgttattgcatttatctgcctttgttctgaagccccagtctagtacctttcttaatgcagatctctttgagcataatgtttccattaaaccagccagtggatctcatttgctccatacatattcatattaggaaatattattgtacaaagtaaaagatgctagtaaaagatatgctggaacaacatttctgacagtatttgttctgtagttaatgctctgggagcctttttccttcaaactctctattcctagttagggcctcatcatttcttgcctggattattgcagtagcttccaggctggcttcctttatgcccttcataagcatatggctgccagattaatatttttttcaacacagccctgatcctgtcattctacaattgagttcctcacagtctacctgatacagagacagaaggaatgtgataatacaaataataatggtactcacaacaacaataaatgactggtctttgatatttaatctctaatatcaattgtcttgagacaacaaggctttttgaattcaatatcagagggtttaactgtgaggtacttggcatgggtctgaattgcatgtatattgtatgactgattgaaagaagattatctgatacacatgagaagtgtggaggtgggagctgacattttgttagaagtgcatgcctggcattttgatatactattgcacctcctcaaatctttttaacagaaacaaactactttgtgatgatagaatagcataatacaggacagcggaaaaatcttagtgctttttgttctggttttgattttgcaactaaatatgtatgataaataggaaattagtgcattggagcatatgcatctgttaaagcagattgactgcttggttatcacactataaacaacatttttgaagaattttaaaatttataatctctgatataatgttaaatgaaaaataagatacaaagccacacataaagagggttcacatttaagcaccatcacctatacaaaacacacacgcacacagtcacacacacacacatacacacagtcacacacacacttacacacagatacaagtatacatagaaatacaaaccatgaaaataaagttaccaaaacagttgttatcactaaagttttgaacgagtgttttttatttctttattaaccttgttattacttctcatattttctacaatgagtatcactgtttttagttttgtttttgttttttaaatggagtctcactctttctcccaggctggagtgcagtggggctatcttagctcactgcaacctccacctctcgggttcaagcaattctgcctcagcctcctgagtagctgggatgacaggtgcccaccaccacgcctggctaatttttatatttttagtagagacagggtttcactatgttggccaggctgatcttgaactcctaaccaggtgatctgcctgccttggcctcccaaagcgctggtattacaggtgtcagccactgtacccggcgtatcattgttttaatgaatacactgtcttacacgagggcttgcctagctctctcaaaagtctaagaaacaatgaataatattattttatttaaacattatttaaaaacatgaaaacagtgaatacaaagttgaactctcctcttacaataataaaaattcttcttgaataattctgtatcctaccattccatgaattgtatccatggaaaagtgtatgtttttctgattcatttatttatttgcttctaggttattggatgaagaaatctaggaatagaatgaataactgtatagattacacctctgatgcctggtgtgtgtgtgtgtgtgtgtgtgtgtgtgtttcttcccttgtgattttctctccttttcctgcctaataatgatgtagctgatctgcttatcatgttcctttatttctataattccaattgttgtagatcccatagaggtgttcactcttgctctctctctctcttctctctccctctcacacacacacagattaaatagagaaaattaagtaaagagaggaaaatgaggaataatttcatactttaatatattcattcattcattgctctttgataatttttttcttttttaattttatttttccctaagttattggggtataggtggtatttggttacattagtaagttctttaacggacatttgtgagatcctggtgcacccatcacctgagcagtatacactgcaccatatttgttgtcttttttcccatgctcccctcccactctttccctcaagtccccaaactccattgtatcattcttatgcctttgcgtcctcatagcttagctcccacatatcagtgagaacatacgatgttcggtttcccattcctgagttacttcacttagaataatagtctctaatctcatccaggtcattgcaaatgctgttaattcattcatttttatggctgagcagtattccactgtatatgtatacaccgtagtttctttatccactcattgattgatgggcatttgggttggttccacgatttgctactgtgaattgtgctgctataaacacacgtgtgcaagtatcattttcgaataatgacttcttttcctctgggtagatacccagtagtgggattgctggatcaaatggtaagtagagctctatgatgttttgatactcttctatggcatagacttagtgctcccatgttctaagtgttatgaaaggctgaagataggaatattagaacatggcccccttcctgagttatatagcttagaacaatggtactcaaacttaagaatgtgtaagaattacctaggccatagcacttacacatggaatatcaagagggagaacagactaggagaagacgtttgaattcagctgcccatgtaaagtataaagaattatttttacccagaatcttgaaggggaaggaactgagtcacacagacaagaatgtgcctaaagcaattcagcagttcagagtggaatgaaaaggaccctggttccctgctcttaagccagtgttctttagctggctagaactcagctctctgtttaaaaaatgaatgggttgcagtggagcgctgtgttccaagtaggatttgtaagacttctggaattctgaaaaaattctactggttttctgcctgtttctctgtctatacttgaattcactgaggccaaaaatggtaactttttacccagtagctggcaacattcctggtaattagaaagtgatcagtaaatgctcaatgactatctgaatgattgcatttttcaaaaagaaatctgaagtctaaattttgagccaactaaacatcatatttctttggttttgggtggtttgggaaaaatccaatgtgttctctgaaaggaaaacatatttggagatatgattatttttttctgtaaataaagttactttgttgtaaatataaatatacatgctcattttataaaagaaaatgaaaggagaaaaaagagcaaaatatctgtattgacaccactcataattaccactcataatttttgttttgtttttcttattcacatataggacttttatcatgatatatgtatgaatttatatcctgttatttttctgaaacattatagcataacaggattaagtatcctattacctctacagttcctgatatttataaagataaattatgaaaataatgtttgaatgagaaggtttttctgtttatatgctgttccaaagaaccttaggtatcagaatttatctgagcccaaaaacgtcccttaggtaccttaagctacccaaattctttgaattctttcaatcaaatcccctaattttataaagaggaaattgaaacccaagaaacaatataagtgaatttgtttgaacccaggaatttcagtacttgttgtcctaatttaaaattgtgtcccaaagaatatttatctttgaatttgttgatgtttgctcttttaaaaaggaaagaagaataataaactaattcctcattttacctttaaaaggaagtttcactggaggaataagacccaaatgaatgaacccccatcagtcattcgtatcccccagctgatgaggatttcagcagttgtgctgacaccttgatcttgggctagccaccctccccttgctctgccatggagcttggtcaccttgtaccatggtcaaaataatggtgctctctttcaaaagccatccttagatttccagctaatagtgtgtagaaaagagaaaacataattttttagtaccccaaattctaggttatctactgcactgaatgatctaaaatatcaagtaggcgctttcagcaaagctgttagaaatataaatagaaaaaataggaaagattatttgtgggaccattcaaactaagactgttgttgttctcattattattgttgtttttaaaggacactgtccatatattgcaagacatgttgcccactgcccttcacctatgggattatataaacgcaatcctattttttaaatagttgtgcagaaaatcgagaagggagctaccttaactgtgtattcagttcttgagtgacaaagacaggcgtgagagagagagtcccttgcttccaaatcacccctcctttgcctcacccttttcaggacaaaccgactaccagaaatgaatctaacccatgtggtcactacaggatttatctgggcatttgctgaacctgctcgcaatttatttttatttcttccgatagacatggatttggcacaggggagtgaattctttttgaagcagcagatgtgcctggtacacccgtttgctgtaaccatttgtgctgtggttgaaaaaaatttttttaagagtgcagaattgttgaagggggagggttaaaaaaccagagccattttagtgattatgcaaagttagaatgtgagtaattttgctgcagttagtcattatgtgctttcatagcttgttttacagggataaagggatgtgtacaggtttggtgaatagagctcttatttgttcctaatagtcactcttcatgaaaacattttctacccttcctcctactctgtggcaaaagtgctctctccttggaaattatacctttctgggatccattccttttatccatctacaatcagtggacagacaactccattttgaagaacaaatacgttagaagaagaatttttttctcctatacaatctacagtgtaactgatacacattcaaatcatcgtaatacagtgatcattataaaatgagagtgttttctgcaaagaggaaaaaaaaaactgagcaaacatctagtgactttgttaggagcttaatgtgctctaaatatgatgtccttcaaatattttatttgaaatatttgataggtcttagaaaattttgctcatggaattctctgagaactgtaacacaccacctattcctttttcgctttgctttcggtcacccaaatttttttagaaatatgtgaacgagggtctgtttgtttccactgaagcaaatatagccacttgctcacactggtggcttcttttactgaagtccgtgaatatgttagaaactcttgtatgaaaatacagcaacccaatttgtccctattgagcctactttgtgatttccatgccctgctgcctggtgtgtatacactgagatccactttgttaaagaacaaaactgggtttgttacttttttgtaggcttattattaagtctgagcattctggtgtgaggttaggaacgctggtttcagactctggaaaacagagttctaatcctgaccctctgaagaccttctcactttgggcaaatctttcctgagccttgtttccttgaggaaaatgtagagatgtgtgatattcacatttcttacgccctacagttatgtgaggaatactgtatgtttcagttatgcacagataaattagttatttcttctcaaagaatcctctgttaaaaattattccccaaatagctctttttcgacacttgtctcaaggtggtcacattttaatttctgccactgatacacaaatttcagtgataagaaacccctgaatgacttgagagtttcctgagagatgggatcccacctattttattatcttttgtctttttatggcttccgagtagcagtaaaagataggaatggttggttctattacagtagttgattataaccaaaaactagtgaaccacactctccaaatgtcctgctacctacagctaagaaacccaatgtttataaactaactcagaacttttaaaattagattgaactacagaaccctctatcatacttaaatcttcttagatgaatggtgcacaaaactgatgggggatgggaagtgtgggcaattctgttaccgaactatttcccttattgtttcatttgattaaacacttctctcttgtatggaatttgccaataatacattattgaaaaaactgatttcaataatatgttattgaaaaaactaatttattgaataaaaacatatggaaaaatctctttgctagaccctaaggatggaaagcccaaatttctacccacatggagtttagagaggaaaggaacactaaataagtaattgcaaaacaagacgtaagggttatcataaggataatgcaaactattaaagagacattaatggtgggcaccttgtctaattttggaggttccagattggcttcctaaaggaggcatcatttcgtttgaaatctgaaggatgaataaccagttagaagttgcgagatggaagcaggttggaaagtgttcaaatcagggcaaccacaggatagctggagtgttgactcctgtgtagaggaaagtaagagaggaggctaagaagataaacagtagttctatcaggaaagaatttggacttcatggtaagagcaatgagaactcttgagagattttaatacaggaaggcaatgatcatatttgagttcttaaaatttgattttagaatagagtacgtactagaggacaataagcagtcagtttctttaaaaatacacatatacgtgtgtatgtgtttgttgcagtaagctaggtcactaatcatagtggactggactagggcaccaataagttaatagaagtagaaacattgacggtaactagtagagagaattaacaagctttactgcatcaagaggagaaaaaaaattgtgatcacgtttataacatataatcacattgctaaaatctttaaaatatctgttaaccttgaaacataactgatttatatagtttttgtcaatatacatatgaaccattatcttacttttcttttaaactggtatttcgaattaatgttttctggctttccagctgcataccattccattagctcaatgttctaggattttctcaaccatcctctgatttttcctttaatataaacaagtaaaatcacttatgtgcgttttaatagctcttcattgcaagtttgtccaccaaaagaatcatttcaattttcagtgctaccagtcatataaaaacgcacctgtaatattcccactgggattgagttttattatttcttgcctaattggttgaactcacagtatttttcactaaacccctggcctgattggagaaaagtgtctggtcccttgaggagatgcttcagcaaacgaggtcgcttgttatggaaataggctcttctctcactacatttctagatgatagaacacactcagattgatttcaccttcatcacaatggcattttatccagtgctggacacatgcatgctaagaactgagtgtactgtatgggtatttataatacccatattcattctaggaaataattatacatggctgggtatttacataaacaggagccttggagacctctcaagttcaaaaccgatggcattctatctcatttgaaagtcactggggtgggagaggacactccttaaaatattggatttcttagttttaatctgatgatatgctagctttatgaagatgtgagtgcaggccctcacctggatcgttgcttctctttttaataggaactagaaaatgaagattttcaaggtagcatctgggtgctcctaattgacttgattttatgtttgagaaaactaccttgacataccaacattggggtctctagaagtccagggagatgtttttcttcacagtgtcatataccctatcataagtgttgtgaggattaaatggaaaagcttctgggacaaaaactgctctgaagtgccacaccagactatactgttttaactatttctggctctgaagctattaagaataacccgtcactagcagagcacaaggctgtgaaatgaataagtgctgatacatttcaaagaagtaagatatttatgtgtgcatctctctggcaaaaactatcggggactcgttaggggtgtgtgtgtgtgtgtgtgtgtgtgtgtgtgtgtgtgtggtgtgtgctttatgtgttcattgaggactaaaaattagtattagtagtatattggcagcaatgttttgaactcggtggcaccaactaaaattgtgtgatttttatttcgtgcataatatttgagattattttaactcatcaccagatttcagctactatttatcctcatttataaggttactttttttctttaatgtggaaaataaacaaaaacataaaatggagaacaaaattttctcttaactgcctcacctagtgtaaaactgtaaccttttaaaatacattgaaaccatttttaattttctgctatgcttcttcctttttttgtatgtacatacacatggacattggaataccacaatattttagagtgtgtttgcttggtttttaaaataatgtatatatttctgatatatattatgttaaatatatatttatttttatacatttatatataagaaatgtataatatatactatgcctatataatatatatttcttcctttgagtgaaaaagtaatatgtggtagacacttagcaaaataggaaaagtatatagaatagccaaaaataacccctttaaaataaccaatgttatcagttgggaatagatccttctagccatatatgtatgcatatgtatatatgagatatagatagatgcattacttatcaacaggtataaaacaatattttctaactgaattttaaaacaaagaaaaattttgatacatattattatttttattatatagtggtaaaatatacataatacagaatttcacattctaaccaattttaagcgtataattcactggcactaagtacatttacattgttgtgcaaccatcaccagcagaactgtatctattcaaactgaaatgacatatccattaaacaataatgcactagctacattcttccttctcccatcccatggcaatcaccattctgctttctagctttataaatttgactcttctaggggcctcctatatgtagaaccatatggtatttgttttttgttttttgtttttgtaactggcttgtttcttcaagcttcaagcttaatctcttcaagcttcatctatgttgtagcatgtatcagaattttcttattacattgtgtgtgtgtatatatatgtatagatatatagatagatatagatgtgtgtgtgtatatatatatatcacattttatttatccattcatccatcagtggacacttgaattgcttcttcctttggctattgtgaataatactgctatgaacatattaccatgattgtacaaatagctgcattcctgcttttagttattttaggtatctacccagaagttgaattgccagattattgatatattttgaaatatttttatggcattgttttaatgactgtgtagtattctattatatgactatactgtaatgtatataaacaatcctcatgtattgattatttaaattttccattatcttttagttttataaagtacactattaacacggagcttcttgaaactaaacatttatgctctctggtcatttccataggctaaattttaagaaatgaaactatgggtttaaaaagtataaactttattagggcttttgttacatatcaccaaattacaccactgatttcccataaaaattttatagaaacaaacattaacttcgtccctaaatctaaattatataatcagttttccttctaagacaagtggagtcacaccattatgtcactcatagcccctaattccaagtgggatttcctgttcggctttagcaacagtatctaaaagtagttttgaactctggttttaactgacaatcacctgccccttcccttttgaatttccagatttcactctgttgagtgggtttatctacaataacttgcatttaaaaagccctaaatgattctgttgtgcagtcagatttaagaaatgcttttctaaatgtgtggtattatgtttatatatcgcactcttggccaggtgtggtggctcacgcctgtaatcccaacattttgggaggccaaggcagatggatcacttgaggtcaggagttccagaccagcctggacaacacagtgaaaaccccatctttactaaaaacacaaaatgagctggcgtggtggtgggtgcctataatcccagctatttgagaggctttgacacaagaattccttgaacacgcgaggcagaggttgcagtgagctgagatagtgccactgcactccagcctgggtgacagagcaagactctatctcaaatatatatatatatatatatacacacacatatacatatacacacacacacatatatatagcattcttaatctcatatatatataatatatatataatatatatatattatatatatatatgacattcttaatctgttaggttgttttccaactcatggggtcatctatcaagtggatagtgtaagtggcctggttggatgaggaatggagatatgggtacttaccctgaattatggaagataattagtgagatgactcaagaaagcaaatttagttattcttctagtcatggttaggataaaatgatgatgtaatttttgcatagagccaaaagaagcagcaaattagggatttcattataactgaaataggttagctgtgtttccatttttgctcattgtacaaactcagaaaccaattatatttatttatccagccattatttattaagtgcctacctgatatgaatccctaataatgagaccaagctcttcttgggcaataaaactctgaatattgcacatttactcttggaatcactggatttttgagagtcagagtatcttcttttataggtacctcgaccccagtgaagctctttttttttctcctgagtgatatagaaatatttttttatttgaagagaaagattatttattaaaaaaaaaaaaaggagaagagtaacttagcatttcccctcctttgttgttcagatgaagagtcagtctagagaagtcacgtgactttcccaatgtcactaaattctaaacagtggtaaagctggcactttttttctcggtctcccaagttccagtgcacaactcttcaattgcatgcttcctagtgatacttacatttgccagtatccataacttcaactgggaattgtaaagtgcacctcatgcactacaggtgacctgcagaaattgttttatttctcttccttgtgtttgaaataataataataataataataataataataataataataatgaacacagctttaaagtcagaagagtaatattggatttatattccacatgtcagcagtgagctggcatgggatagcagctgcctttttaacagagtaaactcttcagctttatagttcacatcactttgttgtttcctagacactggcattctcattttctgttcattctccaatttattcaatttttcttctaggagagagaaagattttccagtgtctacattttgatcacttatctcttaaaaataggaaaactacggatagactgataaagaattttgtggtttttttttttttaacatgtcaactattatatttcactgttttattacctgagagaggtggatggtttttaaaaccccaaactatgcagccagatgacccaggcttgaaccttcgatctgccacctactagtgatgtgtccttgggcagttacttaatctctcgtcaatatcttcttctggaaaatgaggattggtttccgtctcaggagtaactgtgaggattatatataaattatgttcaacacaaaatgtttgcaccaggtaatttctatataaatgtttgctattattacacatttttggggttaccaataggtattttagcttgtgttttctgccacagggatgtccagacaaagtagataactgaaagtgaaaagcacttgaggtattcttcaaataactcaaataattgtcatgaaaatataattgaaatggaaatattcatcatcttaatcttctagcaagtcaaccatcccccttttgatattttgtatattccttggccatatgaaaatatcattctctatggcctcaattgtattgtacaaatgaattcacatcatgtgtttttcatttaaaatttacatttaaatcttaagcagtttcccatgtcatgtagctgaaattaaaatgtaataaaatgattttgaatttcgtgctgctgtttaaacgttgaccttttgctactgtctattttctccttctgttacattggaaaattttctaagtagaaatcacttttactcatcacactaaattttgccccaaatattctgtaactaagaactttctgagtgcaatgagtgtgactttctttgtctcatagtgaatctagtaagcagctcaatgcctgttacatagtagactttcaataaatttctattgaataaataatttggattgaatttctgggatttgtggtattgtgtttacttggcagtaaattcagaatgtactttgttttagtacatgttgttaaatactatttttaaatgcattcgtctctttcctttcttagtaagtttatttaaaaattgccctttatttccagaggggatttgagtcagcatcaagtaaaacttacacatatagtatggccataaaaatgaaaacaagtacctcaaagtcttcctggaaaaataatagtatcaatacattccaaattaaaatcattaaactatttagaggtggaggggcactaatgagatgactgtaattaggcacacattacatattttacagaatttcttgattgtcaagtcaataaggaaaataagatagttcatattttttcatggtcagttataatctgaccaaagaaatgcatttttcttgggatattaaccttcattcattcatcaaatatttgttaaatgccagcttatgggctatgatatgatgaagcataatgaggaagcagcagggaataaaaaggacagtctctactagtatagaagcagacatatgcacatgtgatatgtacagggagggagaagtaaagagcacccactgtgctggaggattcaggcaaagtttcacggaggaacctgacattcagcttgagatgtaagacattcctaggaatcagctagataattcaaagacaatggagaagtgcattggtgtaggtatcattgttgagatgtgagagagcttggcacaatagacatgaaagaaggtcaatgtatctcaaagagaggtagaagaggtggatttgcatccatcattcccctaacctgttgaagatttttgagcaggaaagcaatatgattagatttgcatttgcaataaatcactctggctaccaaatgaaggactcattgaaaaacagtcgtggacattgggagaccagtttggatgtttttagagaattcataatgaaaaatggtggaatcttggcatgggattgtagtagtggaaatggtaaaatgtggacatatttgtgagttatggaattccctatttagagagtaggagcaacaggatttagttcttgaatggaaagtaggcagtctcagaaatgattcccagtgttctcctttgagcaacaactgggtggatgagaaaaccaaatgaaaagcagatcagggtggatgatgaaatctgtttttaatatattgagtctgaaaagcatatgagacattcaagcagacacatgaaatagacagttgaggatttgggcttagtattcagaatacagatgaattctggagacagaaattctaaagtcttcataacatagaaggtatatcaagttgtggccatggtcctggagacaatcgagagacaaaagcagagatctggtgtcaaataaagggaatcattattcagcggctattgagcaatatattgggtattgtcattagtaacaatttcacagaaagatttaagaagcattttatttttcgtaagataatattccatttgatgcagatagatagctttctggtaaactaggttgatccagagataaagattaaaaaattcccagggacatttggttaacattttacttccaatggttctcaactagagaggaaaccacctcctgatggggagtttggaaatgaatgggcacatttttataaactgtcacaatgactggaggacactgttatcatttatcgggtagggagcaaaatacattactgtcaaactcaagaagaccatagtactctgttgagagacactgataaactcttgtgccacatatgtttctctggcttgctgattgtgaagttccgagctgactgtcaagaacggtcacagaccttctctagattttcacctccacagtactctctttgtcctgaacctagaggagatgacggctctgcctctgctagttccatattatttccctgtccttcgtgactcctctgcaattacatggggccatgtacataatacctgtgtaaatcagatccttgagaagacctagttggtgtgtgctgtcatttttatttgaatcctgactcttatggctatcttttccacatatcatttgtctcaaatatagtttcctagggatctcatagttccagatttagcttcctgttaagttacaagaagctcttggatagagtggtatctttttgtttggttggtttttgtgttttgttttgttctgtttttttggatattcgtctttaaaagggtaaacttgtcatttacttttgtaatttaagcagcctggatattcttgtcttgttggtggaggggctttacctttctgcttgaaggtggtcccaatagtactaaatagaaacatagtttcctcattaagcaatttattaaaatatgtatgttcaagacattcctaaaaaatactcagttaagactccaacattctattacagaggacgtggaaaaggcattttgaacctagaaaaaatttaaggtcagatttttctcgtcaataatgccagtcataaaaaagtcagcgtagatgggcattgaatgaaagagggaataaagctttgcttttctttgatgactcaagatcagcagaaacccagagttcctattttgaacactttacaaacccaactataaatggagacagtgactgagcaactgggctgatgacaggcatgctctctgctgcagctgtaaagtctgccccaagaaagcagttcaaaatttgcatagtttgaaattgaaaaccaataacattcattaacaaaaaagaatatagacctaactccttaaaagtaactttttttttataagtttcttctttcagtctctttcttggtgaagacacacacacacacacacacacacacacacacacacacacacacacacactatttaaacatcctgaagtctttgaattaaagcaacagggcacaatttcaggagccattgctttcttctaggaaatacctcactattagagctctctttggagatgagaagatttttctcaactttattatgaattccattgtgtatgtgtgagcacgtttctgaatattttacatattataactgtatgtttgaaaatagaagatatatatatatatatatatatatatatatatatatatatatatataatttttttttcctttgcagttttacgtgccttacatcacgggagctggaaggggtagagaataggaataattttaaagcatatttatttatgttcttcatggttaaagaaaactatgccaacattcttctggcccacatattcaattaaatacatagtgaatcttttctacttactggattatttggtgcttccaagcatttatttttggcatttcatttcgtttttgtttttgcaggaatttttgaagttttattatgatttaacatttttattttgaaaatcgagcacattttaaaaattactctgctgtagctgtagtctgcccccaaaaacagatacttcaaaattcacctattttgaaaataaaaatgcaggtatagaaatttacatatacagattacttatttatctatgatttgttatgtgtatataaatctatttatacaatcatctataaatacagatatgcaaatatgttattttttgagacttaaatgtctgtagcaatcctttttttatgtggtatttttccattagtcattttctaagcctcttcaacatgtaaagctctgtgaggttaatggggggagagtggtgtcctaggatgatgaatagtgtgtctctccctgtcccccagtctggtagagaagctgtgcacaatagattagaccaaatagatttctacattttcaatcagaattagctgtggccaggagataagaacagacaaggtgcacccctgtgtgtctgccttctctcttggagcaggccctccacttccccttttgtttaagttcagataacatgttacattgtttatgtcactattcttcatgaccaattgtcacaaaacttttcctctatgttacttcttttagaagttttagtttcaggcctttctcatctttaaatcattaacccagttttagttaatgatgtcagataagggtccaatatcattcttttgtatgtgtatttctagtttccctaacatcatctattgaagaaattttctttacctatcatctattctttgccccctcatcaaaaatcaattgactgtatacacgtggatatatttccgggctctctgttctgttggtctgtatatcttgtttttcatgccagtaccatactgttttgattactgtagctttgtaatatattttgaaattaggaattgtaatgcctccggctttgttcttggcttcaagattgataaggctttttgtggtcttttgtggttccatgtgagttttagaattgttttttctatgtatgtaaaacttcattttggtatttagatagggatctcactgcatctatagataactttgggtaggatatacattctaacaatatcaagtctttcaacctatgaacacagatgtttatccgtttgtttgtgtcttgtataatttctttcaccgatgtttaatagttttcagtatataatctttctcctccttagataacttttttccaagttttttatgctactgtaagtagaattttttcctttctttccttttctgctattcgtcggcagtgcacagatatacaactgatttttgtgttcatctgtgaacactttgaaggcaagattatgccttatttgtgttctacatagtaataaataataattagcagttattaatatttttcatttattcatttttattgagtttcgttggcagtaatttttgctttctttctttcttttttttcctattctttttagagctccactggttcaacagcctctcctccagtttcgaccccagtcacaggacacaagagaatggtcatcccgaaccaaccccctctaacagcaaccaagaagtctacattgaaaccacagcctgcaccccaggctggacccatccctgtggctccaatcggaacactcaaaccccagcctcagccagtcccagcctcctacaccacggcctccacttcttcaaggcctacctttaatgtgcaggtgaagtcagcccagcccagccctcattatatggctgccccttcatcaggacaaatttatggctcagggccccagggctataacactcagccagttcctgtctctgggcagtgtccacctccttcaacacggggaggcatggattatgcctacattccaccaccaggacttcagccggagcctgggtatgggtatgcccccaaccagggacgctattatgaaggctactatgcagcagggccaggctatgggggcagaaatgactctgaccctacctatggtcaacaaggtcacccaaatacctggaaacgggaaccagggtacactcctcctggagcagggaaccagaaccctcctgggatgtatccagtcactggtcccaagaagacctatatcacagatcctgtttcagccccctgtgcgccaccattgcagccaaaggtaagaaactcagtaacataaggaggagaatacaggggtgcctatcttagtctgccttccccaggaagcgaagcctaaggcaaaagtgtgtgtgttacttttatttcactgacaaatacaatcccagggaaggatgagtgaagccagagaggagagagagactacttagtatgttactaatatggccactgtttagtatcaaatggaattgcttgctcaatctcagagaatcatcttccaaagcccacagacaccatagcatctgaggacaaagtgttctgatggagaaagagaaaataatttatttttcacatccttccctatattggttaaagcttccctctgttgtgcagaaacttcctctacaccttgcatttgcttggacattaaacaggtctgtagtatctcaagcctcagcaagggtagtgatctatgggtgagacatgtggagggcaaaactgagtgaactgctgtcaggctgtggccctgtgaaggcgattataactcccgcaatgttggtaccacagcggttgctgggccagaacaagtggccaaggacccaggaaatgggtgaggccaagcaggtctaagataatgcaaatgccttggacagtttctcctttgagaaggggctgcagtataatgcagcttgtttgtgaccccttgtttattcattttactaatcctccagaaagaatcttattcttcagcctttagcactattaagcaatgtttaaaaactccttatgagtgacagttacttcttatttgatttaattgtccatatgtggaccttttaagttaacactctctgttacttcgtctgaataggtaaggtgtaatactacacatgcccactcaccacaacttggatttttcattagtactggaaccaacacgatgttgattcctcccattatgactagaggaaccaataagaataacttggaatcggtgaaaatagaggaactgagccagtttccagccacttgggttggaagagtgcccttgcttcttttcagttagaactgtgagaaatcagaaatttgagagccctcaattagctagaagttcaatggtagttttgggggatggattgggtagaagtttggactgtatttttaaaaattctttccacatttttacaagattgtccatttcaagacagatctattcacatattcaacattgtatcaaaaatttccttatagggtatttactaaactgtttttcttatatgaaagcgtctgccatattaatggtgtcctatgtgaatttcacattctataggggaatagagctcttcctgacagtggggactgtgaagagctggagaaatcctatagccttatgtgtgaccactatatgaaattggccagccatgatccctttccgatagatagattccaaattagaattttaaatgattttaaacatgactcagtttcttaagtctctctatgaaaagaaatgttattacagttttttatttctttttaaaatgaatttgtccataatagccaatctggacagccttgctctttgttaatgtcgcagtatatttgcaccagtgcctcctggcccagtcaaggggagtctattttcaaaacaaccagttcagagaaacagattattcaacttaaccacagtttttgttttcaacaattgcaacagatttacccagggaagattacagtaaaataaaattttaggtcagaacaactgctgtcaaggtttaagttcaactagacagacaatttagccctgcccaaaacagggtgactgaaaggatggctgagtgatgttcctgaaggaatgacatggtgtctgccttgttggaggattgtgttatcccacataggaaccagacatgagagaaagcaaaactatgtgtcttgatgagactcacctggtgagaggtactgagctagtcttcagatgttgttttctcactaagtcactgggcactctggccagcctctcttcagcatttggaacccatccattggtgtaggaaaaagaatcagcccccactgctagaactggatctaaagtgctgggtccagccacatccctaacatttggcctgtcctcaccaactgacacagggagatggaatgaatttttataaaccactcatcagaaaacatggaactttattttacttcttatttgagcaaggtggttattcaagatgatctattagatgattacagattttggatatcagtagatttcatgttatttttaaaatttttgatatatttgtttttcaacagtttcatgtgttttcacatcatattcggctgtgcattgaaaaaatgaaaatcaaaccatgtacttttcactctgattattaagagtggttagaggttgatatttagccatctgtcctgtctgtgctttgggaaagggggaagaggctgatgaagttatggataaattctgggcgcgttgtgagggcattggctgatgaaagggtgggttccttcacagttggcctttgagcaaaacactactgtattctactgcacctgtgcacagaggaccttattgtccttatattgactgtttggcttaattatgtgactacgggcatgagaaatgagctccgaattcttatcccagttctttccttgacattcctcttccagtttgaggaaaacctctagacctctttatgtcatgcttcaaacctcagtaaagtagaacaccatctttactaattaattaatgattgcaaaaggcttggaaatttccaaaggctgaataattgccaagtgaagactattcagctttccactcgctttcatttatttttaattttttttagtcactgatggaaaacttaccctcatgtctgaaaacaattatactttattacattgagtgcttctggggagtttggcatttaacccattaaggaaaaagtttaaaagatgaaataaataaatctcccttatatttgagatgagctgctttagttttcctatatcaggatagtataaaaagaggaatatgatatagtaaaaaagaggagagacaggatggggaaaaggagaaaggaaagaaaaaatgaaaaggaaaaaatgaagaaaggaaagaggcagaatgagaacctgcaaggcttaggggatcatgattatgtttatgttcccataatgtgctaagcagtgaatttgcatgctacagtgggccatactgtatttcctataccatctgagcagagttccttgaaaaatagtgttataaataagtctttataaggtagaaatgttctcttctcactggaaatcctcttaaagatgcagtggaatctcttctctttgctgatttataaaagctaatgtcagctacatcttgccatgtagttcacagaactcgtgtcctgtgcattttatatatctatatctatacctatatctatatctatatctatatctatatctatatctatatctatatctatatatatcgctgtgagttgggagccacgttttctccagtatttagataaggtggctcagcttgaaagttccagtgctaggacctggaagctagtcacaactctcaagtctaaagtgaccaggcaactttagcctccaattatcataaaaactcatctccgtcagcctcagctattaaagggacaggtatttgctacataatgtgtagaagtgctggggctgtgcattccagggaagttggagaatcttgtcccaattagtgtagaggttatgttaaattctgaaaccatctactattaaaattttcttggaaaatatttcaggaagatgagaccttggaggtcaactaaccatctttcagtaaatctaaaagtttttcttttccagaattagaacagattgttgcttttcatttggatttcgagtttggggcatattttatgggtcagagaagagtgtagaggtaatgaactgttgtggtcagtgttgaaggactttaagatctgtaatttctgttaagattaaggaaacagagaatgttcatacactaccactttgaacattccagtagtatgagaatatttaaattaattttatttatttatttatttatttatttatttatttattttttgagagggagtcccattctgtcacccaggctggggtgcaatgacgtgatctcggctcactgcaacctccacctcccgggttcaagtgattctcctgcctcagcctaccaagtagctgggattacaggctcccgccaccacgcctggctaactttttatatttttagtagagacagggtttcaccatgttggccaggctggtctcaaactcctgacctcacgtaatctacccatctcgacctcccaaagtgctgggattacaggtgtgatcccaccatgcccagcctgttttaatttttgaaaagagaaagttatatacattgattgcactctaaagaattgttggcatttggagagagttatccgtatggtaatccctgtgttaattatgtctcaattctaggatcagagaaacaaaatggaagagatgattagggtgggcagaggaatgaatgcagatagatccctcaagtcagtagctaacactagaatacatgtgaagatgagaatggtagatattgcttgaggccagtgactgtaatattagtaattcctctttgtacagactttttagtttccaaagcactttgtggagctcacaaaatccatgatcattaagcccaagtagaggtctttgtctttctttttctgatgagggttcaaaagcccagtgatgagagccactcacttaacgtcatatgtcaaattcatcggacagccacagctccaagtcaggtcttctaaagattgttcccatgctttgaccgtggcaagtgactgaatgttggcatgctttggatggcaggagctcctcatcagcgccagtgtacatggctccactgtgacccatgttacctgcagagattaaagtgggcttaggcagtcaccatggcctttggataaaatcagcggttggaggggaagcacccattaaatccctgcctggcacccaggcctggtgccttagagctatacttccccatccccatcagtcacataaaatttgtcccgaggttctttctaccttcactaagtacttaatatggagttcagtcatccccatttctcacttgaaccattgaaatggcctcttacttagggtttcctctggcagtcatctctgtacccatacatcctacatgtaataccagattaatctttctatggtaccttatcattaattgccttttgcaaaaaccttaataagttcccaaccagttgcagaatacattgaaatcccaaactggatttctagttttatctctccccagtatcctggattccagctgatatgttacatttttagttaattctcacctctatggctttgctcaccaagttccttcttcccagtccttccccaaataaaatctacacatctaaaagtgacccattaagatccagctacagtgttaatttctcccataaggttttctcctcttcctaaaagctagttgtgtgttatttcaccctctcttttagatgttttcactcttttactgtactggagtcatttgtgttcctgtcttctatcaacctatatccaagcatatattagactaagttttaggagaatatcctatgtttctagaaacatatgtatgtagtaactatatgcttagttatttagcagaggtttattgaacattgtgttcactttgaagaattttggtagacactctgtagggccctattagtgtttaagacattgtacagctcaggtgcattttcctttaaggatgcatttaacctgctagatgtcatctcatttttaagaccagagaaaaagagagcagcatctgttgtttcttgactttttaataatagccattctgactggtgtgagagatggtatctcattgttgttttgatttgcattcctctaatgatcagtgatgttgaactttttttcatatgtttgttgaccgcataaatgtcttattttgggaggtggctgctcataccctttgtccactttttgatgaggttgtttgtttttctcttgtaaatttgtttaagttccttgtatattctcgatattagacctgtgtcagatgggtagattgcaaaaattttctcccattctgtaggttgcctattcactctgatgatagtttcttttgcaaaagctctttagtttagttacatcccatttgtcaattttggcttttgttgcaattgcttttggcgttttcatcatgaagccgttgcccatgcctgtgtcctgaatggtactgcctaggttttctcctagggtttttatgcttgcttttgggttttacatttaagtatttaatccatcttgagttaatttttgtataaggtgtaaggaagtagtccagttttagttttctgcatacagctagccagtttttctagcaccatttattgagtaggaaatcctttccccattgcttgtttttgtcaggtttgtcgaagatcagatggttgtagatgtgtggtgtaatttctgaggtctctgttctgtttcattggtctatatgtctgtttcaataccagtaccatgttgttttggttactgtagccttgtagtatagtttgaagtcaggtagcatgatgcctccagctttgttctttttgcttgggattgccttgtctgtacaggctctttttcatttctatgggttttttttcatttccgtatacgttttagcatcagtttgttgttgtccacaaaataggctgctatgatttggagattaccttgaatctttagatcaatttgaaaagagccgatacgttaacaatactgggtttttcaatccatgaagatggcctatctcttaatttatgtatgtcttctctaatttctctcatctacatatcatagttttgcatatattttggtaaacttgtccttaagcacttcaaatattggatgctattgtaaatggtattttaaaatttgtttataatcatttgttattagcatatagaaatagcaatagatttttatatactccctttgtatcctataacttgttaaatgtaatagttgtactagcttctttaataagacttcttaggcaattctacctgatcattttatctgaaaattgttgatgcaattgtttatttcctttatggataagcctattcatcaacattttatgtttgaaagatttgcttgctgattgaaaaagaaacagcgtgatacaactttaaaggaaataagttggaaaaaataagaacctttcctctccacttccataggctagcctacgtaaaccatcagacatagaagcgattttcagaatcataagtcttaaccccttacatttacagatgagaaaactgaggcctgaagagttacagtgactttcagagttatgtggttagtaaatgacctcatgtgaatgcaaaatgtaactcttctattctgcagttcttctctatattggttaaggatagttcaagacagaggaggtcagaagtaagtgacctttaaaaggtgtaataataactattgtcaggatgatcttatttcctatctttagaaccccatcatcagttttgtaaggccactgaataatagaaaatggttccgattctggtgctccctattctgtctcacagctgctcctgtgaaaacactcgttcatgggctctgtgtaattttgactcagtccataatctctctatcctgattttaaaagttatcatcagaatggatgtgctggtatactaagaaatgtctgtgaatattatttatttattttacttatctaatcattttcatagatttggttgtttaaaaataccccaggtctcaaatccctttggaaagttcagcaaatcattttaacaggtaattctggcaatatgtaattctttgtgtttacagagtgagagaaattctatttatcagtgttttttctttgttttgttttacttcagttctaagcaaagcagttattttgcttattgacatattgatatattcctttgggaatctcatttctttcttggccagctacaaacactcatactgtccaatttcaacaagagactatggttattctcttcttcaccaaacaaagaaatttgaaccattattgataaataatttctggtgaatattaaagctttgaaatgttttgcacacacagtgttaggaagtgtcttagagtgaaagacactatttttactactatagtatcaaaagtgccattgtcccacatacaaagatttacttgttaccttagttctttgatttttctggagtacagcaaccccaacttttagaagtactcttaacaaatgatacagtgtttgatctgtttcatctttggacttcagagaatgatcttcaaataatacagtttggtttatttcagaaggttgcttccttaaaacaaaattttgaaaatatgagataataacatttaacttctttttcaatcacttataaaatttacgaaacactctcatataagaaaaactctgtaagttgttcagaggcaacttctttagtatcctaccaatactgaatacctaagggagggtaagaactgacgtcgcctcactgccagcccagtgttctttccactctgtgaaacttgcctccatttgtagctgtctgtgtttgtatatattagctctattttgtgtagagttgtccaaacataaaatattcctttggcgcagagtttagagactaaaacttctgagtagtatttccgggacataacatatatttaacattatttgaaacccaagattcagtcaacattgctattaagagttaaggagctgaaactgtgcataccctaagtctgaattcaaggtaagaggtcccttgttattcagtctttataagtgtttggtatatttatgcctcctcaaatatgacaccatctttttttaaattcacatttaaagatgattgtaaaacaagaaggataaggtgtaagtgtggtagttgttttatttatggatttatcagttagctgttacttattttttgtggttcataatgcaattttaacataagtctgaataagtttactatagatgatattagtaggttttaccagaggaaaccatgcttttttattttatttttttctttttctttgagacagagtgtcactcttgtcgcccaggctggagtgcagtggtgcaatctgggctcactgcaacctctgcctcccgggttcaagtgattctcctgcctcagcctcccaagtagctgggattacaggcatctgccaccaggcccagctaatttttgtatttttggtagagacggggttttaccatgttggctaggttggtctcaaactcctgacctcaggtgatccactcaccttggcctcccaaagtgttgggattacaggtgtgagccaccacgcctggacagaaaccatgctttataatcctgctacccaccccatccaaagcacacaaaatattagttaagtaagctactagaagacaactgaggctggtggtctctgcaggggcagaaaaatgggaactggagaggagttcaggaaggcagcccagagaatatgaagcaggacccagcacacaacagcctgtgggccacatgtcacttgccacctgattttgtaaataatgtttgcttgaaatacagccatactcgcttcattccatattatcaatggctgctctcacactataacagcagagctgagaagatgcaacagagaccgtatggcctacagatattaaaacattttctgtatatcattttacagaaaaacattgttgactgctggtcaaaaatatgggaagaacgtcatgaaatttagattcttattaaaagttcttgaacatccctgaactatttaatattatttcttgtccagcagatcctgaatcttaaattagaagttgtgacagtaagtggaaattttcagggaaggaagaacagaatatcaaaatcaaaaattaacatgctatgtgcagagtaggttctatatccctcctttttttcccaccctggtaaactcttatttaaacttcaagatctgtctctaatattaacttcttggagaagtttgaccattcttccagttcccacatattattagcttatctttcctctgattttttctcatagcattttttcattcatttactaaaatatgcactaaaatatgcacctcattcagtatttttatataataacattttaagataatttgcatacagtataattcgcccatttaaattaaatggcgattaaattaatttaatttaacacaattaaattatttttagtatattcacagtatattttactgtattcttaaatatagtatatgtgcaatcattatcacaatcaatttctttacaccaggaagaaatcctctaccaatgagcagtgacttttctttttccccaaaccctctaagtctaggtaaccatgaatttaatatctgtatctacagatttaacaattttggacatttggaataatactatatatagtcttttgttactggattcttagtataatattttcaatttccattcatgttgtagcatatgtgattgctgtattcctttttattgctgaataatattccattgtatgaatacatcacattatatttatattttcatcaattgatgaacatttgaggtttttctatcttttggctattataaataatgcttctatcaatatttgagtagacatatgttttcagttttcttgggtatacacctaaaagtgggattgctgagtcacatggtaatttaatgttcaacattttgaggaactgctgaaatgctttccaatggggctaccccattttccattcccaccagcagggtatgaggatctcattttctctgcaacctcccaccgcatttgattttattcatattatgtgtctatctctcaaatacaaatccatgttcttcaagagtggaaaccatgtctgtttcagttttgtttctgtatgcctaatatagtacattgcatgtatcaggcactcatgaataaatgaaagagtcaaccaacaagtgaaataacacctactgaattgacatggaaccacatagagttcctattatcaagagttgttgggttgatgggtgcagaaaaccaccatggcatgtgtatacctgtgttaagaaacctgcacattctgcacgtgtaccccagaacttaaattttttgaaaaaagcaattttattccaaaaaaaaaaagagtcgtttatgtgggcttaaatagctgtgcttttataaatgttcttttttttaatttcagcttttattttagatacaggggatacgtgtgtgggattactacatgggtaattggacccaggtggtaagcatagtatccaataggtaatttttcagactgtgccctctcccttcctccccgtctggtagtctgtggtgtctgttattctcaagtttatgtccatgtgtgctcagtgtttagctcccactcataagtgagaatatgtggtatttggctttctgtccctgcatcaatttgcttaggattatggcctctagctccatctatgttgctgcaaaggacatgatttcatgattttttttgactgcacagtatttcatagtttatatgtaccacatttttttaaatctagtctaccatttccagctatgttcttcatctttctaccattcacatcctagtgcgtgtaaccgataaattagtattcatttagatggactccattttattttattttattttattttgagatggggtctcattctgtcgcccaggctggattgcagtggtgcagtcttggcttactataacctccgcctctgggttcaagtgattctcctgcctcagcctcctgagtagctgggattacaggcatgcaccaccacgcccagctactttttgtatgtttagtagagatggggtttcgcattgttagccaggctggtctcaaactcctgacctcaggtgatccacccactctggccacccgaagtgctgggattacaggctgggattacaccactattttttaatggcattttagcagttaaaaactgaatgctctaaaagtcagggatggcatgggcacaggtgaaagatgaaagttttgtctatttctatttctatgatgaaatcagttgggttaacaagagcattcttctaagcagctagagattctgttggtctcatccagccatcacccagatggcaatacaaccagtaaaaggcagataatggtatctgtttttgcagactttatgttcacaccagtgtcactcatcttaacctggactcttgtcatcagcttgatatttcctcactttcctctttctccccttttcaagttatagctgtgccttgacatgacttacccaatactctgtattctcttcgtgttcattaataggctcattttccagaactaacattggggcatttcaaggactttttacgtagcacatgagctgcttacaacgtaattctgtctagttgggacatatgtcatttagccagattgtttatggcattaccacagccaagcatatattagtttcatagtaatttctagggaaaaaaatgtggaggaaatatgtggtttttgttatacttgcaatgttactatattactgcttttttttaagttttgatttcaataaatacctagcatatattttcagatgccaaaggacatacaatgatgaacaaaaactcagctcgtcctcaaaatcgatatgtattattggtgatgctggactccacccactcatagatgtttctcattattgtgaaacattactttttggaaaaagagagctgggccaggcacagtggctcacacctgtaatcccagcactttgggagaccgaggcaggcagatcatgaggtcaggagttcgataccagcctgaccaacatggtgaaaccctgtctctactaaaaatacaaaaattagccaggcgtggtggcgcatgcctgtaattccagctactcaggaggctgaggcaggggaatcgctcgaacctgagaggtggaggctgcagtaagcccagatcacaccactgcactccagcctgggtgacagagagagactccatcttaaaaaaaaaaaaaaaaaaaagagagagctaacatcttcactttttaaggaaatagacattgcccccatgattgtatggatgactagatcatttaaaacaaaaattacataagggcttaaagagtggctcttaagtgtaaatgctaggaagcacccaattagttattatttcctgtatgtgttgccttcatggacattggttcatatagcctcaaaaagtctatgaagatactttttttttttttttttgaaagagagcgtcactctatctcccaggctagggtgcagtggcacaatctcagctcacttcaacctccgcctcccaggttcaggtgattctcccgcctcagcctccagagtaggtgggattacaagcatgcgccaccataatcagctaatttttgtatttttaatagagacagggtttcactatgttggccaggcaggtctcgaactcctaacctcaagtggcccacccgccttggccccccaaagtcctgggattacaggcatgagccaccgtgcccggctgaagatactataaacatcttgattttttactgagtcagaaactgagaaagggaaaaaattatttgctgaagactgcatgcctcaagtttatacccattatactacactgcctgcttgcgaaagtatgttttaaaaaattgtcactgctgtgcagcaactcaaattgtcactgctgtgcagcaactcaactttaagtcttaaacctagttatcttttatcttgagcaggacatatatgttaagctgctgaggatgctccttaacatgaggccattgggcgggtgtgtgccagacaatcctcctagttgtttctctaatacagagcttcaggtcgtctcttcctttttcatcttctagcctgccctggccaagtacctatgaatcaaccggcaaggcgaggggtgtatttggtgggctatagagtggaattaagcagaatatcaaaaattttagccaataacattgaacctcaaagaggaaagtactgctgagttctgatagatgcaagacaagctaaagacctccttagctccattgttctgcatcagcacaatatgtcctagtgagaaggaaagacatagcaaaactaaaaatgacctgtttttcaagagcaatgtcttttcacccaaacttgtgaactgcttgccaaaagtcaggactaacattgttttgtacatttgcattaaaagaaattatatcaccgttgaagagctgatcagagaaagggtataggaaaaaggaaatgttaaaataagctgtaaaatccagcccatttatatctggagtttagaggcagtctaacaaaatgaatgttccatttactaatcacatttgccatttattcaaaacaaacacggcttgagagaggattaaataaacatccaaaaactgtcgttcttgaaacctttggatagaacattgagttgcattcctgcaggagaaatgccaagtgagtgagcctagtccaagtttgtttagaaagccatatttgggagaaccatggaagtgcgaacctgatcatgtgaaaagcccaggactgttcagccttctgtggcagttctgtgagttctagtaccagactattaatagggagtcaagtagaaatatccttccttcccctccctccctccttcccttcccttccttccttttccctttccctttccctttccctttccctttcccttcccttcccttctccttctccttctccttccttccttttccttccttccttccttccttccttccttctctctctttctctcttctttggtgtgctgagaataatctgcagacagtgactctacagataagattgcaaatattttcccttccttcattccttccttctttcctcccttccttccttctttccttcttccttttttttcttttttaaccacatgatttctatttcctttagcaagatgttatcatgtgagggaagtcttaggtttctatatccctttattcttagtgttagcatttcttattaaagacagatgtctagttttctattttaagggttatctaatttcagtcataaaaatgtcctataaattaagacataactttgtcaatactcttctagaacataatagctaccccaaaatatttgttcaatgatgggaaattcattgatatttagaccttcagagatgaaataaatatgttgcctttgcttttcaaagatgccatcttgcccattcataagaaaactaagacccacagaatgactacccaaggcctcacagtataattaggactttaacaaaaatccataaaacctctggtattgggatatttaagataatacattgatatatactttatcactgtctttgataaaataacagtaaaaccattttaatgggacacatttttataaccattgtgaatttggtcctcaaaaaagaactcactgagatgatgagataatgcatattcatcctcttttacagatgatgaaacatttcggagaaggcaagtcagttttccaatttttcatactatatagatcattgaatctttgtcccttatatacagaatcaacaatatgaaatatgtggaacttgaaatcatagtttccaacttttctgcctatagaatgcccatttccagttgcttaacatttagattgataaacatgaaattcattaaacaggaaactgaataagagacctggactaatatttaggtattacttagtattccatccaagaagtgtctgcagacagtgactccatagatgataaggttgcacatatttcagaagccaaataaatgttgtgattaaatgattcaagtctgttaaccatttggtagttatgatgtaaatggctgttaaatggaaagcatttgtaaaaatgtatgtgcaaaaataaaggatttctaacaaaccgaatgggccttacctattttagttaatactctcaataatgagcagtgagattaatttataagtatgtgtgtgtgtgtgttaagatatattcacattttatgaaacctgaagctttgaagcttatcactgtggaaataacttctgtatgcataaaagtattatattatttcggtaggactgctataacaaaatacagtcaggccttcatattcaagtaggctgcattcagaattcaaccaactgccaatggaaagtgtttgtaaaaaataacaagtaacaataaaatattagaaaatactacaaatttcaaaatacaatataacaagtatttacctagcatttacattgtattgggtattttaactaatctagagatgatttaaactatgtaagaggatatgtgtaggttacgtgtatagcatatcatatatataagggatttgagcatccatagagtttggcatctgcatggagtcctagaactgatcccctgcagatatgaagggacaactgtaccacaaactgagtgacataaactacagatttttttttcctcacaattctagaggctagaagtctgagatcaaggtactcacaaggttgctttcctctaagagctttctccttggataaaaatggccaccttctctctgtgtcctcacatggtctttcctctgcttctctgtgtcctagtccctctttttataaggacaactccagtcgtattggattaaggtccaccctagtgctctcattttaacttaatggcctctttaaaggccctttctccaaatacagtcacaatctgatatactaggggttaggacttcaacatattaatttgaagggagacatgactcagctcataacaattatgtaggcaaatgaacatttattttaaatgacagaggaaatgcaacatgttataaattaataaaagctatgaaatacctcaaaaatcacattaataaaagctatgaaatacctcaaaaatcacaaaaatcttgaaaaataacactcttatgaattaaattcctgattactttttcttacatttttagcagcatattcattgattaactaactgtacaacctaatttcataatattttctgcagagagaatacaaagataatttcatgctgagagtttattactaccagtcctgccttacaacaggtccttaagggaatgataagcatgaaagactgttacctacttctacaaggacacctttaagtacatagcctgctaacactataaagcaactatactatcaagtctacataagaaccaggtaacaacatgatggcaagatcaaatgcttatatatcagtattaatcttgaatttatgtgggctaaatgccccacttaaaggacaccgagtgtcaaattggatgaaggagcaaggcccaactctatgctgttttccagagtcccatctcacatgcagtgacacctttaggctcagaataaagggatggagaaagctctatcaagcaaatggaaaacaaaataaagcagaggttgctattctatttcagaaaaaacagactgtaaaccaacaatgattcaaaaggacaaaaaaagggcattacataatgataaagggttcaattcaacaagaagacttaacagttctaagtatgtatgcacccaataagggagcacccagatttataaaacaggttattagagaactacaatagtgggagacttgaacactccactgacatttctagagagatcactaaagcagaaaaccaacaaagatatttgggacccaacacttgaccaaatggacctatgagacatctacagaatatttcacccaacaacaacagaataaacattcttctcatctgcacatgacacatactctaagattgactacacacccattcataaagcaattctcaaagaattcaaaataactgacatcataccaaccacattctcagaccacagtgcaataaaaatataaatcaatactaagatctctcaaaaccatgcaattacatggaaattaaacaacttgttcctgaatgacttttgagtaaagaatgaaattaaggcagaaataaaaaaaatcctttgaaactaatgaaaacagatacaacataccagagaacacagctaaagcagtattaagaaaaatgtttgtagagacaaacacctacatctgtaagttagaaaaatctcaacaacctaacatcacacctagaggaactagaaaaacaagaccaaactaattccaaagttgatagaagaaaataaatagttaaaatcagagctgaactgaacaaaattctgatatgaaaaccatacaaaagatcactaaaaccaaaagctgtttttttttgcaagaataaataagattgtcagactactagctagattaataaagaacaaacaaagagaaccaaataaacacactctgaaatgacaaagggtacattaccaccaaccccacagcaatacaaaaaaccctcagcgactcttatgaacagcactgcagacatacattagaaaacctagaagaaatgaataaattcctggaaacataaaacctcacaagattgaagcaggaagacattaaaatcctgaatagaccaataatgagttccaaaattgaatcagttataaaaaacctaccaaccagtaaaagttctggatagaccagatggattcccagctgaattctaccagatgtaataagacttgctggtaccaatcgtactaaatagcttccaaaaatcgaggaggagggactcctccctcaatcattctataacgccagcatcattctgataccaaaacctgacagagatagaacaaccaaaagtgaaaacttcaggccaatatccttgatgaacatagacacaaaaatcttcaacaaaatactagcaaattgaatccagcagcacatcaaagagctaattcaacccaatcaaataggctttagccataggttgcaaaattggttcaccatacacaaatcaatgaatgtgattcatcacataaaagaactaaagacaaaaaaccacatggtcatctcaacagatgcaaaaaagggttttggtaaaattcaacatcgcttcatgttaaaaaccctcaacaacttgaaattgaaggaacatacttcaaaataataagaaccatctatgtcaaaccctcagcctgcatcatactgaacaggaaaagctggaagcactccccttgagaactggaacaagacaaggatgcccacttccaccactcctattcaacatagtactggaaattctagagctccaaatagaaagagagaaagtcaaactatttctgtttgcagatgatgtcattgtatacctagaaaaccccatagactctgcctaaaagctccttgatctgataaacaacttcagcaaagttctagacagaaaatcagtgcacaaaaatcagttgcctttctatataccaataatgtccaaactgagacccaaatcaggaacacaatcccattcacagtagccacagaaagaataagatacctaggaatacagctaaccagggaggtgaaagatctctataatgagaattataaaacacagctgaaataaatcagagatgaaacaaatatatggaaaatcatttcatgttcatagataggaaaaaaatcaatattgttaaaatttggggcagtcatactggccgaagcaatttatagattcagtgatattcctgtcaaactaccaatattatctttcacagaattagaaaaaaaaaatattgtaaaattcatatggaaccacaaagagcccaaataggcaaaacaatgctaagcagaaaggacaaagccagagtcatcacagtacctgacttcaaattaaactgcaagactgcagtaactaaaacttcatggtactgggacaaaaacagacacataaaccaatgaaagaagctagagaaacctagtaatcatgctgcacacctacaaccattgatagtcaacatttgtcaactcaagatggattaaaagacttaaacgtaagacctaaatctataaaaatcttagaagaaaacctaggaaattatattctagaaatactattctaggccttggcaaaaatttcatatgaggtctccgaaagcaattgcaacaaaaacaaaaattgacaagtgagacctaattaaagagcttctgcagcacagcaaaacaaactatcaacagagtaaacagacagcctatagaaagagagaaaatatttgcaaactatgcatctgacagaagtctgatattgagaatctatatggaactcaaacaaatcagcaagcaaaaagcatccccatttaaaaatgggcaaaggacatgaacagacatttctaaaagatgtgcaattaaccaacaagcatatgaaaaaatgctcaacatcagtaatcattagacaaatgcaaatcaaaaacacaatgagattccttctgacaccactcagaatggctattattaaaaagtcaaaattaatagatgttggcaaggttgtggtgaaaagggaatgcttgtgcactcctgttgggaatgtaaattagttcagtctcactgtggaaagcagttcagggatttctcaaagaatgtaaactagaactaccatttgacctagcaatcccattactgggtatatacctaaaggaatataaattgttctattaagttggtgcaaaagtaattgtggtttctgccattaaaagtaatggcagaaacctaatgaaaagacaaatgcacttgtatgttcattgcagcactattcaaaatagcaaagacctgggatcaacctaaatgcccatcaataatagactgggtaaagaaaatatggtatgtatgcaccatggaatactgtgcagccatgaaaagagcgagatcatgtcctttgcagggacatggatggagctggaggccattattcttagcaaactaacatgaacggaaaaccaaataccacatgttttcacttgtaagtgggagctaaacactgaatacacatggtcaccaagaggggaacaatagacactaggacatacttggtgtagaggctaggagaagggtgagggtcgaaaaactatctattgggtactgtgatcactacctgggtgatgaaatagtttgtacaccaaacccctgggacacacaacttactgatgtaacaaacctgcacatgtatcccctgaaacaaaaataaaagttgaaaaagaaagaaaataatgtttatacttagaaaaaaaattatctttcttctagcctgagtgataaacattttttattattatagtttttaaaagtttggaaaactgcctttaatctgcacaacttttattagtattgttgtttgaaatttaagataatcaaatttggggacactcctattaagtttcttttatttgtgagctattacaacacccttactcttactgcagattcatagctgatgagttctattttgtgcaattagcatcaaaaagaaaaatcaagtcagccgtgcatttataattgtgttcagtgcattactaagcacattcctaaagagaaagtatctccatttgcatcatcgaaaaccaagtagtactccacatgtatacttttacacatctgactattggttgaatttccagcagactcaatttctgtctctatgcattttactcctgtttgtctcctctactagtctaatttccatgctgggtgttataggacacattaatgacacgtgacttctggtcccacaaatctgtgtcacagagctaggacagtaatgggcccaggcacattgaagcattccaggaactcattcctatacaatgacgatgggtgatgacttaagcacacaccatagtgactgcagaccatgtaaatatatcccatgacactcagctaaatgtctccctgactcaacctttcttaaccaatctcaaaggtcacatgttgattctaacatttccctacatgagcgtacacagaagacagagtagaagaaccatagtgaacatacagcttggtcccctcccaagaccttagtaggggccagtgtacatgagggcccctgaagcttcatttccttcctcgtcaaagcatgtttatttaaaagtatttattttactctggatacttcctcagaaatagttattcctttccttttttccctccctctctccttacctctgtcttttcctcaaacatttatttagtgtatactatattctagaccccatgttgaagaataagatacatatgctgatgtctacagcactgcatagaaagtaatgggtaacctaagtggttacaaataaaatctactagctatcctggtgatttaaaggccaccttcagctgaatgttcaggaaaacctttatgaggaagtagcatttgatctaacctataggaccggtaggatagggcctgggtggggagactgggagatggaaaggcattccagtgtgctggtgctgcacatggtgggacttctatcacatgtattctctatctgtaacagttaaagttttttggttacttggcctgggtaatggcaaagcaaatgtactaaaagaaactctggttttgtggccacctcagttcctttggagaatgtcctctctcagctgaagctgagaacatccagtcacatttctgttctggaaccccttaagctgtttctgtgacaacatctgaaagaattaagctttatccaagtcaccagaaaagggcttacgttaactgttttcactaagactctacgtttcaatactaacacttacggacaagtggaaggtattcttcagttgtatttggtagttcttctgtagcgccccttttgtcttcctccatttctctcttgctagccctcaactctaccccacgttcgttttcattatcttttttctcatcccccatttcctgcttatttgtttattctggtggctcttctctctctcatagacgacatagaagcatggccttctttctgaactttccttgacccagagggagaaaagtctaacatactatcttatttatgcaatctgaggaaagttgttggccagccatcacccagtgtgacctagtgacagaaccagtagggatatctgagtgttcagtctttgaatgattcttccaagtcatatagatgtgttgattacttcaatcttgaacaagatatgttgtcactatcatactgggctatgagtacttgagaacagggaactgtgtagtaaaattcaccacatatgctggtagcacacaggcatcaaccagtctaaacagaacccacccgggtcacctcccacgtcactgctaagacacagttctttacacagaccatgtaaatgctgttgtgttgttttgtcaaagcttctatcactcttcttgctgtaatttgagaagcaaaagcattaataaccagttacttacataactggtattgtaaggcttactggtggcagacagcattcctgtgagcagtattagcacacctctcgatgagaatggctgtgaactacattctttggagtaacaataagaaagactatacaaaacctggtcctctgtctacagtgaatgaacacgctcatcttttcttcccacagtgatttttttccagataacatattctaatggcatgagtatattaaaataaagtcagatagggtgaggaggggcatgctaacaaaaataatctgtcactcttgccaaatggaggtaatacagtcacaatatttacaagtaaaatggcagggatgtaattgaaagtacatctatatatcatctatatatcattcatatcattcttcaagctgttatcacagttccatctttgactgatgcctcttcaatatgttgtataatgtactatagagttattcctttttactcttttgctcatggaaataatttgaaggcttttaaccttctgatctcatttttcactttgttccagacatggcttactctctctgccatggaactatcagataaaatgcataatttgattagaccaaaactgtactaccatcagtctgtcggtcaacacaagatatattttaaggggatctacacaaaagtctgcatgaaaatattccatataaagaatagttacataaaccttaataaaaagaaaatactgggaagcacttagtgtctcagattctggaatcaaagctctctttcttttcgtttcttttctcagcgattcaaatgaccactctgatattttctttgccaaattaactttagcattggaggggcgtttatatagtatctggcttaaagctattatttttctcatttgctctgcagacatttattgatcacttactgtgtgccaggccctgtgataggaatggaggtagagaagacacaatcccttgccctcaaaggtttcagtgacagaagaaatagatgaagagaatgaggcctgaagtcatttgctcatggtcctacaggcacagagcaggggtgcccaacccccgggccatggacctctaccagtccgtgacctgttggaaccaggctgcacagcaggtggtcagtggcgggcaagtgggcgaagcttcatctgtatttacagccactccccattactcacattactgcctgaacttcacctcctgtcagattgcagcggtattggattctcataggagcgtgaaccctattgtgaactgcacatgcgagggatatattttgcgtgctccttatgagaatctaatgcctgatgatctgtcactgtctcccatcatccccagatgggaccatctagttttgggaaaacaagctcagggctcccactgattccactgatggtgagttgtataattacttcattatatattacaatgtaatagtaatagaaatagcatgaacaataaatgtaaagtacttgaatcaacctgaaactatccccatgccccaatccatggaaaaattggagaccacagaactggtccctgatgccaaaaaggttggggaccactggcatcgaggatagaatagggaccagaaagagattgtgcagccgtccttctagatctggttcttgtcaaccactccatctccctaatgtgggacatggcagaagagttacaactagagtaaaataattcttgttgtgagttgcaaactttatgggctccatgtttaaattatattattaaaatatgtattttgtgtttgatattaatctcatagacatttaggagaacgattagatttctgatgcctctaggcattcagaagtctctaactcacatgctgcattgtctgaaaggttctattttgtgatagtgcttcttgggcatcagtggggacagcttagaaagcttgtcgttgcatctaaataaatactgagagtttggatatgtttctaagttcctttcctttgaactgtggggcataaatctcacgagacagcttgttctcaagaggttaccagtacgtttggttctagtctgtccacaaatattgtgagaacaggcttattcagattattttgacatgctcagacaaggcgttccgaaccatgtgagaaatgaacgtgtgtgtgcaagggaaatacacacaatgctactgagcctctaagaggctccatttctcgtgttttgaggagtggaaattgtctcaaaaaatcagcatctcagctctcattcctaatgtatcagaatctagaagttctggttttggaatctgatatagtgagaaatcagaagatgtcctggggtgtgggagaatgatatgttctttagtcgagtttaaatgagtttattccttaacttagcacttccccagtggcacaataagcactcagtaaatgtttattgaagtgaattccaattcctgatttgaatttagtgttggagaaattccagtcaccgggctgataaaaagtggtgtcagattactggaaaaaggactatgtggagaagctgcttgcaagtaataaactctttgtgttagagtcacctgttttacccaatgcctagcctagatcgttgaaaaggaaattgaaggatggtattcagattaagaaacagatccctggattatgtttaagaatttctgggaggagccaagatggccgaataggaacagctccggtctacagctcccagcctgagcgacgcagaaggcgggtgatttctgcatttccatctgaggtaccgggttcatctcactaggcagtgccagacagtgggcgcaggtcagtgggtgcgcgcaccgtgtgcgagccgaagcagggcgaggcattgcctcactcgggaagcgcaaggggtcagggagttccctttcctaaccaaagaaaggggtgacagacggcacctggaaaatcgggtcactcccacccgaatactgcgcttttccgacgggcttaaaaaacggtgcaccacgagattatatcccgcaccttgctcggagggtcctaccccatggagtctcgctgattcctagcacagcagtctgagatcaaactgcaaggctgcagcaagactgggggaggggcgcccaccattgcccagacttgcttaggtaaacaaagcagccaggaagctcgaactggggggagcccaccacagctcaaggaagcctgcctgcctctgtaggctccagctctgggggcccagggcacagacaaacaaaaagacagcagtaacctctgcagacttaaatgtccctgtctgacagctttgaagagagcagtggttctcccagcacgcagctggagatctgagaatgggcagactgcctcctcaagtgggtccctgacccctgacccccgagcagcctaactgggaggcacccccctgcaggggcacgctgacacctcacacggcagggtattccaacagacctgcagctgagggtcctgtctgttagaaggaaaactaacaaacagaaaggacatccacaccaaaaacccatctgtacatcaccatcatcaaagaccaaaagaccaacattagacagatcaacgagacagaaagtcaacaaggatacccaggaattgaactcagctctgcaccaagtggacctaatagacatctgcagaactctccacccgaaatcaacagaatatacatttttttcagcaccacaccacacctattccaaaattgaccacatacttggaagtaaagttctcttcagcaaacgtaaaagaacagaaattataacaaactatctctcagaccacagtgcaatcaaactagaactcaggattaagaatctcactcaaaaccactcaactacatggaaactgaccaacctgctcctgaatgactactgggtatataacgaaatgaaggcagaaataaagatgttctttgaaaccaatgagaacaaaggcacaacataccagagtctctgggacgcattcaaaacagtgtgtagagggaaatttatagcactaaatgcccacaagagaaagcaggaaagatccaaaattgacaccctaacatcacaattaaaagaactagaaaagcaagagcaaacacattcaaaagctagcagaaggcaagaaataactaaaatcagagcagaactgaaggaaatagatacataaaaaacccttcaaaaaattaatgaatccaggagctggttttttgaaaggatcaacaaaattgatagaccgctagcaagactaataaagaaaaaaagagagaagaatcaaatagatgcaataaaaaatgataaaggggatatcaccaccaatcccacagaaatacaaactaccatcagagaaacctacaaacacctctacgcaaataaactagaaaatctagaagaaatggataaattccttgatacgtacatgctcccaagactaaaccaggaagaagttgaatctctgaatagaccaataacaggatctgaaattgtggcaataatcaatagcttaccaaccaaaaagagtccaggaccagatggattcacagccgaattctaccaaaggtacaaggaggaactggtaccattccttctgaaactattccaatcaatagaaaaagagggaatcctccctaactcattttatgaggccagcatcatcctgataccaaagcctggcagagacacaaccaaaaaagagaattttagaccaatatccttgatgaacattgatgcaaaaatcctcaataaaatactggcaaaacgaatccagcagcacatcaaaaaacttatccaccatgatcaagtgggcttcatccctgggatgcaaggctggttcaatatatgcaaatcaataaatgtaatccagcatataaacagagccaaagacaaaaaccacatgattatctcaatagatgcagaaaaggcctttgacaaaattcaacagcccttcatgctaaaaactctcaataaattaggtattgatgggatgtatttcaaaataataagagctatctatgacaaacccacagccaatatcatactgaatgggcaaaaactggaagcattccctttgaaaactggcacaagacagggatgccctctctcaccactcctattcaacatagtgttggaagttctggccagggcagttaggcaggagaaggaaataaagggtattcaattaggaaaagaggaagtcaaattgtccctgtttgcagatgacatgattgtatatctagaaaaccccattgcctcagcccaaaatctccttcagctgataagcaacttcagcaaagtctcaggatacaaaatcaatgtacaaaaatcacaagcattcttatacaccaacaacagacaaacagagagccaaatcatgagtgaactcccattcacaattgcttcaaagagaataaaatacctaggaatccaacttacaagggatgtgaaggacctcttcaaggagaactacaaaccactgctcaaggaaataaaagaggatacaaacaaatggaagaacattccatgctcatggataagaagaatcaatattgtgaaaatggccatactgcccaaggtaatttatagattcaatgccatccccatcaagctaccaatgcctttcttcacagaattggaaaaaactactttaaagttcatatggaaccaaaaaagagcccgcatcaccaagtcaatcctaagccaaaagaacaaagctggaggcatcacgctacctgacttcaaactatactacaaggctacggtaaccaaaacagcatggtactggtaccaaaacagtgatatagatcaatggaacagaacagagtcctcagaaataacgccgcatatctacaaccatctgatctttgacaaacctgagaaaaacaagcaatggggaaaggattccctatttaataaatggtgctgggaaaactggctagccatatgtagaaagctgaaactggatcccttccttacaccttatacaaaaatcaattcaagatggattaaagacttaaatgttagacctaaaaccataaaaaccctagaagaaaacctaggcattaccattcaggacataggcacgggcaaggacttcatgtctaaaacaccaaaagcaatggcaacaaaggacaaaattgacaaatgggatctaattaaactaaagagcttctgcacagcaaaagaaactaccatcagagtgaacaggcaacctacaaaatgggagaaaattttcgcaacctactcatctgacaaagggctaatatccagaatctacaatgaactcaaacaaatttacaagaaaaaaacaaacaaccccatcaaaaagtgggcgaaggacatgaacagacacttctcaaaagaagacatttatgcagccaaaaaaacacatgaaaaaatgctcatcattactggccatcagagaaatgcaaatcaaaactacaatgagataccatctcacaccagttggaatggcaatcattaaaaagtcaggaaactacaggtgctggagaggatgtggagaaataggaacacttttacactgttggtgggactgtaaactagttcaaccattgtggaagtcagtgtggcaatacctcagggatctagaactagaaataccatttgacccagccatcccattactgggtatatacccaaaggactacaaatcatgctgctataaagacacatgcacacgtatgtttattgcagcattattcacaatagcaaagacttggaaccaacccaaatgtccaacaatgatagactggattaagaaaatgtggcacatatacaccatggaatactatgcagccataaaaaatgatgagttcatgtcctttgtagggacatggatgaaattggaaatcatcattctcagtaagctatcgcaagaacaaaaaaccaaacaccacatattctcacttataggtgggaattgaacaatgagatcacatggacacaggaaggggaacatcacactctggggactgttgtggggtggggggaggggggagggatagcattgggagatatacctaatgctagatgacgagttagtgggtgcagcgcaccagcatggcacatgtatacgtatgtaagtaacctgcacaatgtgcacatgtaccctaaaacttaaagtataataataataataataataataaaagtttgggacgaaaaaaaaaaaagaaacagatccctcatggtatcccataaaagttaccttaatttatgaaaatccaacctgtgcaatatgggtatcttttttacaatagaagtgatttatatgggctactcttcccatagcaagagtctcattgccttaccatatagctcttttggaattttttttttttaaacttgaatatatcagaatgatagtaactggccactggagaaaaagctctgacctcaagccaaagagcaatctgtctacatgtctataccatggcagtgattattgataacacaactgattattgtaatcacaacttcccatacagaaattactatttgtattattctccaaaaaataaggccaaatgccataatgtgttttttcagaaacagtagaacatactcttagaatgatgtgagtgcacactcactctcattctagtttattctaaacgagaatctgagatgaatgttccaaatctctccaatcacaagggaggagggtacatttgcagtggatttttctcagaaggttaaatctaaagaagtaattaaggctccacatttctgatttgcaggaaactgcgttatgcatttcccttggatgaaaataagtaaagaggataaaggaagactctcaaattgcagtctgtgtgacctgtttttgaataaacataatcatattccacagtcaattatctccaaagtacagtgtgttctccagccagagcgagagagtgagaggaagaatgtcagttagaagtggttagagaagaggacacatgcatagaagtgtacatctttctattgtcctctgaaaatttttatacgatttgggaggggttagtggggaggattatacagtatttttatgtgatttcataaatgtcaaatttcagtcatcagtaagagaggcaagcacaggtaggaaaacaaaatgagatatgttatgttcagcacagtaataaggctcctaataccaaaggaaaaacaagtcagtagttacaactattgaatagaagtggtctaatcggagcagcaggatgcgtatcccattttattatggcttcattatgtgttttgcaaggctctttggattgccattaaaataattttgtgcagcagcactgtgaggactcagaatccagaagcgtaactattattttcttttcttctttgttttctttttgaggtaaagttggcagcaaaggaaggtttcggatggaccaagtatagacacaacacttctgttaattcacatggggactaggcagcctcccacaatggctgtgacattcatcctgttctgatagaaactccctgctttctgtgtggcctgggatttgaatctggaggtctttgatccttagcctctcccgtggctggttaccggatggaacggacctgatctttcatttcccaaagaaggcctattaccatcagaagcaaaccgcatccttgcttttatagcagttgcgcttgataattattggtgatactgacatctgcccatgcttacttcatattcatgagcctgaagtggaattttttttttaagctaacatccccagttttggggaatagagtatttcctccaaagttaaaccctgaggtttatttcagaaaaccagtagtcaagtacccttcttctcactgagctaagaaatcctcataaattatttatttcccattttagacattggacagtgactcagtgtgccctggaaatattatcactgtattaattttctcatgtggctcagcataatgttagagaaatggatagttacaggtccagacactataaagatggagctaaatattcttctaaaaataggatgtttggttaacgtttagtagtcaacaactttcctgaagccacacacagtgccggactaagaaatggaataaatgtcctcatacagtatttggtgaagtctccctttaggagattaagcttttaatgttaaagattcagagtattttagctttatccctgagacttattatttgacgtgatgacatctttaactcaagaggtcaacaattgggataaaatgccatgctgtgggtgatggacgccataaaagtaacctgataatcggtcaggtgcggtggctcacacttgtaatcccagcactttgggaggccgaggcaggcagatcacctgaggtcgggagtttgagaccagcctgaccaacatagagaaaccctgtctctactaaaaatacaaaattagctgggtgtggtggcacatgcctgtaatcccagctactcgggaagctgaagcaggagaattgcttgaacccgggatgcagaggttgcggtaagctgagatcgcaccattgcactctagcctgggcaacaagagcaaaactccatctcagggaaaaaaaaaaattaacctgataattgagttttagttataaaagtgccaaaatgctaaaagaatttacagtttctgaccactgaaatattttgctctagcctgggtacaagaagaagcgagtttgagactaggaatgaatgagaggaaacttttgattcttactacataggttccttttagaattttgaatgtttagagctagaaattgaatattcattattctagcccagacattttacagaggagaaagtcaaagtttcagagatgaaagttgtacccagggccacacagttaggttgctgcaaatattaagagaacttacttcacttaatttggtgcatttttattcttctatttatagacgagtaaaatgtgctgagaccagtgcattttaagctccaagactgtcacttcttcatttgtcttaggcttttagattcaattaaataagtaatgcacctaaagattcatcagctgggaatactgtctcaccactgaatgacttaagagagataatattgccttgctgaagacatattataaaaatctgagaatgagcatgtgtgaagctctctgatactcttacaagaagtgaagtataagtagttgtggattccttcaaatgaaacaaaatttttctggacgcctttttagatagagtatatgcaacccaggagtatagatgtgatgtctcctgtcctgtgcaggagtataaatgtgatgtctcctgtcctgtgctcaggcaggttaggattctggcagaccatgagacacccctgagccatcactttaaaatgccccgtatttcagtagcgtctatgtgctaggatttctgtttgggagtacaaaaagcaatgagattgtttttcttgagtaacctgaagtctactgggaagaacccagtggtaacccaaatagctatgacacaaggtagaaaatagtaccaaggtagatagagataaaacctttgatacttaaaggaagacagaaatactgctgactgggaattttagaggaattttcatgaacaaagatcagtaacatcatccactatccatgaaatattgaactataaggcagttttagtactgggaaagaaaaactacatcatacctaccagtaagaatctcatgatcatcatattttaataaaagatgaagaggtaagatcgcttattctgtgttccaaagaaattcctggaggagaagggatctgagctagactttcataaatagagatgatttggatagaagaacaatttagagcatcctggtttgaaagaacaaaaggatctaaggcagtagccctgggaatgtacttcacaagttcaggatcaatgagtatccagtttagctaaagaaaacaattctagtgaaagaagtaaacaaacgtttggtaggatgaaatggttccatcttatggagaagcttaaatattgatccaagaattttgaacaccctagtggacttcaggagaaccttgtgactctgagcaaagataaaaataaattgatatgggaaatgatgttcctttcagattagagaaactcctgaattaatctcaaatttggaggccgcttagtataacaaaaaagtatattttcaatattgctgatatgtaatctaagaatggttctctcttcctgtcactgaaattcatctattatttattccaagctttaaaaaaaaagtactaaaataaaattgtgtgattgagcattgcaaaagagtgggtttttataatgtggaagccaaaattttttatcagaaaagaaaagagaaaaaagaatctatgctgagaggagatggccaactactacatagatttattaactcaacaaaagggtgaccagttcttccaaacctggtatttgttggtcgtatctattacaaggtagctgtggcttggtgcagggtgcagacaagagagggaacaggaagaaagagattagtgtaaactgtgaaatcaggcaaagctagactcaaattttgtctctgttttctagtaactatgtgtgaccttgaattattgaagctctctaaacttccactttcttgtttgcaaaatggtacgatggcatctacatatagaattatagtaaagagtaaatgagaaatacatgtgaatacctagccgcttctggaaaatagtatgtactcagttactggttatttttattatcgttgtaattactatttccagtgatgtgatgcttattaccttccaaagcaagtacttttatatttgaataagtgaaagctctttcccattatttctaaacccttgtcctacttctcagttctagaactttttttttttttccttaatggaaggaaagaaataaggaagggttggagagagagagagaggaaaagcacctttgtttgtatgctttctttagatacgttgaagacaatactcacaaatctcttcagtcgtctctccatttggatggccatcctcagtgcttaagcacttcttcataaatatgattttcagaagcatctgaagcatctgtattcggggtcctgtcctcatccctgttaagaaatataaggctcaaaatcagatgttgttatgtgaggtgtggtctcgtgcatggagtacaaggtcacttttcattaggagacaaatgcgcagtaatacctacagtgtgggaacgtggatcccttctctttaatatcagttttgccagtgccctcctttgtaacccagagtagcttcagataaacctactgagcccttcttttcttgttcataggaaaatatttttaaagggatagtgcatttataagaaaatttttatatacttcttttaccctgagaggattgcaaagtttgtcatgccctgattgacaaatataagttcaaaaaaaaaaacagaaaataaattccttaaataatttatatcagacaaatggatctgaatctaagcaaaattttcaggaaaaaaaatgtttataatcattaggtaaaagtagaattctgaccttatctttatattttctttatattttaaagctttgcctacatattccaagacttggctttcagttttcctaaatctaaacagagaaataaatgaaatcatgtctaagatttcttccgattttgacattgttatatgtccttacctgtaaaatgaagaaaatattttttctttttatcagggttgttgttaggaagaaatgatattatggatattgtgtttcagcctgctagggacagatactttcatagcttcattcattcaccctagggtaaaagtatcagtgttttcttctttttccttcaggatttattccttagtcagggagtgaccaaggatggtcagccagaacctcagctggtcacctggagcataatatggtaaacagaaccatacccaaagttctgtttacggaggcagtcctggctaccagtgaatgatcaggaaccctataagctagcccctggaagaacaatgatgctgattttatctgtaaaataattctttgcatacaaagtactataaactcagttggttctccctgcatatttttgaatgattgtaggcagagtttttgttatctgttttactaatgatgcaactgaggcccgtaggagtcaggttgcctataaaggcaaggatgtgcatacagaattacccaaagcaaattggtattttgtggggcacaacctcaaaaccactgatatcttgctacatttaagtacaaaaagctcctatatgccacagaattagaacattaccagatcttaaatgttccttagaaatcacctcaactgatgccccacatttggcagaaagccaaaaagtttctcagctaggaacaaaacacaagttccctttctatcacatggtgctgaagcttagatgcataaaccgaacaaatcatcaggaagctataaaaggaacaaacaaatacagtctctggaatcattgcaacctcaatacacatctcattgccacttcctggacatttgtgtctagctaggttgcttcccctgcctgagccttactgtgaatatgtgccaagcagagtgttgctgttaattgagctagataacatgccagtgtctggcctagttcttggcccataataggtattcaactaatatttacttcttttcatccactcacccttcttcttaacagttggaacccctgttttgaactgttcacttctactctggatttccctgtgtaagctcacttgcagaagagggtggaggtgaacacactgcatttcccaccatccagctctgacctgggcccaccctgtgcaggactctgctgactttgggatgccagctgtggtcctcacacagggctcactgtatccgggggcctggcttgatccggtaaagagcgtctgctgcggtgcctgatggaaagtgcccgcttaattgggagatagggcttcatgaatggatctttcattagttgaaaaaaaaaaatatttgcctgcaaggactgtaaacagaagacttgattcacttgttccttttctcctgccctctcttgggttttgtttgacttagcgtgtttatacctcaggacacagctggtactaatgcctttccaaggttaagaaagctttccctgccattccctatggtcccctttgtgtactttcaagagacaataaaggaggtgtggatgtgagacagagagtgcattcacattagtcctggctattatggggacctcagaacaagcatcacctccaccctgtctgcatggatttaagagagagcatctgagcacctgagcttacctcaaacacgttctttgaagaagagtcactgccggtcatttctgtaatgtatcacagctgtcctgacctgatccttctctgctctatcgtggctactttagcatatttttctcaaaaagtgttcctctttcataattaaaggtgagggaagactggatgaaaaaagctgtgggatatggtcagcacataaggcctgtggtcaaagatgggtcttcagttacatcgtttggtcttactaagcctcaatgttctcatttgtaaatctggaataatcattagacctttttcactctgcttgttgtgaggttcaaacatgagactcaatgaaaaagtactttttggacaatagaacactacataaataggaaaattttaatggaaccttcctcatattccattaatatgttggtgctctgcattatagtagtactttagttgacttgagcacatgatgtagttgactttagattaaactttcactaagtattacttagaaaaaacgagccatcatgtgattctacaatctttatgggctacatagggatggtgaattcttttcaccactagcaaaggctcctaaaggatcatgccttactcccactccatagatgaagaccttaggcccctgggaatccattgagctcacagaggtttacataatgccaaatcaggatgggaagttagatcctgcttagtgctcataactggcttatgaggtttccatttcagacaatgaatactcatcaaggaggattggtggggaaccatgagctgttcatgtgtactgctgcactcacgtcgtatccagacacccagatatcatctctggcccactgcagtaagatctctgtcttctgtcctgtttgtctctccttcattcattccttcatttgctctatctagccttcatacttcttgaatcactttgagtatggtacccttattttaaataaatagtaccctcatttgggtatttgtttccagtgttcctgaggctggggaatttctccagagtttaatgatgactctggtgctcaagcaccaagaaaatttccacttgagatggatctggcactggaggtttattttttcccctttctattttattgttggccagtttgggccagcatgttgctaggttgtattggtttcttagctcttgtaaccaagctaagatgcacatgtcaaaaaatattttttcttcctctctaaaaaggtttttcctcttttctgtaatgcttcaggaagggaaaagagtgtttgcttgattctaattctggcatatgaagtgtttgctacaaaatgtttttatcactgtgttatcttgtcaaagtgctatcgtcattgtcattttcagtttaatagcaggaatgttccattttcacaaaggatattccatattttaagtaaactcaacaaaggaaatttcaaatgcaaaaaaatattgatagtgagaagctaattagtttttttatttctcaaagccctacatttaaaatagctttaagtttccagtatgtcatgctctgacagtagcatttacaggtaaaggatgatgcttaactaggattatggttacattgtaaacactcaagccaaagaaaaatatatccttggacaaaggggttaggatgatttgccagagtggcctccagtgtttggatgacagctacatcactgtgatttaatgcacctttagtttcaggagttgtatccagactagtcctcatctcagcctcaccaaaggggactggacttaaccacaatagaactcagagctcctgcagtgaaacccagtccctttccatgcgggaagtgataaccgcaggtgaaactctgagctagggaaataccatcttggtagtcctgaagtgatagcacttacattcttttgccaggcatccaaaatcctttattcttcaaatagttgtgaaggtttttttttattattatataaagccttgcagtgagtcatagaagaaatgcactggggtctgagacagagagagagagatgaaacaactataattcctgagtcaactatgattcctgtcttcaagagtctcatgattaagaaatggagacaaagcagaaataactaattccaacttcctaagctaaatgtcataatgaacaaggaaccaaggaagcacatagaaggcttaggtaaattcttcctgagggaattcctctgttataggtaataattattaagcttccaccttgtcttgtttctatgtctctattattatttaatatttacagctaaagctatctatctatctatccatctgtctgtctagagttcctacctaatggtatgtttcagattaggatagatttctcacttgaaacagtctgtctgatgttttgcatccatccatccattcattctacaaactgttatgccctctatatggcaagcattttgctatatccttactacagaattcacttaggcactaatacctattttaattatggagacaaaaacagctaagaaaatgttatcactccatagatgagttaaagaaaaaaaacagggagaatttcttgaaggtgatgtcaatattatcataaactcaggcagtccatgctgaaaatgatttttttgtgagccagaatcccctgtactcatcatttattccctgatttactgcgttttattctgtatcagatgatgtgctagcataaagcggggacataacatcttctgatatcatgagacattgtttctaaacctcttttcttggtgattagacctatgcttgtgcccatcagagtcaaaggttgtggacacttgctccgctgcttgttttttctgctatcttctgtccttgttggttgcattctaatggacctataccaagtgctgtcagaagatgagagactacaaatcagattccacaaggatgttcacaaataataagcatttggttgcaatttaaaattggttggcagagcaatagggcatttgattattaggattttacattatctgagtgacttggaaatagaaaagaagggacttgtattatatgtccagaaaaaaagtccagcaaactataattcataggcaaaatccagtgcactgctgtgtttgtaaataaagttttattggaattcagtcacgcccatttgcttatgtgttgtctatgtctgatttctgtctacttggtggcattgactagttttgagaaaccaaatgacccacaaactttgcaatatttaccgtctctttattgaaaaggcttgaccctctataaaaacgaattaatcctgaaggagaagaaaaaataaatagggaccctaatcatatttttaaatttatacagcatgcagttttgaaacactcagtcaatgatgtagaacaattaaaaagaaaaaataaaacctgggctaagatgatagacaaattccctttcaacttcaaccagtttgttctgaggatattgtgtgcttcaggaatttctgccatatgctgggatattcagacatatataacgcagtctgccttccaggaacccttagtctgttagtggagatggacatagaaagcagcaaatactcctttgtgtaactcatgctgtatatgagataagataatgaggcagagaagagttggagagtagagatggcctggcttttgggaatttggggaagatatcataaaacagtagaaacttaaactatgtttgaaagcatgaactcatgatagacgggcaagggtagaaacaatcgttttatttctagaagcttcaactctatcttgaaatagtttgttgtgtatattagtccgttttcacgctgctgataaagacatacctgagactggacaatttacaaaataaagaagtttcaatggacttatggttccacatggctggggaggtctcacagtcatggcagaaggtgaaaagcacatctcacatggcaacagacaagagaagagagcttgtgcaggaaaactcccattttcaaaaccatgggatctcacgagacttatttactatcatgagaacagcacgggaaaggcctgcccccatgattcagttacctcccaccaagtccttcccacaacacatgggaattaaagatgagatttggatggggacacagccaaaccttatcagtgtgtttataatggcaccacagtttctaaagtattatccattatctttttggtctttataacagaggttggttgtaatcattatctccattttattagtatttcttaaaaggcttcatcaaagcagttaaatgactttttcagggtttcactgcttataagtggtaaaagttacctgaccctacctctgactctaaagccacaggactgtccccttaaatcaaactttctggcctaagtctacaggtattccccagaatttctaattgacatgaaatgcaagagaaaagagtctttgaattttcctgcactggagcaacctgccttattccagacattgccaagaaattgtttttgccactgacattattgcgcatgctgccagtggaagtaatagtgatctggacttcatatgctttcaccgaacatgcatatggctcttcttattagactgtcatagggctcccttactttcaactttccttggaggtttctctattttctgtcctcttttcctttccttgtttctgataccagcctatagatcctctgtcaccagttgggtttcttcatcacatggttttctccttctcaggtggagttttggccagagggaggagaatctgttcaattaaacagattctgtacaacagattctgtataatgcaaaacagaaccgattctgtaaaatgcaaaaaaaacccttttctcttgcatttcagatcaattctaaattctggggaatatctgtagacttaggccagaaagtttgacttgaggggacagccctgtggctttagagtcagaagtagggtcaggtaagttttaccatttataagcagtgaaaccttgaacaagtcatttaactgccttgatgaagcctttaagaaataataattaaacatcccctggtatttgagaaaagaggtatcccaagtcccaccatttaccaggtcctattactcacaatgctggtaaccataggtctccatcccttatgctcactcctcttaccacgccctgtctaggagctacttctacatttatgtgctcagtcttctatccagaaccctacccccaaatgtctaagctcctcacacctcagttctctgtcttgggccatggaacctctaacactggtttggaagtgtgtgtctttttcctcaggcagctggagcagagactgattccactgccaattcttgcctcaagaagagtcgtcttgagacaataggttgaagctttcactacatgttcttttagcaaaaaattataaagcatagaggttgagatgggctctggaatcagactacaaagattctgatcttactgcttcagttataagctctggatgttgagcacctctcctaatctccccaagcatcatctactgaaagggggcatcacaggacttccctcattgagctgttgtaaggattaaatgagcacatgttaagtttctggctgtgtaagtttttgttattacttttcttttgtacttgaacttgtcataccatgtttctattttgggttcagaaaatatggttaacataattataggtgtaatagaaattttggattagcctgtgaacataacacacaattatagcactgttttttttaatgagagaatgaattcctgagttctaaacagatgagttacaaagaaactcttggactgaagtcatccatatataatagatggtccagtttggagtagaagactgactgtgaaagataattgaaagtctgcaaaaatattttttactaaatgcactgtctttttgagcttgcattcataggcacatctaacgcacctgccccaatgtaaccaatcaacatcacatacagccctcagttactaagtttatgaggtaaatttattttccttcttggtttttgtttctttgcattttgatctttttatctctttgtttattaaataagaaattagaatctctgatcagtagattggctaggatctgcttatgagtcttagatgcaaaactgacaaatctttaattggttgtgccatcgtatctgtcctcaggcttgttagctaaagctcagttagtgatttgccaccactgccattgcttggtggtagaatagggtaaaggattatcatgccagcatcccttgtccgctgtgaccttagtcttagtgaacaaattttcttgtgtgctttctaaaatgcccatgacccttatttcatacttaggaaatagaagtcacaaagatttcctgaggacctcatcattatgtggagctaggaaaagtactgtggtttatagctctgtggtttacacaaagggaaatccaattgatttgcacaaatacacaaaacaaaatatatttaagtgccatgaagagaaacgatgttctttaggaattaagaggaggttcagaaggaaaatggtgttgattgaatctggccaactgagcttggacaatcagtgacctcagggaaaggagtgttaggaaagagacattcctgacagaggaaataacataagtagacagggagatagaacattctggaaattgaatctgtgttaaaatgccttaaaaatggtgcatcatacgaatttagcgacatttcacttcaagattcttacacaccttagggtgaaaatcaacaaagaccttaaaatgcagacaattaactctttttctctgtgttgtgtgtgtgtgtgtgtgtatgcgtacacacatatactccacatatctccacaaatcaatgacaatatcaaatggagcaattttccacaattttctccaagaaactgcatgcttaagcactgcactcagcaaaatgttgtaagtccatcaatatttctcagtcttgctgagtttctgcatgacccccaatagcttacccagtctcttcctctataagtaatgatcgcagattctacatctgcaagtacaagaatcctttcacaaataaattccagaggactccaacctgcagtgtctttagtgagtcagaaattaggaagatagcttcaatttggttatacccagcaggaaggaaacaatcctaatcatactaataccaatggaatattgtagtccaggagtttgatggagtttgaccagcatcctttagaaaggaaaactgcataaattaaataatttatatggaacaaacatatgtgtaatatgcatgtaaaataaaatggcaccagttattaatcaggtgaatgcatatatatcatagagaagtcaactatgaccagaagatacaaaatgaactgttctttaggctcatgttttgttttgcaatacagggcaggatattctctcttcctttagccttaactgatctgcttccatgttctagtcacttgaacattgatatgcatgtaaaataggcccctgttcttccattaactagaaaataaaaaagtgcccagaagggaagtttccatttctagcagcacgttaaaaagtgccagagtttgatcaggaagtggtatcagggtcaagatgagggaaaggacatcagaaaaaaaagtagaattatcctgttcacttcaaggaagacacacagcataaggcgggttttagaaaaggattaagagaaaattggcagacagaattagggagattgcttaatcaatatcacaatataacgatgctgggtagaagatgcatggaagaagcatggattatctcaatgacgattttattttgaagatagtgtgattatcacccctggggatgctggaacattacactggggatttagtcaccaactgaagcagatctctgggttgaatagatcaccatgaaggttgtttccaaccttaagttttcttaaatttcagaagttcaatgagttcttctccaaggatcaaggaggatatctactagaaatctactatagaatagagagaattggtctatacacaagtttatttaaattaaataatcctgataccattttgaacttttcagtcaaaacctaccatatgcagctcttaccagtgacttcagtgcttccttatacaaggtgcaagcggtgctaatctcacattaaaaaaacactttgggccagttgcggtggctcacaactgtaatcccagcactttgggaggccaaggtgggtggattacctgaggtcaggagtttgagaccagcctgaccaacacggtgaaaccccgtctctactaataatacaaaaaaaatagccaggcatggtggtgcatgcctgtaatcccagctactcaggaggctgagacaggagaattgcttgaacccaggaggtggaggttgcagtgagccgaggtcacgccattccactccagcctgggcaacaatagcgaaactcagtctccaaaaggaaaaaaaaaaaaaaaaaacactttgattttagaaagaaggtctgtgcccaggcgctcccaggtgctgccaggcctcagaggaagggttctgaagacaaacctgactgcctccttccacatgctatgtctgcaaatattggctgccttcaagctcacagcctgtgacagcaagttggtttcatttcttaaagttgatcttcaaagccgtgaagcaatcgcaaactgtttgagatcccaaatcaaagaacagattgtgtagactcaaaaaaagcaaacaaacaattacatttaaaaacaaagtgttggaaaaaaccagcaacaacctttctgctcacctgccaaggccttgtggctaagcttctgtttttgccaaattgtagcaaatcacatcagacagtgtccttcttgtactactgacaggtgacccatttcctggtggttaaatctggagggatttgggagttcttgctcttaacatgactttcccactgactggatttgtgattgtaagcacatcacactcatttcctccatttgaaatgcaggttctctgaagccttctggcttgaaggaataatagtgagtaatacctaacattggcattgcacagcatgccactgagggctgcccaatagctctgtgaaagagatgaggaaacaggattagagaagggaccagctcacagtcacaggactagtaaattatgaagtgagaattcaagctttccaatatcccttgttcttcctactacatgataccacttctagctaaccactcattcagtagctcttgaaaaggatattctgttacctcctttgaagataatatttgatccctactttctcacagggctttccaaatagagtccacattggcccatttccatggaacattttgctggtctttaggtattttattaattgctgaattgtttaggggttttaagttgtctaaggagactatatctgaattcaattatttttttcctctttcccctcgagcatgcacattctttgtaatactgtagtgatgtataagttttcaagagctgtcaaggtgtatatatatatatatatatatatttccaaaagcagatagtatagtacatttactacagttgtttcactttgatatggataaaaaatgtataaaaaaggcaaagaattctgtgagtgtcattacaactttaatttcaaaatttttgcccttatgttatttgctatacttggctttcctcgacattataaatcattgatcacaggctggtataaatttagcattaccagtggattctgcgtatttgatatgctctttttattttggttttgtcagtttgctactcgtgagtttatctttgaacagcttcccatggctatgggattaggtctgtactccagagcctgatatctatgggcctttttttcttagcctttctagtctttttaccccatatttcttcatgatatccatagtttgtccaacctaaacaaagagctagtccccaagcacactaacccgttacattcatccctctgcttttaatacaattgtttctctatagagaatacctttaaaaatatatataagttggctaagctcaaaaacaccacttctatgataatactcttacagattcttccatttgtaaatatgcatgctcatagtactcttacagcgttggtcctctcttataacattgttagagtagatactgtaaactgaaaagtgacacataaaaatacataatggtgcagctcagatatgtgtcatcttaatattcctattaaccttagaactttgtgactgtgttgggattacttgacatatttgtttatcaatcaacacagtgacagtgacaacgaatgagtaaccagtgttttgtttttgaaacatttgaagaagtgttccatatttctgaagttattagtttagtttaggttagtttagtttagtttagttttaacgacagagtcttgctctgttgcccaggctggagtgcaacagcgtgatctcagctcactgcaacctctgcctcccaggttcaagcaattctccctgcctcagcctcccaagtagctgggattacaggcacctgccaccacacctagctaattttttgtatttttagtagagatagagtttcggcatattggccaggctggtctcaaactcctgacctcaggtggtctgcctgccttggcctcctaactgaagttattttttaaattaaactaatacatgcaactggcttaacaaactaataggactaatgagtctaaaacaaacgacataccctccgtgcttctcctctctccactctctcaatcctacttcacgaaagacactcttggctgcttcttcctggcatttgcacagcttcatgtctaaaacagaaatgcatttctatctttggaggcataaatcttagacattatctgtggattaataacacaaaagacacggatatgccatccatataaatgtttgactgtttagagcttcctactctgggaaggattgacccatctccctccaaaattgagaaaagggactttcactggacattatcttcaagtccttgcagtgttccagaaggtgtgacaatctggtcctttggctggctgcattactgacctgctgacctgctgttttaggttgattatatttgcctttgagccaaaagagttacttgatgatactccagagccccatttccacacaacacttaggtttaaaagctgcaaaaatggatttaatgaaataatgatggagtgatttgaagatttttcatgtctttcaggaaacacaaggtgctcttagtgaccacagagctagcagcctcccctgcatctcaactttatgtttccaaatatagtctagatgcttagtaagtgttaaaaaataatagtgcatcttgatgcattctttatggtgtaaaataacctgttaggtagcagggataatttttcttcagcattagatggctgtttatgtatgatatatttctctgtgtccctgggacctaatgatcgttgaatacaggtgaatagaatgttatacagtagatggaacatgattatcaaagtcaggagacctagactcagttgctttctagcaaggcagtcattaattacatgttacgtcttttatcagaacctcagtttggatctataaaataggattactcatttccaccttggaactgtttttatgtaaccatcaagtaagccggtaaatatagttatctgtgtagttaactagctgctaacaaaggaatccagggtggcctttaatatatgttcggaatatatttattcaacaaatgtttcttcaattgttttccaagttagatttataaaaaatgagagcctggcaggcaagcaggcaagttggtagcttgggatgggatccactacagcacagaagtgcagccagagacttgctcctaactccccacggattgctacaaatccttgctccaactcgcagcttggcaagggatcttgctatcagccttctctcatggaacccattgtgcatatgaatatttgattagcttattccattttcattttatactattagttctccttgtggggttagatcctatgcacacacacacacacacacacacacacacatcatttaagaataggaaactattttgcaatctatatgccctctgcttgtaattgttactgttcccaatccatttcctcctcattctttgtctctcatccaaatggttttcactttatgtgtaacaggagtgagcttattctgaactacattggttaggtcctttaaagcgtaagcacgagagaataaaatgaatggaatggcacagagcacagctcacatatttgttttttagttttaaattctcatttgctttttagttttacacatatttattacccgtatttctcatagatttgctttttggttttacattctctccttacttttgccttggttctcctgatgtgtgaaaatgctcctaaggccaccaatcacaggattgtgactccttccccaactttgtttacctacaataattgcaacagcatgatattgttcaatgttggcatatgcaaacagaaaacctaagatctggggagccaattctttgcagaaggtgcttcaacctatctaaaagcaaaaacattcaataatgtgtacatgctttgaggtgtgtgtaatatttgtgtgttcattatgttattctcatagtcacaaaactcctttcaggtaaatatttgttcccattgtatgcatgtagaaatcaatgtttagaggggttgttaaatagctagttaaaatcagaaccaagaatcaaattcattatttctgtcttaaacttctctttcaactattttaggctgcagtagtaagcatcatatgacttcttgtcatctctagtgtgaaatggttttccaaagatctgtgtgtgtgtgtgtgtgtgtgttttaaataggcattttacttttaaaaggaaggttcacagtcaaactgagcagaaaatacaagcaagttcccatatacccccatccccacaaatcccacaaatgcatattctttcccactatcaacatctctgacgagagtggcacattagttacaatcgataaacctacattgtcacataattgtcacccaaagtccatagtttacattagcattgactcttggtgttgtacatgttgtgggctttgatgagtgtgtagcatttatttcccgtcatagaatcatgcggaatactttcactgcccctaagaattatccttgctctgcctattattactttctcccccaaccccggtaacccctgaaatttttactggcttcatagttttgccttatcagaatgtcttatagttgggaccctacaatatgcagcctttccatattgccattttactgaataatatacattcaaggttcatccatgtcttctcatggcttggtaactcatttctttctaatgctggataatattttattatatagatgtccacagtttatttatccattcacctcctaaaggacatcttagttgtttccaagttttggcaattatgaataaagtcgctataaacatccacgtgctggtttctttgtagacatatattttcagctcatttgggtaaataccaaggaatgtgattgccggatcgtatggtaagagtatgtttagttttgtaaaaaactgccaaactgccttccaaagtatctgtaccattttgcggtcccacctgcaatgaatgcgtgttcctgttgctacaacattgtggccagaattttattgtcagtatcagtgttgtcagacttttggattttgcctgtggtagcaggcttatttgcttatttgccatctgtatatcttgtttggtgaggtgtctgttcaggtcttttgcccatttttaatggttgtttttcttactaagttttgagagttctttggatattttcaataataatagtcctttcttaaacgtgttgtttgcaaatactttctcccactctgtggcttgtcttctcataaacgcttgacaaagatgcatttttgacatgcaccctgcctcatctatagcatgtcttcaaataggcttaagcgactaacttgagggaagctgatttatcttggagaactcctaactcatttttctttcattcatttaataggcagcagacttggggatataaaaggaatattctgatgtttagttagtgcttaattattttgcattcttaagtcaagcttttgactgttattgcagtgcacttgcacaaacatgaacatttcaacatctgctgttagtgtgaccagaaagagagagaagagaaaggaaaagaagggagaaatgttgactcaatcctgtccttatgtgaaacaataaaaatattttaaaactttctctcagttatgcgacatagtgcttttctattttttcctaaactggaagctccctaaggggaaaggatgcatctcatagaatctcaaggtgctcagcaggtaatatgcatttgagcaatgtttcttgaattaaacttgctagccttatttatcctgaagtgatataacatcgttgggctgcttcaaactgcctttatcctgatgggttcaactggcacaaacagttattaagatttgggagagtcagaggtcccatagataccatggactttgctgcatctcagttcttccattgcatgcctttggaaatctttcctgctggtgaggttctgtgagggactgtggcctgatagaatttgtttcatttctgtttgtttttattctttagaaaggcagagtagaaaaaacagtttaatgagataacaaatagaggaaaatactttggacttactgtttaaatttaaagattgactttatggtagctattaatagttccaacatcttgttgaatacccaaagcttaattatgtaaagagcttcttatttcctctctcctgccccttttcttctccatccccttgcaaagcaggcacaaaaattaaagctatttagagatatgtgaatcagcatattgcctatatctaatttatctttgtgcaatgcacacattcgtgaatttctcaaagccatgtgactctccagaaatctttaaatatgtaaataatattataacgtcccttagtgaatagcagatgcaatgcattattccaggtgtctgagtaatgcgaagaaaagatcaaattccctgttgtactacctgtgtcacatgttacattaataaacacagtcagcttgcaagaatagtatgttatctgaatttaatgaacttctgaactgaatggaatgcatctaattgacaaactgtcatcaaagagaacagaagacactacaaagtccaaagggaaagaagaaacaagtggggagaaaaacaaacaaacaaacatgatgaactgtgggggctgggattaaaatcattggaaggcatctctgtgtgaatgtgagcctgtgcagtaacctgcacgtgtgttgatgcctggtggtctttccatgtgagacatcttggatctgattaaagggccttgtggtgtctggcatttacagctttgtatttcccttaattgcatatacagactcaagaaagggatgggggagtgtcacataaaagataatccacagcaaagatctcaagctgttaggtaaatgaaatgtttccacaggagggtttatttttgccttcaaaatctcctggtacctgataaattaaagataaaactctttcaaacaagtttttacttttcttttctccacctcccatgctgtcatattgagtgtcacgtacatcgctacttaaaactccaacgggtagagtggctattaaattcggtctgtatatacatgatatatattatgcatattttcagaacatatgctgtgttaccatcttctgacccaaagagaaaagctgcagtaaggattttttcaggactgtaattgggcaaatgaccttgtaacgcagtggtctccgacctttttggcaccaatgaccacttttctggaagacagtttttccacgaacccagggttggtggggtagggatggcttcagtatgaaactcttccacctcagattatcggcattagagtctcataaggggcatgcaaactaggtcccttacatgcgcagttcacaataaggttcgcacccctatgagaatctaatgccaccaccactgatctgacaggaggcggagctccggctgtaatgctggctcgcctgccactcacctgctaggaacaggccaaggaccactatcagtccatagcctggggattggggacacctgttacagaatttatactgttaaatgtcacttgatatgcacactaaacctattacaaaccacatattgtcacttgtcataattggacagagctgcaatgaggttttggttttaagtgccaactcacctctaagctttttcagatccttgagctaaaagtgtcctctttctgaaatcctattaccatttattgtatatctttaatgaaagttttagtcttttccttcatattaatgttattcacccatttggcttagcacccctcttagagataaagctctgtgaagatgtgtttcttactggttcatttcggcatgccgctaaatgtgtaaaacctagaagatatcccatagccttgtttgaataaataaagttacacatggtgtttcaagttcacctatttctttgactaccaaaagacttctggttttaataaaacaactgtgaagttcaagtcctgtgtattctaacactttgatttactcaatggcctgatagaaactgtttttaaaaattatatttacccttagcattttcctgagtattgtctttagctattggtggggaagatggatatatgtgtatgtgtgtgtgtgtgtctgtgtgtgtgtgtgtgtgtggagagagagagaagagatacatggacccattgccacaatcttttaattatgtgaaacaaaaaatatttaaataacgttgaggttatccatatcttctgtattatattctgtgttactgatttttttggatcaaatagtgatttttcatgagctaggtataaaaatattaccagggactaaaattaggggaaactgggagtaacttagagtgtagccagttgtttttctactggtgctaccggcattgaaagcaagagagttcctccctgtgtggggatggcctgtacatggcaggacctgagtgtgccaggtctccagcctttacactttggtagcatcttccccacacacccagtgtagtacgccctctagagggatccatttcttcagtgaccacgtctttggagagccactgtctagatttttagtgcacaaaaatggagtgtgattaagggttttctgaggatggtgtattgttttatgttttctgttgctccactcaaattcaaattttgctgttagacttatcattataatgaaattgaatgttggtaaatatttttgtaaagtatatgccccttttctgtgttgaatgggctacaggcattcaataccccgtaatacccaaaatatcattaatttccagaaaatataaaattgtcacaaaatctaaaaactggaatattaggaaaaaggaaagaatggtttccataaatcactttgtttaacatagtttctatgtgtttgtctgagtagttgttttattagaaaattgtaatttcctctctaaacagagcaaacatattccttcttcttcttcttcttttttttttttttttgagatggagttttgctcttgttgcccaggctggagtgcagtggtacaatctcggctcactgcaacctccaccttccagttttaagcgattctcctgcctcagcctcccgaggagctgggattacaggcacctgtcaccacaccaggctaatttttgtattttttttagtagagttggggtttcaccatgctggccaggctggtctcaaactcctgacctcgtgatctgcctgcctcggcctcccaaagtgctgggattacaggcatgagccacctcgcccggccagctaacatactcttttgttcctaaatacagttttaaaagcacatgtcttgagactaacttgtcctttcctttgtaacatcagtcagttttgttaacaaagtaagtgaggaactataaagtttgcattttaggaaaattttgcatttagtatataattttatcttagcctgtgctttatctggcaggatctgatccatcctataattctacaattagtgttttggtcagaaatgcagtcatttacatttatccctttgacattttgccattcttattcatttatccagtcattcaatttcagaatactaactttgccagatactaatatcaaggactggccaattcattcatgagtagatgaataacataagtgtcctgactcaaggagcttgtaaactaagaattgtaatgttataaactatttatatttctctagtattttacaaattaacaagcaaaattgtgtgattctatttgtagtcaagtgacctcagaagctattcagtcttcaccatttcctaacttatgacttgatctcattctagccagtgacgctctatagtattatatttattatgtcatccttaacggtgtggaagttgaaggaccagaaagattcacacagacttgtctttgttcacaggagtagacccatgcctctagatttaaaaggttcatcaaggcagtataacttagtagaaagaataagaaactgtaagtctggggtgggatctggcctcagtaattctctggctgtgtaaacttaggtaagatgcttaattttaaacacagtatatccttctttgggaaatagaatataccttacggatttctttataacaattatttttcaacaggaaagaaggaaagagaaatgcttgcatggagccatcatttattcaacagtcactcatcaaatacttgttgaatgcttactcggtgccaatcacttgtccacacactggaagtcaggagtaaatacaatcataaaaattcctgccctctgggtgcttacatttctggttgtgttatgctgcagggagaaagaggagattttcaaaggtaatagtacctaataccatctgaaatcctaaaatttctgccttactgtcttccacctaccatccccattggggaaaccttaccttagaggaggccactatatagtggatatataatagtgtttgtattttatatcttttatcactgttttctgcacacagtaaaacagtgataaaagttatcactttcttaagattttgaggttgctgtacattctcatttgtgaacaaaaactttgctctgattacgtaggattcatttaaaatccatggaatcttttgacactgaagttagaagttcattttatcaacaagtgaaatagtctcaggcacaaggtggaaggatgtgagtcctaaaatcttcggtaggagttggctgggcgcaatggctcacgcctgtaatcccagcactttgggaggctgaggcgggcagatcaccaggtcaggagatagagaccatcctggctaacacggtgaaacctcatctccactaaaaatacaaaaaattagccgggcgtggtggtgggcgcctgtagtcccagctacttgggaggctgaggcaggagaatggcgtgaaccccagaggtggagcttgcagtgagccgagatcacaccactgcactccagcctgggtgacagagcgatactctgtctcaaaaaaaaaaaacatctttggtagcagttttacatagattcccttttgacagctcccaccccagcaactctgtaccatagttattggtaagcacatcttccagatgtgggaactgtggcttagaaatgctatgaagccagttagtagaagagctgaaattagaacttggtattctcaacctcaccatctagtgtgctaatcttttttgtttttgtttttcttcctgggacagataccatttgtgacctgttgagtgagactgatttagtccactgtgttaacaggaaagttgttatagtttttttttttcttccgtattgtttttaatggcaatgtaaaacatgtgaatctgaaaagagaggttctgagaaatttgtgcagctcctttttccaaataaaagatagatttctcttgatgaagccttgatggttggaaattaagacaagaactgaaagcaaaacagcctactcaaggttagacagtgactcgagtcattccatgcacttaaacaatatttaggatgaccctatgtaaactcacattatcacttaaaagccagtataaaaatactacccatctgctgtgctagtcctgctgttgcttgccacatttctctgacaagctgttacctcagtatatagagagagtatacattttggaatccggagtttaagtttgaaaaaaaaaaatggtatctggtacatatggactagattctgttcttccaaatgtagatttgtaacctcatttattcttaaagatgatgtgttaagttagctttttttcttgactctgaagattgaagctcttataattttatgcctggacatgaacaatgtacaataggaaatcatttagtttacactcgccatatgatatgcaaagtgggtgttgggaggtgtttatatcaaacaccataactaagttctaaaccgctctctggaagctatgtaacttttcaggtattaaaggtttggaagatttgtaggtgcagtatgtataattgcttccatacaagtaattttttagtgccaaaaaactctaattccataatttccagtgccattataacagccgagatgtaatcttccttcttaataggtatttgagcagaagaggcaagattgaaagttagatcctcaggcttctctgatgcatcaatctgcggataaagcctttagctaggaattacaatctggaacagacgtgcaagatcactgagtcatttgctgtttttccgtgggacaattacttattctttttctgcagatttcctaggaaatactccaaagtaaaaaatatcaggagcagcagtatgtgatcttccttgctgcttattgttcatactctttatcgcttctcagctttttggctaagatcaagtgtattgtttatactgtctccacgattttcctggaaatcctttttggtgaatataaccttgtgcattacttgaaaatgggcattttaatcattttttcattccactaatatttattgaatgatcattatttgtaagatcttaggagacctgtcaaagacaagcacgggctcatcaaaatcttaaacttgtgtatagagtactaaagaaggagcatgtgaacatatgattttcagaaaattgagaagggaagtgagtggggagccctttgagactggacagaaacaagaggaccatgacactgaagaggacatttttaatttcatgttcaccctgagattggtaatcaagagtcttatttactcagagcaagccgcataaatcaaaaccacaatgagataacatctcacaccagttagatcattaaaaagtcagggccgggcatgatggctcacacctgtaatcccagcactttgggaggtcgaggcgggcggatcacgaagtcaggagatcgagaccatcctgactaacatggtgaaaccccgtctctactaaaaatacaaaaaattagctgggcgtggtggcgggcacctgtagtccgagctactcgggaggctgaagcaggagaatggtgtgaacctgggaggcggagcttgcagtgagccgagatcgcaccactgcactccagcctgggtgacagagcaagactccatctcaaaaaaataaaaaataaaagtcaggaaacaacaggtgatgcaggtgatggagatgatgtggagaaatagaaacaattttatactgttggtgggagttcaaccattgtggaagacagtgtggcaattcctcaaggatctagaactagaaataccatttggcccagccatcccattactgggtatacccaaaggattataaatcatgctactataaagacacatgcagacgtatgtttactgcagcactcttcacaatagcaaagacttggaaccaacccaaatgtccatcaatgatagactggattaagaaaatgtggcaaatatacaccgtggaatactaagcagccataaaaaaggatgagttcatgtcctttgtagcgacatggatgaagctggaaaccatcattctgagcaaactatcactaggacagaaaaccaaacaccacatgttctcactcataggtgggaattgaacaatgagaacacttggacacagggtgaggaacttcacacaccagggcctgttgggggttggggagaggagggagggatagcattaggagaaatacctaatgtagctgacgagttaatgggtgcagcacaccagcatggcacatgtatacatatgtaacaaacctgcatgttgtgcatatgtatcctagaacgtaaagtataataataaaaaaataaattaattagttaattaaaatttaaaaagtcacactattaaagttagaagacatgccctgaatcttccagtcaaaattccttgtttacagatgggagaaagagtgaggaagggttttgccaatggtcacatagatgtcaaatatcatttactgagaaaatcagcataagaacccaggtctctctctttttttttttttgtttttttatcactcaagccaatagtttttccacccttttagttctgttatttgtcttctccactgttattcaaggctatctcaggccagaagcagaggtttgaactcttttcagatgagagcatttttgagactgggacctcatgttgaactaaactcacctccacgttggcacgcacgttacttcctcttccactgtataattttgccgttggattaaactcatgtggttggtgctaaggctttgaccacaggcacatttgaagattatacttatttctggatacaacctcctttgcctccaaactgaaaggttggaaggatgacgggaacaaactcaagtcaagggattccaaatggtcacatcttatgaccacaggctttatatttggagcgctaccatgattaatgtgtcctcgttgccatcctaagacttccatcattttcttccattgtctttctgacttcagctccgttgctacttctgggcagttataggtttctaacccaatagggcaatttcagtttcccccgcgttttctacataagttgtcctttctccacatatttgtttatgcagtttaagtcttgccagattgttctctctacgttctaaaatctttccaattttgaaagtcttagatcaagtactacgcagctgaaaatggctctgcctcttttatggcatttaatatctaccttggattatagttattataacgaccatagatactaaaactttgaaaagaataacaatttgaattcctttgtcctatccccataggacctagcattgcctctttcaattaataaatgtgtaaggaataaattattttggcatattatcccttgtcttttaaaagtttcacaggagtccctttgcaatcaagttaaaggctataaaaatttaacatctagttgtgttggcagagttgtcagcatttacttcagtttatcaaacttcaatatttatttaaattgaaaccaatcagccatttttttctatgcaaatcacaaatctcatttattaatgccttcccctccccctttcccttactacatcaataggaagattacatcttgacatgataaaaggagacaagctttcgttaatgttaagaatctgctccatggccccctttgcccagaaagtcatgaattctgataatcaaggggcagttgcctatgttatttttttttaagtttctagttaattatttgctcttccttatttgcattttgagatgtaacagtagagcagtttacccattctctcctgaaaactatgagtctgtttcagacaaattactatactaggcacccaccctcagtggaggtgcaggagactctaggcccggaatgggtgaaataccagaagttgcatttgaatataatattgactaattagtcagccagaaatgagagctctaaacatgctctttttgtgtcatttactgcatttgtggagcatctaattataaagaaaataagtattcttcattggttgctagtaaagctgccactgaagggcaaaaagacatatagcaatcattgtttaaatagaagcgcttgaaaattttccattaattttcgtgtttgcattttgaatgctttcttgctcacacttgaggtatcaaactgaacaagtctgaactgactgcgtaagaatttaagcaagaactgggaggggtagaaatgaggaagctatttgcattcctggaagacaaaactcacgtttataatctttcttgatactaaggcagtttgtttcccaaatgctatttatggtgagctttttgtcttcaaatgtttgttataagactcttttttttttttaatcatccagtgcagaagttcatgaaagaaagtgaaagtgcacccatacccccattcattttccagagcttaccctgtttggtacattatcttgttggctcatgttttgcttggttttgtttatgcaactttttcttattaatttgttgttgtcgttggatggagttagggagggttaaaggactggagtaaaaatgctatttatctttaccccttcttcacttacagtgtgtgtacgttgatggagggggtggtggggatagagggtgattttacctgctccatttttgtttctatttgctgctaccagcttgcttcttaaccctgggcagaggctgccctgcaggcaggagcagaataagctgtctgtgcccttcctcttcctatacctttgaagattggtgcctttcactgttttccaatcgcttgttctttccataagctcgttcccttctctccactgctttgacaacaccttttagagttgctcctggagctgctgccaagacaatagtatgttttctcttttaaaggtctaaaccctgggaggagaggaactggaggaattgagtcaatataatatacgaatcactttatattttactatctataatttagtttttgacttccatttctaaggaaaaaattgttttcttttattgttttttttttttctgtttccattcagcactcgtgtactgagaatccccaagctatattaagtcccatttgggccattaatgtgtgtgcaacatggtctgtctgttccagtagagaaaaaggcatataaataactttcttatcactggttatatgctttgaaggagtacaaattaaacaacctgtggaagttcaagtaaaagaaagcttatttccagtcacgagaagttaaatgtgagctgggcagattcataatagagaagtaccgtttttttgtttgtttgtttgtttttaactctgagggccctgtgagcttggtcaatttacatcatctcatgaatgacatagggccctatatgtggaaacaaataacaacaacaacaaaccactgtagagtcatatcaaagaaaaatgaaggtggtattcatccacatcaatattaagataaattattaaatatttataaaactctttgacagtgtacagcctctataattaatcaatgtagcactttctcaatacttccccattttaattagtaccaacatcaatcataattaggctcatgctttggtctctctgagacttttaaaacattatgggtagggggcatttttcaggattcaggtatcagctaagagttcatttagccagtagatcgtgaccattcttcctctccctgaagctatgattctggatactgtggctcttcctgctcctccagacatagagaaaatggacaagtttctccttccccattttgagtgcatgatgtgaaaacttagcttgtccagccaaactggaggaaggagaggcgggacttattggagtaactgaaaagagaaaaattggaatatgagcagtaccaatactcagtctcttaaggaagggtagagtccctttctttctgtctctgtaatttttttcttttttgtttttttttttttcaaagaagattgcataagattctgtctctctaggagatgactgatgaaatataccccctgggtcatttgcatcttactcctttgtagtgtagggaagaacattccaaacccattataagcacttactgttgttgggcatgtcataacaaacacaatacctttctggaatatactgctgagcccttggctttttgctgaatttgcctaaaagcccttctgcctattgagtggccacattctgaactagttatacttggttaagttttcacacagtacactctgggatactagggttgcaacaatttaaaaaagaacatagatggaagctttatatctcaaaagctcctacctttgacttccctgacaatttttccttctcctgctcttcaactctatgtttcccaactttgtttttgtaaacacgaaaagtaaattttttaccattttgtgcctaattcctcttctttctctcttctctttttactcatcacaggaatgtcttagctttccttccttctccaatctgccttgggtatagagtcacgcctttaaatcttttagcataccacaatgtaacttacataaggaaatgtttaatttgggaacctcaattggttttgttaacactgctgcaccgaagctctagctgaattcacataatctcatgattttagtaaaggtaacaaaggaaaacgattatgtaagtacctacttttcaacaaacattgggctgggtttcttctttacattttctcatttaatcttcataataaccctgctagataaggtttaccatctcattttgcaatgtggaatctggagcccagagatattaaataccttgtacgagagtaggtgtgcaaagctaaactttgaacctaggcatctctgacttcaaagtctatgctttttccacctcatagaaagaccatccagaagatcaagtgttggaaccttccgaggctgtgacatatttattacttcaaagtttattatcacaggacatgcatgctgctttagcaactagaagtgtgtgaatgaatattactattgtgttgcataagtccttggcaatattactttttaggtgccattctaatcctgccctgtttggaataattgtgattacgagggcataggagtaattcagaaattttttgaagaaatttctcccacagcattagccttagttatgagtataatacaaaagaagaggaccagccctgctggaaggtaaatgaaaagatggaggaattgaacgattacataacagctgttcagacttgtggtactgattagagtcatttgtagagatgaagcagtgtgtcaagccagtgtgggctagggtatactgggaagttctcacagacagaatgaagtgggttgcggcaagccctgaggtatggcaaaatctggacagctagcctggatcttcatttttcattagttggcttccttaactgctcaacaagtagaccaaacaaacaaaccacgcatacacacaaagcaaagaagtaaataaagaatggtggggctaagactgtgaatagctcctagcaaattagagaaatagcttcaagtatatgccttctggatgatgtatgtttgtatatgaaggacaacacatcaaggggtgttggtagtaatctgtgctaagcttagaagccagtatatcattgttctagttctatttctactgtcgagtggctttatagccttagacaagtcatgtaaccgttcaggccccaaatgtccttctggaattacagggattgaactggatgaataaaaagttctatttcaactccaacatttaataattctaaagttcttagtgagctctgattgctcatttgcattacataggcatatattaaccattttaatatgtatcagaaaaggtatgttctttttcctcagaaatgttgaagcctgactttgttatagaaagcacccaggaatcatgtcttcagagttcctaatttttagtgttttcttgtactgccccgactgctgcaatcctctctcttacattggaattctgttttaagttttggtgattggaatcctctttttgatttaagagaaagaatcctaggggtgaaagattactatactggaaatgaaagattactagtctctaaatgagaattggctttggtctgtaatagataaaaagatttttaagggaaaaatattagaaaagtgaaaacgtttttaaaaaaaataggtagcagtcaccaccgtattctggtggaatcgaattcttgaagattagatttgtgtattcatggaataatctagacaaaatcctgccttgcacatagtggggagatacactaaaatactgaaacagctacattgtattcaggtgaagctacatagatgtaaataaagggcagccagcgggtacaagctgtcaattaagtgttttcaatagtctactccgtgtcgccacatcttaggtaatttagataggtagaagacaggtcattagcactgaagttgagaacacatttgaactccagaatgggattaatgcatctccaaaaaacgtgtattttctaaccctgtgcaaaaattatatttgaaaagattaaaacaaacaacagttttcttcgttctttgttatatgtctttgtacttgaaaaaggtaaaattctgcattacgttttaaacaaattgtgccagggtaaagggtaaaatctccatcaacatctaaaggtctttcttgttcagaaaatgaaggcccctctcctgcattaaagaccaatgtggccttatagatccttatacagagggaacaaaatgacattagacagactctaaggtgccctcaattattcccacgtggtggtattcatgcctttgtgtaattgcctcccaatgagtgtgggagggacctatgatttctagccaatagaaacagcaaaggtcacatgtagtctttgatgacttgtgtgtgattgtgttatataagactgtaacatttgttctatgaggggactttcacccttgtaggctttaaagaaacaggctgccatgttgtcagctgccacctggagaggtccatgtggtaaagagtgagggcacctagtagctgacaagaaactgaagccatcagtttagcagcctgcaaggaaccgactgttgacgacaatcatgcaaacttgaaagcagatccttccccagtcaatcctcagttgagactgccaccccagcctaactttgcttgtagacaatgagaccctgaggcagaggacccatctaaaccatacctgcacttgtgacccacagaaactgtgggataataaatgtatgttgttttactctgccaagtctttattgttttatagatagctaatacaattatgttacttttagaatctaacattttcttcacctttcgttttctacataatagttactaagtgaatgtgacttgttatccccatcctcaaaatcattaagggtcttttatttaatatttgatttatctgtggctttgtgaaattcataaatctgctcctcagtttctggtatctcttcaggagagatgccctcttactctactgtatatggaagttgaataagattgaaactgatagagaaatacttgttgaatcaagttgaattacatgaaatgggcttctttaaaagctgttattaaatcttcctgtggctgtcctagagatgatataacagaacttctgctgggaaatgggagagggggagggaagcgttccatgagctgctctgtcatttgcatgccagtgaaattaagtttgaatttacattaagaggagttttgaaatttaggatctatcttaccaaatcacaattcagcctaacaaatgttatggaagtacaacaggagcccggactgtccattgtcatctaaatgatggatgtgtttaaggtgtttacatcagtgctgtttctcccacctaccctaggtctgggtggttgcctgggattgtttactcaaagacagtagcttgacaatttggaaatgacagaggacgctgatacttgaaatcaaactgtagccctggaatagcccaaacatggtcccagggtggtcttgcttctgacttatgtggaaacggccaaatcttcaactacattctgtagcttttctttattcacccagccaactggaagatgagtacctatcttggaaatttcccagaagcagcaattcatactttccttataactcttaacacattgctttatagtttctgttccaatgccagcaaagcccctctttgaagactcagtttccgtcatgctgctctcttacaacacgctttcctcaattctgaatgaatgagcagatgaggatgctgaaatgttagcataacaaaccaaagtcttcttctgttgcgggacattacatttaatgtagctttatacagctcagatttatttctataggttaagcattttgttaaactattcctaaaacacttctgaatgggtcaccagaaagaatatggagcaatcaattctactgtaacctagccaggcaaatattgactatttcctgataccagcatatgttgtatatttctgccttactctagtgagcagaaaatctgtgaaggtttttaggaattgcctaaagacacgcagttctcaaatggcaggaaggagagtaaatcctagtctttctgattccaaactttatattttttccattaaatgaatacagcatacttacatacatacataagtaatacatacattcatacatgtattcagctgtgaacattttttgggcaccctcaatggcccattcgctgtgttggatgtgatgagggatatgtagatgaataagacctagatcttgcccttatagggaaaaataagatttaaataggttaaatcctagtcttgtgggaagatagaaaagatgcacaaaacgaaagccagactcaaatgagtaaagttagattataagtctgcagatgtaggtaggtaacctgagctttccaagaactgtctcctcacttgaagaatggcagttaataatctctgctttatagactggttgagtggattgaatgagaacacatgggaagatgctggcatttaataggcaacccataatagaaatgttaacatgtgctctggggtatcttcagaggtattgggagaggagtccctgcctaaggaagaagcagtgctgggcagaggaaggaatgtggacttggattggaactcagtggatctggtctccagtcacccaacaagccatgtgactgtggaccaactactaactgcataggcaccttggattccacaattgtaaaatggacatcactggaaagccttcctcatgaagtgattagaacagatgcagataatagcacaggtgtggttgaaaattgtgaacattcatggaaaagttcacttgttttttttttatttgtttttgttttactgtcaagaatataataggagccactcaatttatgactctgtcctttcacttattattaaaattatggtattccttttgccactcctgtggacaacatagccaagcaaatgagcattttagtctttctcgtcgtcctgtcttagtttgccaaaactttgaatactctgtgtgtgtgtgtgtgtgtgtgtgtgtgtgtgtgtgtgtgtgtgcgcgcgcgcatgtttagttgctgttgaaaatatttgaccactatgaggaactggtaaatttgcctgtgctcaggaatacattacatggatgctctggttagtcactttgtactttacatctgacttttcctccatcagagacaaaattaataataaacaatttttaagattttggataaaaaccttattaaaatgcatggcatatttttcttttttcttatggggctattctaagcatttgaaaccttttgatgactcagggtcatcaccatgaccatctattgttatgctctgctgaaactcagtaattttttcctcctatccccccaggctgtcagcggccatctctgctgtcactgtgctgcctttcacagtctttcccactaccttctaaagttcattggttttaatctcctctggtatgaggaagaaacagcaaaattgtcattagaatcattggtgaataggagtcaacaaacattcactagtggcccaaaggagcactcatcagaggaaaaaatgttgttttattttgaaaaattgctattttataaacccagagctgctactcccccttcttttcttctccgttctctttcttcatctttttctttcctttccaaccttcatgaaaactggaaatatggactatgacttcatatgctcttacttaccctctgctgggattttgttctgaaattgtaacaattagaggagtgtttctaaattggatcgcttcagattgtctcagttctctgtgactttaagaacaagctgatttgaagccacatactgttggcagctttcatccatttatttggactatcaagcaagaatgctcacaatctttcatatgaaagaagacatctttatttccagttcacactcttcataataagaagggtatttgaaataaagccaaaaagcataacttacttctctaacttcatatttcagatgcctgcaatagtgggagaacatttttttactaccccaccttaccctcaaatcagtagcagaaaataacagtgatgcattcagacagcaaaaagagaaaataataattttattaagtttacaggaaaggtctcagctttcttaaaagcctatctttaggaagtaagtaactggagctgcacacccaacagaggaagatgactttacttatcatttacttagaaattatctttgaaaggatcattgtgctgttgttagcaaaaaggagcttctgtaaatgtcacctcaaactttgaaatctgggaaagtctcattatgaaacgcaagttttatctttcatactcagcgctggagcactgagtatccttgcattcatgaagactttctggtacagagtaaacggagctgggagcataagtgagaatgcagctccagctgacagacccccagctctatcttcccaggtgcatttcctttttttttttttttttttgtgagacagagtctcgccctgtcaccaggctggagtgcagtggcatgatctctgcttactgcaatcaccgcctcctgggttcaagtgattctcctgcctcagcctctcgagtagctgggactacaggtgcacaccaccatgcccagctacttttgtatttttagtagggatggggtttcaccatgttggccaggatggtctcgatctcttgacctcgtgatccacccaccttggcctcccagagtgttgggattacaggcgtgagccaccgcacccggccgcatttcccttttgtacactaggagctaccgagtaccagaagtctttgttaggatgcacagttctttgctcactctgcctgggacagtggctcaacatctccagtcccctttgagttacctccagaaggttcaggaagagcctttccctccaaaatgttcatagcatttgatctaccttctctaagataagcagcttttgtcacattgtacctagggtaaagatttgtaatgccttaactctatgccatctgtatgcttcctgcggacaggatatgcttctaatttatcagattcccttaagaaactacaccatgatgcacttctcaaagtatgctcttaactaatacttatgggaggaaaaaaggaaggagaaggaaaaggagggaggaaggaaatcgtgtaattgcagaaagtttatgtctgggacccttgtgtaataatgttaaataatactttgacttttacgccatttttctatatacaaaattctttcacatctattttcaccactatcctgatattgtttgcatgatgtgtagtatgtatgtttttaatgtgtgtgcatattgtttgtctctcacacatacagcagccccaacactgacaaatccaaattctatgagtacagggagtttgttgtgttcactgctgtatccccagcaccttgaacagcacctttcaaggaggaagaacctaattcatgtttgttagaagaatgaatgacaatattgtcttatttgatcttcaccataatcccgtgaagtgaataccgtattcatactgtatcctcgtttttttgcagatggcaaaactgaggccttgagacctgctcaggtttgcatagctagtttttggccatggcaagatttgaattcaggtttttctatttccttattctctcctttttgtcttctgggaatttgctatattaatagcaaagcaagaaatgtcacacaaagaaaaattgtttccaattttaaattcatgatgcatatgcaagaaattactgacttttcaatccaatggtaacacagattgtgtgatttttaggaggaagagcctttcttttccatctcttgcgtttattagcatatgtgtcagtgcacacacatctacaccgtgcagctctcaccttgtacttttccagtctgaattcgttttgtaggctgtccctgccctgactatcccaggtgcctatcagggctgtgtcttggtcaggctaaggccaagcaacaggcaccagcatttgttatggttaccttggcaagtgaatggggtttgagggaagctggagagcaggcatttcaggagtagaactaggccagtctgtttttgtaaaaagttgatattcaccctaattgtagctcatgttggcaagcggagtaaacacccatgcaaattactaagttgtactgaatgtccaaggatgtcaataatcatcttgaaatccaaataaatatattttttactgaaacggaagccaggcaccacatgcagtttctctctgtcactggagacagatttggcacatatgcatgagacagagaagggcaactcttcaggccctaatgcacacaggaaactagggatgtgtatatcatacttggcagcaaaatagaggtggggcagccatcactttctgttctcaagcacctctcttttttcctatattttaaaacaggatgaccacaaagaagaataaggtatacagtagcataggatcctaaattaaagcatgagggaaagctagcattagtttttcatctaaagtccatttgggtaggaatgagtcagtgcaaaactgtacaaaggtgatcttaagtcacatgttatgttaccgactctgtggcaatggctgtgagtagtccaggaactctccaaggcctatttttaaattcacttagaccaagcataatgaggtaaagggatgtctatacacattctcaagtttagttctctgaccgtgagtcagactgtgggccatggacctgggcgtctcagtggtagcaggactcattttttccccttttctttctcataaatgacttaggagacacattggagaaccctatgtgctccttttactggaattatcttttaaggaagtactgatttcacctcctgtacatggtttgctgagatggcctattggggtttcccaccagtccacaactggaagtttctatttgcacattttgactgctagttctatatttagtcaaaagcctgccttttgcctggtttcttagggaaatagtctgtaggagttgctgtgtccatttgccttgttcacttgggtatttatttgactgtataccctgattatttcctaaattaacaaaaaggcacagggccccaaatgaaggaagaccccttgtaatttgttaaaaaataagtttatgaaaatgtgtcgtcaggaaatcagagttgtgttgcggggtggggagcatgatatacatttgtgtttgtatgtttctaattgtctacagatttatggcctactgtaacaaagccattgtaagtgtacagtgggagggtcaagaaaccttattctatggattcaaacacattatgcatacaatttacacgtaggcacaaaaatatcccttcaaagaccctccaataagctatggtatagttgaggaaacactagacttgaagtcgggaaaccggagtgttgtcattttaatctcaggctatatctttacatgaacaagagaactttgtgttatttttcatattcgaactctttgtgctgaagattctgcagtcaaactgcaagacacatacgcattggctgatcagaaatgacataaccattcttactgcactgagttgatattcagtcaataaacagtctaatctcggttaaatgtttgcatatttttagacttttaaaaatttgaaatcagcctctcaagttccattagacagttttatcacggacacatcaagttccatgtacaacaggctgagaaccattaagctacaaaatttctaaaattttctccaggttctcagttgctaaattctctcttgaacatttttggggataaaaaactggcagagaaaaagaagaaagtacacctttttacattatgaaacacctatgttcaccttatccatggagttatgccagtgacctaatgcctattaagttcttccatgttccaaaggtctttctgtacttgaaaactcataggtgagtcaggtccttcactgatagcttatagctaaaaaccacttgggagaggggctgtccaggtcttatgtcaaaactttgtcccatacgctgttagtgttagaaatggagccgtcagcaaatagaatctgttgtttcatttaattacttttcaatatgccattaccagaaatttttatgtaaatacatattttattccctgaggcttgtcaatctgagaccaaaattatacaacactgaaaaaaaaaaaaacaaaattttctttttactagttctctccctgtgttactgtgtcatctctcatgcatggtataggatgatgatggtgctcaaacttagccaaagactcttttgttggtattcaattggcagaattaatgaaacaaatattttaagatccctgaatatgtgctaaaagcatataactacactactggctagtcagtaattggtgcctcagaagagttaggtatttattcatttaccaaatacttatatgtcaagcactgttccatgtgttttcttaacccatgtcattgttaaaacaaccctttgaaatgtgggtactgtgattatttccattttgcattgaggaagctgaggcacagagaaagtaaggaacctgcccaaggtcatactatcaattgtagtggtgcaagacagtgggctctgaagtatgttctctctatgacgacactgtgctctgagggagtgagagaaggaggacattgtttggggcccagtgaattaatgaacaagatatctgactaggatctgaagactagcagaattgaccctacagagaatgtttgaccctacagagaatggctggctgttggtgttcacagccgtgagcatagtgtggtccacagcctcggtgtggaaaatggtctctgtggttgaattgagagaagagcaaatgaactggtctggaatagggtgtacacgtaagtagaagataagattgaaaacaaatttagtgccaaaatctgagggaccttgagccccatgccaaagagtctgtataccttatctaatttgtttaatggggccactaggcaattacgggtccgggacccgcatggcaagaatgccttccatccacagcagcccttgatgtgaggtcagaaagctaactgctaaacttgcagtcctgagggaacaccctcaaatggataaacccagctaagcaagctggaccatttccttgggaattattcacctctcaatcaaagaaggaaacttcccaaattcaatccatttgccttaacgtggtgtcccattaccacgaatactgagttgtatacattcttccctagctcccttgaacaagcttctctactacttttcttaaaaaaaaaattacccatttatgacttatttattatttatccccttcctataagggaatgtccactctttgagatcctcattcttcctccatcatgatgatgtgatgatgtaatgatgtagtcaaggcgcttccctggcctaatgtgtatgagggcaggctttgaagtttgacagtcttaaagctagagtggtgtcatgcattgctcacctctctaatcccagatttcctcctctgtataatgggataaatacctttcctatgaacattttcagatttttaaatattaataattcatatgaaatactcagcccagagctctgtacaaaatatattactcaataaatgtagccattgatattattaataatattattaaatattgagaatgaattctaccaaagtgcatggcacttccagtggctgattctgttttatgtagccacaggcctttaccaaaggcaatggcaataaagagagggcacagcaagatctatactcctttaaactaaggtaacccacttcagttagtccccacagcttctcttgcaactcttaccctattagctgtttctggggagaaatttaatgggcatagatactgggtggatagaccataccccagtgatactccagagagtgaaaaagagaagttaacacagggcgtgacttcctatgtttaacttgcagttcttatcttacgttgcccatcagaattatctgtggcatattctaaccatattcttcctaggcctcacccctagagatactgaattaattgttcttgtgggtagagtcactgttatgctttaagcttcccaagtgattctgatgggcagccaagactaagaatctatgatttagatagaagatgggaagccgagggaggccatgggaaagctctgatggtgagtatgggaagaatcaacataaaacaagcactcaacaagtgtgcatctagttgaagccttgcttctcctgcatttgttatctcagtgtgctatttaaaagcagcacaaaaaacaaggagtgaagaccttgatatcaaggatgtgaaagctacttctaatcttcaaacagatattaggcaggggctttaagacttcaacttgagagaaaagctaaggcacctggtatgtgtgtgctcaagtgaaatatttgtgctgactgagggcttcaatgtcaggctgtctgaaaggacacaatatcaacagctttgctgtgcttgtgtatgagtctttaaatgaatatatctggttatagcttatctcttttctccatgctccctcatttccaatttccaggtaatggagatcatctagttcggtttcagctgctttattttgcagatgagcaaacccagtgatgcctgtgatctagatggaggcagatttcctctctcccccaccctggtataccatagtctgttctaatgctgggatcaaggatgaaagtgctaatttgggagtgtcccccactttcttactagctgatatggtttggctttgtccctacccaaacctcatcttgaattgtgatccccacatgtcaagggagggaggtgattggatcgtgggggcccttcccccatgctgttctcttcatagtgagggagttcttatgagatctgagatttttaaggcagttttccttgctcttgctcgcttctccctctgctgccaccttgtgaagaaggtgcctgcttccccttctgccatgattttaagtttcctgaggcctcctctgccatgcggaactgtgagtcagttaaacctctttagaaattacccattctcagggaagttttttatagcagtgtgaaaatggagtaattcaatgaccctttcttactgactcattggtctgatttcttgaccaaagctctgaatattcccatgtcatcctgtctaaccagctgtcttatactctttttttttttttttttgagatgaagtctcgctctgtcgcccaggctggggtgcagtggcacgatctcggctcactgcaacctccacctcccgggttcatgccattctcctgcctcagcctcccgagtagctgggactacaggcgcccatcaccatgcctggctaatttttttgtatttttagtagagacggggtttcaccacgttatcttattcttaacagtgtctgaggtatttttttgaaacacaattcttaccttaactgccccaggcaccacggcagaagaaccatgaccttgctgagaggcactgcatgccaaatgagacttagtttttccaaagtacttgggagaagaaaaacaataatctatatgatgggcttttggcctaaacccatatcctttagatgacggaatttggcacagctcatattctggtttaaagaaaaatgttttgttatgatgtcatttgcctaattaatagcaaaagaggattgaattttccctatgcaatgtcatctagcctttgagattttagagttaatgactcaaatcaattgtcctgtcttctgtgaaaccttcctgatgccttcagttggataaatctacccttggtgttcataaggcattatattgatgcctctgatgttatgcagatatatcccttcttggctttgtttgcccattcaatgaacatttgttgaacaccacctatatgccaagatagttggaagatggaagtgtggtacacagaggatgtggaagggaatcacagaagatgagactatgaaggcaggcccttcaaggactttctaagtagtactcaggagtttgacaaagaggagctagaagaggtttgtgaagtcagatgagtaatataattaggtttgtattttatgaagggcaacatctaaatatggcttgtctattcagcaagcacttattaagtgccttttgcatggtagacaacatgcttgatgctgaagatacaagaaaaaatttaaaatggtccttgccctcaaggagctcacagtctattgagttacctttctgactttcccactagattgtgagctcctggagggcaggcactttcgttcatctgaaaaagagcttaaatttcagtgttaatcctagattacaatcccgcctctattattttaactttgttcacatctgttaactgctctgaaaatcagagctaatactgcctacctcatcagggaaagattaaacgagaaaagaatgagatgtgattgacacagcaggagctctgtgtatgctatttcctcctctatctctgtgcctggtacatggtaaacattcaggacacttctgctgcctgcttggctggagagcctgtctatgcagcctcagtgttgggaggatttgagcctggggtcggcctggcacccagctatggtagttagcaaatctatcctcagctcagtcagtgatcaaatcactggctctaggctgtaaactaacagggccagaattgggttctggactctgaagcccaggcatgcatattgcaaaagtcagaatcgaagtcataggaaaatgatgaaatttcctttctggccagaatgctattatttcaccaagggcaacaaatcttcttggcaggaaaagttgacttgcttgtgctttgtgtaatcaattgtatttgcaagtgatggagtccttctcacagtggcttagaggaggtgttaaccactattctactctctacttccatgagatcaacttttttagattccacacttgagtgagatcatgcaatatttatctttctgtgcctggcttatttcactcaacataatgtcctccaggtttgtttgacatttcattgttttcggagaattttcacagttcattatctcacttcacagttcctaatagtctctctgaggtccatatggtaagaattagtaccctttactatatttgttgaatcacaagtgagcggaggaatgggtatagttgagacccacagaagtgaagtgacttgcccaaatccatatagcttattatgctacctgtttgttagaggtttcctgttgtatcagaaactagtgagataaatattagtaatttttgtcccattgacacatgatggtatatcaggaattctgagctcattttttttttttggctcaataagtgaccttagaaaatccagaatgggatttttaagttgaatatccttctctgacctgtgaaatcactgcatctgtttccctgactttatcacaaggtaacccaagatattgccaatatttacatgtgacaaactctgaaagatgtgcataatgctcccaaaggtcatcatcttcatacctaccttataaagtgcaaatggaattgacctagtctagaataagcaggcgagatgcagagagattatgtgacatagctaggtcatgtgactagtatgcagcaggcttggggcataaatcctagtcctctggctcccgagtccagtgttcattacgctatgtgacatgtcagtattgctgtttgctcggggttaggcttttcctttggaggttagagcttgataactctaaatcgataaacttcttagtatgccacagtaatgctagcagaaagtatttgttgaagcaaaaaatatgttgtttcaaggggtctgctccctgaaagataagtttttttctttatttgtggttttacatctaatttttctaatgtttcaaaaaacattctgtgttcctttaatctacaagttggaatggatacggtgccctaattttcgtgttccctttgagcacaagcaataacacattttaaaggatgataaatagctgtgtaaaatgtagatgggttctataaatacttaccaaaatccctgtagtcagaccctggtagaaggagagaatagtcaaagtgttctctctttccacattcttcttcttcttttaggggtagtttggtagttaagaacacagttgctagacccagacagactcagacttgagtcttgccctacctgtactacctgttagattttagggaactccttaattttcatgggcctctatttgtagaaggatgctaacaatattatgtgtagtttttagaacattcatctagtataatccctatacattttaagtaggtaattatgggttatctctcatgactgtttttatcttcatctgagaccctttctttcttcctttaagatacttctatccatatttttccctagagagaaacagtattagctactcctgcctgtcagtttaagctactgtgtcatgactattttgcatttctaagtttatccttacctttatcatcaaagtgctgactaatgcagtatctgccaccttgtgcctgctcagtaaatacaatttgggttaaactttattcatttttagttatgagtgcaatataatgacatagctaaaagttcgaaagtagagaagggataacaaataggtactgataatgccactcttgtaatactacatgtagctgactggtgaaggccatggactatagagtcatactggaatccaggcttcagtgccttgagtgctctacttagaaatctgtgctttaatttccttagcactgaatgagggcaataaaagtaaccacctaatcaagatgcagggtggatgaaatacatctgaagcatttggagtaaggcctggcccaaaggttagctgtaataataaaaaggtggatggtgacgatgtacatgatgatggtttgtgtgtccctttattcatattgccattcacaaattacttgagtagtcctacttctcctgtttggtttatttgttgcaagaaacatgtgcattagaagattgaagatgattgcgcccacttgaggaaaccggacccagagaggtgaaatgatttcctaaatagcacccagaaagtttatgatagagaggaacatagaactctagcagccaggctgctctattcttattttctctatacttttcttgttggaaaaggacactgttgactcctagttaccatctaacattgtggtccaagctacagagacagtagagcacattaagttctttcagtctggcttttatgctggctttgtgtgatagtgcctcatatccactgaaacgtaagtacttaaggagtggatgggaagtattcctggaaactcacagctaagcttttatgtaaagacagcacataaaaaaaaaaccacttttcataactttatggaacctgcaaaaaaatcttggcttccttcatgatgcttgcccctagagtgtcagcatagcccttgcagagaaaccccaggatacctgtatttctccaccctggccttcctctgagcattgagttgttagcatcaaaaaatcaccacagccacgttgatcctcattttcttcagcctctatagagcctgctatgccagggtcctgggtaatctgcagacagctgctgtcatgcagcctcatatatgggttgactttaccagcaaagaattccctcaccttcgagacatcactgacatcttcatgcacagcacagacaatgaaacaaacaaaaaagaacaaagagggacataaaggttggaggtcatttacatttgcatttacttgaaaggaaacatgctaacttgttgacttgactcacttgatgtactttttcgagatttcacctggaatcttgttcttgctagatctctggatatgcaaatcccatctttgtccaagacctaattcaaatgccaccttttcttgagaatgtcccttcatctcctgagctacaaccatctcccctttctctgtgctctgatagcacatcattaaaacattttacttcggattgatggacatttttgtgtgtctaatattttctactatatcttctagagggcaagacctacttctcaatatctttagcatggcacttactaggcactcagcaagtgccctttgaataaatgtattatttgcaatcatctcttcaggtatatgtagtttttgtgttagaagcttgctaggttgcatcttgcaagagaaacaatgtgatccttcacatgtacttgttcttctccgaatgactttctatgcaagaagcactggaggctgagttcatacgttcagcattgtcagcagaattgagtcctgaatgacctgggtcagtcactacattagatgatttgattagaaaaaagaataaagccagttataacttgttttctgcctattacccaggatatttagaatgatggagatgcagaagcatttagagtttttgatgatactcatggtggtatcatgaaaataacaccttgtgtgtttatggcacataattacatgaaactcattttattctcattagagtgtcaccttgaatcctgttctttttggtcttaatgtttagtgattagaacttgggaagcaatttctagaaccagaatggtcgggtacaaatcctagctccttctcatatcagctctgagaacttgggcaggtaatttaacttcatgatgtctcaatttcctaatctgtacagtggggcagccagagtacttatttcattgtattatttgagaagtgggaggacatagtgcatagtgattctataaatattactattgcaaccaccaggctttgcataaggccctaagtcaagaaaactttcaccgtttaacagagatgtttctctctgaaaggcatgttatttgagaaatagttgttgagatgaaaggggggaggcaagatagaggccagcttgatgagggctttgaactcagccctatcaacaagaagaccatagggctgcatagactgaggagaaacactctttgtttgtcgaggaaaaggaaacttgcaaagggatggcaccagcgcagcccgacagaattctctgtgggccacatctgttcatgccagctgttgtcagtgtgtgtcgcctcgccgagaataacagcaatgattttcactttatagcaacttccatcttgggatctcagaatgctgcataaatgtagattagggctcccaaaatttttgccaagaatgagcatactttacagagcatcaagaatgcgtcactcttctgagtgaatctttattggtgcaaagagaattaaacgaatattgaattagaccttccttcctgatgtgagctttcttcttgattttactccttattttctagatgaccttgaataactcagtttccctccttgacactcagttttcttcttataaatgaagggattcatgtactactaaatggtctccagtgtcttttctgtttctgaaattcacagaaggcagggaatctaaagttgcctcccacattttagaaaggcctaagttgttgtagaattgaatattttcttagcattttattcatgatatggtaagaacccggcagaaaatttttcagtttggtcactggaaaatgacactgtcctttagcttctaatgtgaaagaatatagtattatttacctgtttttccctttgcccacctttaggtacagtactatttattattttattttactattttaagatttaacattaattctctagcttatatctcagattgataagagcagttctacttcttttgatgagtcaagtgaatgaatgaagacattaaaaatgaccatgtcggccgggcatggtggctcatgcctgtaatcccagcactttgggaggcagaggcaggtggatcacctgaggttgggagttggagaccatcctgaccaacatggagaaaccccatctctactaaaaatacaaaattatccgggcatggtggcacatgcctgtaatcccagctactcaggaggctgaggcaggagaatcacttgaacccgggagtcagaggttgcggtgagccgagatgttgccattgcacactgagcaacaagagtgaaactccatctcaaaaaaaaaaaaataaataaaaactaaaaaacaaccatgtctctcaaagccttgtactcagaccacctgcatcagaattagttgggggtacttgtaatatttttggtttccatctttgtgcgcagagagactatatcattaaaaaatgtttgtccttaagaaaggttcttttgatagttcaagactttgtaatgtatgtgaaattccactacaaataagtggatgggttgttaaatctcactggcaaaaggcagatgagttgagagactgaggcacttttgttgcggttaagcatccctttctggaattgatgactggattcaaatcccaggttctccacttattatcacggtaatctttgtactccagctttctcatttgtaaattcagaatagaagccacctaatatggttgcactggtgatgaaataagttactcaatataaaacattttgaacacctactaagcactcagaataccttatttatactcttgtaaattatacataaattaatacataaattaaatactaatgtatttctacctttcagagtttgtgggaatggataaaagattccttcaatatgactactattattttaatcatggtcagtgattgattagaaatattaaatgttgctggtctttagattcactgtcagagcatgatctttcttcccctcggctgcagtgctgacgaataacactgagtcattcatattctctcatccaccttcctgccacatttgaaagacatccatagctcatatttgacagactgtgtgtgagcatttaatacaaataatcgtgcgccactgtcaaatattagcacatgccatgtgtcttcttatgtattactcacagtggctctcagatgaaggcatctacccagctcctctgcctactttcccaactccatttacaggtgaagacgctaaaggggggaacaaaaaacttgtgaaatgttatacaaaactggaggtataatttggcatttgaaccagcttgttctgcctctgaagcccacgctttctccattataccacaatcaatatttctgaaagtaaaaaaggccacattggtctccagcttctggtctaattagcaccatactttaatcagtgagtttgactgtcttgattaacctttacgatagaccatgtaagtttcatatttctaaatgaatatatagagatggctgtaaattagtggaaaaacactaagctggaatcaaaagactcctgcctaactcttggttctgccacttaatatgggtatgattttggctaatcacttaacaaaccactaacttggtttctacagaaagaagaaatgatttcatgcattggacaatattaaataatctagtgtgtgtgtgttgcacccaagtatcttttgactgtaaaagcacatagaaaggtgaaggaattttaatcccatggttgatagagtagaatgccacctcagttcctctgaattctgtccctcattcaagtcctaattcaagctctttaagcacacagtactctctctctctctctctctgtctctcttaatctgtatcatccattgatacacttgaataatatttatacatcatagtatatctttaaggatgatattagtttcttaattggtgtaggctggaccatctcatttaacttatggctcatgcctgtaatcccagcactttgggatgccgaggcgggcagatcacttgaggtcaggagttagagaccagcctgggcaacacggtgaaaccctgtctctactcaaaatacaaaaattagacagagaaattgcttgaacctgggaggcataggatgcaatgagctgagattatgccactgctctccagcctgggcaacagagagagaatccgtctaaaacaacaacaacaactcacaaagtaaattctatttaccccattttatttttgaaataactaataggtagtaaaattcagcatcctgcactggatcatacaattggtaagctgtggatgtgggatttgaacccaagtaagcagaccctagaacctatatatctaaggcatactgattactatcaacgttcaattttttgctttgttcttttatttctccttcatataccttgatttcctgactggattataaattctatgaactggttgcatctcactcattttgatgactgctttaatgcctaattaattactattatttgtggataatttaatatagatttcataggaggctatagtttgctacactgctcgtgtactctagaaacaaggacccttgacttttttctcttctttggctataagcttatcttcttaccatgttgagatactttgatttgattttcactggtcaagcaaaaaaacatgttcttgttattttcacttaggcactttgtctgcctccctgctgaggcccaaaaattcagtgtgatcggtgtgtctgtcagaaggtaggattgcttgcctagggtggcattgttattgaacaaaacacatgccctttctttgcatcctaagtgtcttggattgctgagccagaaccgctctgactcaaatgaaaaccaccttgtgttaggtgaaagatggggagttaaccatttgtttgctggtttgcatttcccacgaaaaactcaaaaacagaaatttacctcgccatggaaagtgatgtgccaagcgtcatatttgcatattaaaaccgaaaactgatttgcatgttatttcagtgtcttgtgtcacgttcaggcatctgtcaagcccactagacagaaacagcttgtacagtaggaaagtgtttttatgcatatcagactgaaaatctaggtgccttatttttatcagcaacttgtccacactttgggctctccaatctctcctaggttcatacctgaaaatactaaagaaaagtctggaaccccatgttttataaagtatgtttcctgttattttctaagagctatccatttttataatattctgtttagataattttaaaattataaagagaaaaactcaaattaatcataatatcacaatcctgacataagtcttgttaacatttggatatattcacttctagtagctgtttgataatacttacataggctaacatatactggcccttttgcatatatatttttatacatttgtaattatcagatgtactattttcatatcttcttattttttggcactataatggcaagaattatgacaatccaagtatctaaaataacagattaataaaatcttattttgagcagacaggaaattagaaccagtcagggctggagccgtggcaaccgaaactctgtgccgtctttttgatagtgctttattaaaactgtagcttgtaattgaggatagtttttctatgggacaatgcatagaaagctgtgcatggtgataaaacctttttttcccgacattagagcaactagcccattgcattcttccaggcaaccaaatgaagatgaaacgtgtgcctggagtcactgccaggcatgtggggcacagcaaaggccaaaatatggttttagtttgaaaacccaaccttgaataatggttcattctattcatcaaacttttaggtcatgggtcttgcctaggtgaagccatccaatggaaataatgtcttggaattctcttgcctttattatgtcaaatctctaatatataacatccataaagcctaattaatgggaaaaactgagtgtatgttttagccataacattgtggaaataggttcttttagtttcacacaaatagagatcttctcaccccaccgagaaaactcgctttctcctttacggagggcccgcatggaggtttagagggaaggaaccctgaaatgagaactgtgaataaggttggcaggagatctttgacctagattctcctcgactctgaggatttggcgcttctgctctgcgactcgcttttcttacttcttgcctacccggcaggataacatcagtggttgtaccttgtctgccgaagcctaagggaggctgctctgctctaaatagccaagcatgagctttactttactatttgtcttttggtcctaaaggcgagactgtacaagaattaatagttggagaggcagcaaggcatacgttcaccaaatggcatgaatttcaagatttgtagctaaaaagtactcagagtaattacatcccttgctaaagcaacaattaatgtgaaattcgggtacactacactgaagtcctttatcagcagatggaaaagtggagagttactggagagatctcattctgcaaacattctgcttccaagaagaaaatcatctttgttagtggtttctaagttgtccctcttgataattataactgacatctatttgatatttaatatgttacaaagcttcttcatatgaatcagatattattattctccagtttatatatgagaaaatcaacaatagaaaaagaaatcactggagaacttaagtagtatcttagacatcaggcctaagagccagatgctccaagcccaggcactattatagctgccttgacacgtggagacggagagaggtgggtgtggagagacctcactttcccccagctcagcctagataaaacccttgtgtgcagagaccagggccccctgactggatgcccaggccttttcccagctgcagtaactcttccaacaactcctcctgtctgtaattcagaatcatccatccttggctatgactccaaatttggtttaagaaaaggcattttatgggcatcgatgcatggcatgagaaagggaatatgaggaagtagagattttaagaaaatcaagatttcgaaagttgaagatcaactgggatgagtttcaaagcaagaatcaaacttttaaagtcaaaatttctgggtcttcctctttgtgtccttaaaattcattcttcaataaaatggaacataagaatagaagaaccaagagcatgcttttctaatcccaaggagctgtgaggagtgttcatttagaagatttcaattcagatagtcaggtatccaccttccacttctttccttctctgtggccatcgcttttaacctgaaacagaagaggtatccagcaaatcatctgcccctggccagaaggggttctccttccatttaagcagtgagatgttgagagtagagtataattcagtgagagtcaaaaagtagaagcagccacaggaaattgcaaactgcagacttgacacagctaaatagaaggggggaaaagaacgaaaatatcagaaatatattttttctggcaggctttcagctctaaaacggggctaattctaccttttgaaaagaagataatttcaatgtttcttttttttcaagaacacataattgaagttattttccctctgagggaaggaacctcttgtacatcactacaaatggacaagaaaaatgagcagctctggtacccagagtgatagagtattcattatcatgtaatctttttgaatatcttggctgccttttcccggtgttttatccgcctgagcggtgcttttctggtaaggttcagatttgcagtaaatttgagttatctaacaccatgtaacaaagaaatcaacagcaggtaagcactcaagaaagaaaaatgatcacgccaaggtcagccccagaggaactcagggggctgacattgcgacagatagtgggtatccattttgtaaattggatccttagcacacaggttaaagtaggtaaattgtagtaacaaagatgcaagatggtgtggtgttttcctgggagccatttgcaccttagtgcgggctgtttcccatgcttcctttttcctttagaaaggatgatggatatttttcttctccactcagaaaaggggcagtgggatgataaggtgattaacctttgtgtgttcttgatttcatgccccaagtgtagtgaaagttcagtaggctgcagaaaccctgtgacctgcccattgcttactcagattcagaatgctgaatgaagttctggatgtttcaggggatgctgacaactggcttaagtcctctcataaatggaaatctctgtcataatgaggtttccacttactcagtgtgtctatttttatagactacaaaggatctgtaaatatgaatatctgtgatttcactctaaagattggtaatgatatgtgtcttgcatactatgggcacaaatgggcacaaaaaaatgatagagtagaaccaaaggaagctttgaaaataacatgttacacataaagaaactgaggctcagaaaatggaaatgatttgagcaaaatcactggacaacttaaaggcagaactaagattaaagatattctgaatagtcaggtcttctgtatttatgggtttctatgtaaatgtataatcaaataccatgaagtgttatatgaatatgacagatactgttatgtatgttattcttaatctagtggagtttccttcttcatcaagggtcctattcatgtgtacattttgtttcagaagcaagtcttcattactgcatagtcccacccataatgtttaccagggatttagacccagatttggctgtaaatttggcttcatattaagtattttcttgaatgacaatcacctgggcccctagcaagaaaagaggaatggcaaagaagaaccagttttagataattttcagctgaaaaaaaaaaaatctttattttaagaagggaaaatacagaaacatagaaagaatataaagcattcaatttcccatgactttcaacgattaacctttgagcatattgtattgccgtaaggcaggtcagcctggccagcgagtgacttatctccatgtggtagttcagggcccagtctccatccttcctgtgcctcacaaggccacatctaactgcaaggagcatgggaaatgtagtctagcagtgtgcccagcaagaggaggaaatggattttggtgagcagttagcaggctctgccatgcttagtaaacatcagtcctttttaaagcatattagccactaaattgctcagaatgccacgatatctggctgcgttttttttttttgaaagtgtcagtggtcttggtgttagaagatgtttgccaatacacttacttcagaagcatgactttcataaaaactcagctcccatttttaaatctcataatgacttcccattacttaaaacaggcttggcattgaccatatcttacttctcttttctcatcctagttctgtttttttccctttttttttttttttttttttttgagacagagtctcgctctgtcgcccaggctggaatgcaatgatgtgatctgggctcactgcaacctctgcctcctgggttcaagcaattcttctgcctcagcctccagagtagctgggactacagacaccaggcacccgccaccatgcccggctaattttttgtatttttagtagaggtgggatttcaccatgttagctaggatggtctcgatttcctgacctcgtgatccgcctccctcagcctcccaaagtgctgggattataggcgtaagccaccacgcccagcctttcctcttaacagttttttagatatacatgttcctcctgaaatgcctttaactttcttccttctttcttttcttcttcttcttcttttttttttttttccggctgttgtacgcaatttattcttcaagatcaaactacaggtcatctttttttggcagccttcttccgtctcagaacactgaattcatacctgtgttttagagcttagactttattgtaattgcctattttcatgtctctttcttcccaaactgtgagttgttagagacaggatctctgaataatttgtctttatacttaaagttcttggcacttggtaatcccgtaggagatttatgttaagacaattttgacggagtcctctaaaatctgtcgctcagtaactcacctgtggatcatataacgttaacttgcctttagtaagagattcgggtatttcagaaacaaacatattagtgattaagattgatacttacaagaatgtctttttttaagagaaaggtttgcttcacaatgtctttgttttgctatttggcagcaaacctccactctgataaaagaaatctttgcttagataatagactcagactaaaatccaaacagccgcacagtaagagaactagaaagtcttggagacaatgatatcaaaaccccgagaggcattgcagtgaagaagtatgcccaactcagcacaccccagtttcaacgttctgctgtttttaagcagcggtacctctacaaggttgctcacttatcttcttaagtctctattttctcatccagaaataggattacatgtcatacagggctgttgtgtaggcatttgagatttcacatctgtgaaagtaggcatcttgaaaagggtcttgcaaacatgaggaattaatatgctacagtgaatatgttgctgatacaactcacacttctacttctgaagaaacgagaaacaaaaataacacaaactattccctttcagcacctcccaccacaaatattcaatcgtgttttattacccatacaatatgctagaagttgcttattaacaaataagttggacacagttgttcatttttcttaggaggtattgagccctaaacactatcgagagagaggtattagagtaggtctctgattatgacagtaagaatagtactggattactgcttctaggctcgaacactgaaagttttaagctgtcttctttggtgtaagagacaactcttaacggaggaaccctgtgtttctccatggtgtattccacaggtgttaagtattctgcactgggttagtgacagccgtggagtggaggtggaggctgttctctagccaaataaacttcagaaatactgaaagaaatggtctctcagaatctttcatcataagaaaaaaacaggaatccataattagcattagataaaagagtagaatctaacagaaaatagcctttccaagtgttatttcagaaacagcatagcaagcaaatagagtattcagagaacaaaaagaatgataacgtttttctcaaaatctgtgaaatattgacaaggtaagtactttgaaattagatttatacttgaaatgtaagtgctaggggtagaatctaaatttctggcttagatttataaaggacaggatcggccttcttgctgccttgtctatattgaaagggaaactgatattaggttgagacaatgataaattgtgtctgttctctgagggtccatcctaagactgaagacaggaattatcaagttttctctaacagtcgtttggcttaattaaaacaacttgcaccattattattagaggtaatattttatacttttctagcactctctgtgggaagcatcgtttgcttggggaaaaaatgcatggcacttggagacaggtgacaccatattttgggctcaaggtctccctgtattgcaagcctggagaaaaggtgtaggtcacttcccaacctcattttcaattccactacctgaactgtaataatccactccctcagaggcagtttgagagattcaaagagatcctctttgttacaattgtctgaaagtagttaaactctatttatcatgaaatgtgggttatctcactttaattcttacagagactgtgaggtaccactggcaagtccattgatagaagagaacctgaagttatgaaaggttgacaagctcacctaaggatgccaagtgaaggtcatagtcaaatctctgtctctaaccttaatgatactgccgtataatgtattcctttatctctggccaccagtatattagataaactcaccatctcatttcagtcttgctgctctcccattcaccctctacttcagcgggaactttctaaatatgattagaacactcttctaaaaacacttaccgtggtttctaatgcctggatgttcctaattgagaacatgcaaatatattccccgtggtctgtgaacttcttgaaattgtaagtaaattttgtgtacactgcagatacctgttttgttgttgttgttgttgttgttgttttgtcaaaagacagtttaacacattagattttgagacttgtccacgttcttacccaaggcctggagcccctagctcaccgagaagccctaaacatctcagcatggcatggaagcagtaattaactgacccttcctatttttccacctgtccagaccgaaatactgaaccacttgtagtttttcccactcacaccaaactacgtctcaactttgaaactgtgctcctctcagggtccttcacttggcctgggttggaagctccaggatagcgggtcatgtctagcatatctttatcacttgaagtcatcatgtttaaaaagatttatattcatggattacaaaagtagaactacttgctgtacaataaagaaacaaatgtagaaagtgaaagtcccctaagattccacctgctagaaagaatctcctttaacatttccgtacctggtctttatatagacctgtaaataaactgtagttactttatcctattctgcagttggatttgttctttatgaaacatgtcttgttcatctttgcaggcttgttccatagatttacaatgtacgtatctgtcattgtctatttaggtgattcttttgctggttagtttaccttgttagtccttgttcctcctctcaaatatggctcctgtgaccaaccttcgtcatttaattttattcacttgtatgagtacttctgtacaattttcctggaagcaagtcacatgtatgcaatttaaagtttaacaatactggcaaccattcatccaatattcatgtttatgcaaatacctatcaatatactatgctatatatatatataattttttttaattttttctttttttgtgtggggggaaaatagaatctccctctgtcaccaaggttggaatgcagtggcacgatcttggctcaaactgtaccaccgggttcaagcgattttcatgccccagcctcctgagtagctgggattacaggcgtgcattatcacacctggctaatttttgtgtttttagtagatacggggtttcacagttttggctaggctggtctcgaacttctggcctcaagtgatctgccagccttgatttcccaagatgctgggattactgatgtaagccactgtgcccgacctgtgctttttataattaatcatttgtgcatgtttcttacccccactagactgcaaaactctcaaaaacaaaggttgtgtgtaatatatcttcatgtccctcctgggttcttacagaaggtacacaaaataaaccctgtaagaatgagtggataaaacaataaacaaaagaataactgaataattcagtagcttctctaatcctcatatgacaggtaatgtttacagttcagaggaggtcctaagtttaacctttaatgtttgctaataaataagtcagtcaaggatgagctcttgtcctgactttatcaaaactagccctccctgatttttggggggctctcagtttccctgtctcacaaagaggagattagcataatggttcttcagatcctggcaagcaactcaattttttttgtctgtaacctgagcatatgccatagtttactcatcactgtctcatctctaatccaaattgttcaacaatgcaataaagtctcaggctaaggttagtgaccagcataaaatatttttggccttttcagccttctgcgtgtctgtacttcaaatgtctgtatattttgggaaaccaaaaaaaatggaaattattttagagaaaaggccaaataggtaccaatcaaccttcttgactatgtttagaagacatttaacgctttagacatcacacaaatgattaatacccatcttggagttgtagtaaatgttgggaatgatagcatgtgttcagagatttgtactttacaggattttcacgtccaagagctcacttggtgtagtgaagataataggagaatgaatatgtagctttcagttttgttgaacttactcttgtaaacattctgaaaagagaaccttttggccaactattttaacaatgcataaatatcaaggcaagagcattcccaacccacatctctgcccattactcatggcagacatcatcatcagttctaaatttaaataatagcatttctgtttttatcacacttttattaagaatgttggggtgagatattagaaatggtcaaatttataggcaatggaaaatgtgataaattcccttttaatcacatagcacaaagctactttaaatctagtatatggcctttattccttttttacatactttttattcttcattgatgatctcaagtactctctcaattgatatttgattctcttgcattgctataattctggctcgcccgcctatttattttttaattttttttttactgcagtatgttttggggtacatgtgagttttggttacatggatgggttctatagtggtgaattctgagattttagtgcacccatcacccaagcagtgtacactgtacccataagggtggaatgaagggggaatagacaaaggccccagtggccctgcatgtcccatatgggtacaggggatgagggataaaagactatacattttatatggagtctttgatccctgcccccctgcccaacctggccgcgccaaagccccaaagtccatcattttgctctgtatgtcttcacatcctcgtagctttgctctcacccacccatttcaacaccaacccagtgtcaatgctactgacttatcatcactatttgaaatctggctgtttgcagtgctggaaaaatgaaattactcaacttccttaactggaacaaaagaactagaaccaaaatgttcgctttctggactcctgtactcgataagatttatctcatttcctatctcaaagtttatatgtggtcccgaagtacacaacttccacaagctctttatgctgcttgacttttttcacctgagtgtgagaaacttctacctgtatgttttctcccttttagctgaataaggcctagcctgctctgctccctctcttcaggaagtccgtcgcgggctatgcgagaggtcccaccttatacccttattttgctcttcctgcagctgtttttctttaattattaatgtgcctgtatctctcacttcactgtaaggttcataagaaagaaagactcaatttatttttctcataaatgtataacagcaaatagtgattacttagcaattgttgaacaaaatagattcttcctattgtaaacatggatttctaaagcctgatagatgactcatctagataaggcaaatgagtaaagagatgtgtccaaggttagccactgaataagtgataaaactaattctaaaacccaggtctcctgacagccacgtccagtgctttttcctctccagtgcaatcgctgcttgtttaggctgactgccttggttgatggtctaggtggcaattaaaggactgtgtgctttctgcctttcagggtggccattcagggcaactggggccttcgtcagttgccccttcattccgcccagaggatgagcttgagcacctgaccaaaaagatgctgtatgacatggaaaatccacctgctgacgaatactttggtgagtggggcctagagctgacttctgaagtaactatcttgctctgatttccttccttagtaattggaactattatcagctccactggtaaagtatttgagtccagatgcatgagagttgatatacatccccgcacaactaagtaattgtaggatttgcatttgcaagactgccatagatgtgatgtctacttagcttatactaaaatttcagtggtccttagagtttccttagatacaaattttattgttgagacttattttttaccagtctaggcaacatggggagaccctgtctccattaaaaatacaaaaattagctgagtgtggtggcatgtgcctgcagtcccagctactcagaaggctgaggctggagaatcacctgagcctgggaggtcgaggctgcagtgagctgtggctcagtgagctgtggttgtgccactgcactccagcctggacaacagagtgagaccctgtttttttgttttttgtttttgtttttgttttttgttttaaaaaagaagacattttttgacaacttattagcttcccattaggcagaaataggatttctgtgtatgttcccatttctcactggtctaaagattcaagtaaaaaatgtggaattggatattgtctgatatccaatttccagattgtactcttaatttttttttctatctcagttgaagaaatgatgttttctttgtagttttaattttcccctcttcaaacttgttaataactaggaatggttaatccttccaatccatgaatataatgcaaatttatgaattatatgccgattgtgaggttctgtggacgcataacctgtcctcagtgaggttaaaattgttcagaaagaggtaagacaagcatacaaataattactagtctaggtagaaagtgataaaagacatgagaaggcttaggtcaattgttgcaaattttatttttattttattttattttatttatttttgagacagagccttgctctgtcacccaggctagagtatactggcgtgatcttggctcactgcaacctccacctccggattttgagcaattctcctgcctcagcctcccgagtagctgggattacaggtgcccaccgccacacctggctagtttttgtatttttagtagagacgaggtttcgccatgttggccaggctggtcttgaactcctgacctcaggtgatccacccgcctcagcctcccaaagtgctgggattacaggtgtgagccactgcgcccggccagaagttttaaaagctccatttattaggagcatccggaatactttggtaaagaattggtggcacttgaatctgagccctttaaaccagtgcctttcacattttctgtggtagaagaccattttcctcccaatctgttggagaccagtatttttgttgagtcagttaaaattaattactagggaaataaaagacacaaaataaaatggaagatgaaattttatcattattagagttaactgttaacgaattactcttttaaatttttatactagtttctaaatattaatcctttgttcctgtatttatctcatccagggtgataagcatttcttagacacccatccatggaccactttttgagtggcactgctttaaggacaaatagagaaacgacatttggggaacagtattagtaaaggcacaaagatggggaaattgcacaggatttttgcttcttcaaatattttctattttcatgtcttttttgctcctatatgggaatatgtaatgacaggtcaactgaccacaccagtccaaaaacacacagtagatgaagtaggaggtattaggatatgaaaaccctggcttttatttgtgttggggtggcagtttagcttagctaaaagagcaaaaagagtgggaatgaaacatctggttgtggtctcttctctgtccctcgctggccaagcaatactggcatgtcacccatctgcctgagccccatttcccacctcactatatcaacggttggggcaaatgttctctagcatttctttcaacagtaataagttcaatgtacaaacatccttaatctaaagtataacaataaagctaaacataaattgatggagattaacaacaatgcatggagaacagtaaaacaaaacatagaaaatccacgaaggtttctagttacatcaaaatacacaaaaagtttattaatgctcttgtcattgccatgtgaggagggtttataatggggtctaaaatacattttttaaaagtgaaaaataaggtctctgtatttaggtcctattaaaaaggaaaagctgacttaccaagtatatatgcttcaaatatcatagcaacaaaatatattgccacaaaaaaaaaactgaacatagatgctaattgcatgaatgaatatatattgaacactctgggaaacagatataaattattacctttcccttcaagaactgtccaagctctactacttagtagcttagaaaacttgaacaagtattattccctctaaaccttcatttttgttttgttttatctgtaatatgggaataataactagcttatactgttgttttaagaaatggatgaaatatttatacaaagcacttagccaagttcttggcatgtagaatatgctcaatacaatactcaaggttctcccatgctcttggggcttatagtttatttaagacataagatatgctcgttaaaaatccattaataatgctcaatttaagtttaagttcctagcaacaatagaacgtatgtcactggtaagtaatcattgccaaatggggatgaataaccatttgagaatttggaaaaatggctaacttttattgagtgcttatgatatggcagcactatattttatttacattataggaattaactcatttcactcttataggaaaacataaccctgtgaaatagatactattatcattttcagattttgaaattaaggcacagaaatattaatttgcctaatgtcaacagctaatacattgcagaactgaattagaatgcagatctgtacatttacacaccacactgtaaaagatggggaaagctagccaggctacatatttagaagagtgtttatggtggagattagctttggacagatgggaaataagagatgagcattctcttctaggtacacagaattaacaaaatataagttgaggccaggattatttaaagaaaatttacgttatgtagaaaacaaaaaaaaaagtgcctatggtaatattcaggctgctctgctaggtggtggtgggggtagatgtgggtcttacctttgaagttcttatagtctaataggatatgtgtacagagttatggtgttataagcacaaggcagaaagtgacaagtgacttaatcaatgttcaccaagtgttctttgagaattcagaaaaaggaaagagaaaatcaagagagagaaatggaaaagtatttatggaatacttagcctttgagtaagtctttaaaattgtgctaattgagatttggaagtaggaagatagtagagaagtgaagtcatttctcatgaggggagtttttgacataacagggaataaaaccactggagtgaagtgtccacgtgagaagtagcaaatattgggaaataaggttcaagtagtaggttaggaccaatctagggaaggctgtcaatgtccggctaaaggctaagaacgttattgtctataatgagcccttgcacattgagatcacatgccatgagaactgctctgtggatagtggttaaaaacatgcactccagagccaggatgcacttcttaccagcaagatgaaatcaagaggcaaaggactagtgaaaagaactgtcctttattgttccgtgctttaaacatttctcaagcaccttctctgtgcctgctactgtgctgggtgttcaggacacccaaatgcagaggctctgccctcatggggctcacgggttcctaggaaggacaagagagtcacagatgtcaaggattttagtgcagatattagcactgtgttgggtgtgactgagctgctatgtgagagtccataagtctgcctgaggatgagcggaaagaatacatagcagtgtgtttgcatcagcagggcctgacccaagagcgataaagtcttctcttcctttctgtcagagttttacctttggcctattctggactgcaaatagcattgccaagcacttcccttaaataacttctcttttttgcaggactatcctctcagccctgccaaaaccccatcacctactctttctttactactttgcctatttaatgctggaatttttatttaaactgtagctgatttactgaaggtaattaagtgctttcatgctgtagatctcctgctagactacaggctgtacttgggagtgagagtgaacaaaatgtaaataaatgatgtcaacagagtaggttcctttgtggtcatgttgctttgcttccaagacactcttttttttttcataagtagaatgattcatgaatatgttattatagttcttgtttctttgcggagcccctcatcactcttaacagttttatttatattgaattataattatcgtatgcttaaaagtactgggagaggtaccagaagatcacctcacagatgacttaagtacaaaggagaaaaggaacttttataatggagaggtctcctggaagccgtcttaaaccaagtaatgaaatttaacatcctcaataatgggacagactggcatgtgccaactgaatgtaggaagtctgcagcatcgtctaggcagtggtcttgctaaaatatttcagctctatccaaccatgaggaagtaaaaaatgcagatgatgggacatgcttcaagacacctgtcctgaattctgcaacactgtcaatgttataaaacactattctagattaaaggaaattgaagagacatgccattcaaatgcaaggcatgtgtcttgattgaattctggatgaaaaaaaaaaaagctgtaaaggattggtaacaaacttagagaaatttgaatatcaatgatatattagataatacatcaatgttaatttcatgatgatattaatggtgttgtgattatgtaggaaaatcttatttttatgagctatttgttgcagtataaggtgaggtatgattgtgtctacagttttattttgaaatattgatagagtgacagaaatagagagagagagacagaaagagagagagggatgattgacagatatacgtagacaaacagagatagagataaatgtggggaggcagaatcacctcaggttaaaacagctagagatgctataactgcaacaactataaggactcccctcctctctaaaagtgtactgaagcctgtcacaaatgaattaccttaagaatcccttcttgggtgggtagagagattgacatttctgcaccttctcaactttcctgttttaatgactacagtgggtctttgaaatttcccgttatcgttttctttttttcttattttttaccagacatacacatcttctattgctggtgagatgaggacaattgtggtagtgatgacaaaagctgatatttacctagagctccatatgtttaaaaaaccaagtcgcagccacaacatgactggcagacctggcgatgatgtcttcatttcattttttggatggggaaatagagattcagagaggctcagtgagttgttcaagctcacatagctaataattttggaatttggcctcactcttctgatctcatgtctatcataatacattaccattacagaaaggtatataaatgctgttcctgctgaatgttagtaactggctgtttctctcccatgtcataacttttccttatgaagttatgatcttcaagtgagagatggagggactgcttctgcccaagattacatgtttgtaatctggacttcgatgtcactgatatgtttcaactatcttaaacatcctgaattaactgctgtgacatggctgaggtacatacattaggaagaccgtctaccgaatacctacctatcagccattttgcagtctgtagttcttctcttgaccatgggagaaggcaaatcactaatagccaccgttcttattttttcaagtcaggtttttttataaaatataacaaacagggacccttaactgtctcagctgggtttttttttaatgatttcttctggaaaggtgatagttttagtgtttccatgccttcttttgtccatgttcattataacttgtgactgtcgcattacagtattaggtaaatgccacagatgttgaaccatgataaagcagttggatgagtctatatctctaaagggaagatacagtctctatactgtgggcatttgccatctacttggacttaagttttggctataacagatttccttaccatggacctgtgtctttccattaatactggtgtcattgagagggcctctaaacactaccctgtagaggaaagggaggaaacatagtagaaagttgggggtaggagaaaattcttacccagttcaataaaccagacagtgagtgtttagcccagctcatctacaggaagccttggttcaagtgcttgcattttagagcaaattttttcctagacaactagaaaaatatgttgatactaaaggaggctctcagttctagtgatagatacttaaaaagaacaaggggtggctcatgcctgtaatcccagcactttgggaggctgaggtgggcagatcacgaggtcaagagatcaagaccatcctggccaacatggtgaaaccccatctctactaaaaatacaaaaatcagctgggcatggtggcacgcacctgtagtcccagttactcaggaggctgaggcaggagaatcacttgaacccaggaggcggaggttacagtgagccaagatcgtgccactgcactccagcctggtgacagagggagactccgtctcaaaaaaaaaaaaaaaaaaaaaaaaaaaaaaggaacatggggcgatgaagtagctgtaaattattataatttagagtcaattcagagcttataatagaaaatggaaaacttttaaattgagtattaaaatgaataggagagaaaggtattattctcagaaaattgggacatctacagggctagttgccagttttaaagtttgttttttcaaacagttttaggcagctaaaggaaagcaaagttgagtttttctccagataaccttgagatatctctttgaaattgtccaagacttttctgtgttggttgatacagccacagccttaagtaatacacccagagcctctaagttttatgctttcattcattttgtaagagaaagcgtgtttgtatatgaagcttttcatacatgcatgtctgtgactatggcataattttttccaaataataatattctggctgaggagccctcaaggctgaaggcaacactgttggaagacagtatctctggaaatggatgttgtaatacatctaaggatggactggaaatatctgacagtagatttttaagcatagagctgtaattatcttgacattgtttatatgatattgtcttattccttctttaaaaaaaagcagaagtatgtgagccttaaaattattgagtgagctatttgaagaatccttcagagcagtgccaggtaaattatcttctcagaacttagcatttatctaaggaaactttttgttcatctctgagtattgttagtaggagtttttgagaatttttgcagaaaaccaggagtttgttccagtggaactaggccttcatttttcaaaggacagctagacaaaagtgaaggcatgaggcagcagggacctagcacatgctaagccttgagagaagaaaggcgttaacatgaacaaagtgctatgatcggtcactttattggttatgccagctcattgtatttggtgccttggtatcaactcaattaagatgaaaatggagggccagtgaatgttcatgaatagaaacagaacaaaaaaaacaatgaggaggatggtccattttctttctgcactagtgggaccagttgataagtgagcttgtccagaggacttgactaagatgcttaggaaattagaaaccatgatttgaggtgcagttgaaggtatggagagaggaaaacctagagccctcattgctgttgaaagactatcatgtggaaaaggaatttgacttaatatttgtgattcaaaaattagcaacaaaggcaagtgaggggagtctggccagttcccattcagcgtaatgaaatcactttcttaagagacagaagaaagtctttgtaaaattctaggtcagaatctaataatcccttgttggtgaaaatggtgataggtactcaagcaactgatggatgattagattatacttcataagtgctgtccaattctaacattttgtgacttaggcacaaacaagacgctaaacttgtttggaagttagcgtcttgcatccaacttctaggtctacccctagattatcattattattattacatgatttcaactaacatttatataatgctttttaaagcacttttctacatgttatatcacttgagcaagacagcagtcctacaaaatagacagtgtgtttatttccatttgggatatgaagaaatgaaagatttcagtgattaagggactccccactccccagggctctccactaccctcacaagtcataaagcaggtaagtagcagaattgccctggggcacaggcctacagactttaaattcttttcacttttcaccccattgtgctgttaacaccatgttgctgaattggtcatgggccataagatagatgagttaacatacttcatgttttagctttttaatctgtataaggaacgatgtgattactttgtaaagtgcttagaggatctcaactgagaggtgtaaagtaatttgtatttcatagtttgtgttattatgtgacaagaaaatggtttccaaagtgcttctatcaattacaaactgggaaatgactccaggtaggcagctacctttagtggatcttgttttcacagataaatgacctaattaatgaaaaaccccaaaaccacaatggaagaaaaattagacaataagtggcttagagagaaggttgtattgatttggggggaaaaatgggttttttggttttgtttctctctaactttttgtttagggtatctttgagttgtgggaatagaatgttctctagttaatgaggcatattagatatattttcttttgtggtagtgacttctggtaatgtttgttcagagtagtatatgtttacagcactaaataaataataattctgagcattttatgtgttctatcttagcatacattaattttttattaatttggctagtgtgtttgtttgtttgtctgttttgtgtcagagtttcactcttattgaccaggctggagtgcaatggtgcgatctcggtgcaccacaaactccacctccaaggttcaagcgattctcctgcctcagcctcccaggtagctgggattacaggcatatgccagcatgccaggctaattatttttgtatttttagtagagacgaggtttctccatgttggtcaggctgatctcgaactcccgacctcaggtgatcctcctgcctcggcctcccaaaagtgctgggattacaggcgtgagccactgcacccggcctggctaatgtgtttttaagcattgatttggaatcccagacttagagtaaagaagaatgtgatcttagaaattatctaggaaaatccttcattttctagaaaactgtatcccaaatgacttatccaaagccatgcaactaggtgtgttttgaattctatggtcaaaattttctttctgagtaatggacagtctccgatggcatgaagaggaatggcagggctgtttacaaaggtgcagacataggtcgggcctgctacttttgtgatctcagaccgtagatccaccttattcaaacataagaacacattgtccttaaaaagaataaaataaataacttttaaggaattttgtgtatgtatttttcaaatacaaaagaaccaaagttttcttattcaaaagaaacaaaagagattcccagtatcttttatctcagtgtctttatccaatttacttgtaatatttcctatctgttttcttcactaaatgtaagtctgcgtgagggcaacaatttatgtttagttcagtattgtgttcctatcattcctggaataatgcctggcacatcggagatatttaataggtgttaatgaattaatgaactaataaatgaaaactgtgagcagactttcacacttctgtgacaggacatggtatatagtaaactatagggaggaaatacttcattcatttaagatatatttatttagcaccttataaaatcataaaacgttagagctggagggaatcttaagagactaggaaaacctcttcatttttagagatcatgaaaatgagtgagatttttagggtcccaaatttgttagtgacagagccacagagtataactcagattttctcattcctttttttaattcacttaagggcacaggaaaacatataaactagagtaagacatggctgctacatttattgaacttaaatttaaattgttttaacacctttggacttgatctcttttgcatgtatcttctgtgaaatttaaaggttcaactggtcaatgaagagagtacttggttaagattttattttttaagtactgggtcacatttcctccacctgtaggtttcatctatagtctttggttcccaggaccatttcgtaccaccacaattttcttctgttctaatctaattggattggatggatagggcatcacattgaaagaaacattcttttcttacgtttacttgagttgtccatagcaacctgtcctgaaagattgtccgtttaaagtaagcctcttcaagactgtgaaccaccacccaagattggtgtttcataccgtcttgatacaaacagcagacatccagtcattcagctgcgttaggatcactatctctttatcagaagaaagaagagaaaagtagaagagagatttctacttcataattgaatgttctttgcttattaactgtggaagcaaacttgaaattctgggagagaaagcactgatggggcacacattgtctgtggtgcaaagaaagtctcagtttggtactggtacctgaacctgcaagtgctaattatgcatcttctggtattaacacacaaacacaattaactgtgaactcagctccttttccctttcaaaccaccatcattcccccaacctgcactttccccaccactttctctaaaacacacagataagcatctccttacagactttgaagtgacattaggattgtcagaaggcataattaattgactgtcagcaaagctattgtttgaacatctctggagttgtacttggtaggcatcttgtttttttgttgttttgttttgtctgagacgtagtcttgctccgtcgcccaggttggaatgcagtggcgtgatcttggctcactgcaacctccacctcccaggttcaagctgtgctcctgcctcagcctcccaagtagatgggactacaggcacgtgccaccacgcccagctaatttttgtatttttagtagctatggggttttaccatattgatcaggctgatcttgaactcctaaccttgtgatctgccagccttggcctcccaaagtgttgagattacaggcgtgagccactgcacctggccctgttgtatttttaattgaccgattctttcctctacaaatatttattgagtgcctactactcaccaattattgtagtgtatactatgggagataatggaaatgatataatggccaaggagagaaagcatttgtcaaatcctctagggccaagggctttgatagagaacagatttcacaactggcagtggaaaatgtattcttttccatcccggttcagaggattttgccactgtacttgtgccatataaaatgctgaaatagttcatgagaagaggtacaggcatacatcttcctggtgtgtgaagatgagtggcaatgcactgtctctggttagagttcccaccaaaaattgtaaaatacttaaaaagaaaaagcaaaaaatatccgaggcaattaaaaaaaaaaaaaaaaagggaaatcacagaagcaggtccaagttaatgaccttatcccaattctgttcctaagtctgactctgatgttagtcatgttgtatttaattcttccagatttcctatagtactgtacagctctgatctcagtcctcacttggttctaaggtttgaccatcaaactttgagcttgcatgagccttgaacttggctctactcctatctggcagtgagcatcatttgttaaaattcaacaagagcaaacagaaacagtgtacactagtgacttgctgaaagagcctaagaagatacagtaggcaggagtaatggaaatgagtttttaacctccactgactcaccctttctttcctagtcacccttagggtcatggcaaagttacagaggcatttagaaatcatcttgcttgaaagcttccctttcttcagtcattagtgagcatcttcataattttttttaccatatatgtaaactatccatagtattatttgcctaatatttttatttaaatcaattaactttttatccgactttgtcttccttcatgtcaataacatctataatttgattctgtgggttgaagtactaagttgcttctttcctgtaaaagatattaaactgaatactatatttaaattttaaaaatacggctggaattacagatcacatctgtaatcccaacactttgggaggccgaggctggagaattgcttgagtccaaaagtttgagaccaacccaggcaacagagtgagacccccatctctacaaaaaatgaaaaaaatattactaggtatagtgatgcacatctgtggttccagctactcatgaggctgagataggaggatcacttaagcactggaggtcaacggtgcagtgagccgtgattgcaccaccgcactccagcctgagtgacagagtaacagtctgtctcaacaaaacaaaacaaaacaaaaaacaaagttcatttcatgcaccagctaatgtttgaaatattgagaaatgtggatatcattcaacaagaagaaaaattgataggataccatggtgaaagaaatggtgtcctcaagcttacccattaagtgtataaagcataattttttcttttttcttttgcatgcggagtcatcatgttcttgtgaaggatcgtgttgtgttgttagatattgttccaggcatccagcactgagaggcattgccggcctgatactgtcccactgactcactgtgacatcttaggccggtttctcttccataggtctcatctctcatatcacgagattagaacacatgaactattgtgatccttttgaccttaattcctttgcctcaaacacttttcatatattgtcctctctacactgttaaaatgtaggtgagtaagaaaagcagctgccccatataaaatttcagtgctgcttgcctcagagttctggagaattgtaaacaaacccaagaattatatttcctagatcactttatgctctgcttgttactgttacccatttcctgaggtttatgagagggtcactgccttgaaagtagctttcaatgccaggtaataaaagtggaataggatgttgaatatgatgaagaataccatgcactaagtgttgggtacactagcagcgtcactgtgtttcagcattttcagtaatggtgttcagtcatggtaattggcataccggctcagtaatggtgtttactaatggtaactggcatatgtgagtgatattagtgtgggtaaccatcaacggagcaatagtctaatgtagatgatacagcagtaataaaaatgaataattcatcttttgtcagatagcttagtaaagtgagcactagatttggagtcaggaaatccaagtgtaagtcatcttttctgtgtgacgttagtgacatgtgacatttgtgctctccttagagtattttgttatacagtcttgagaactcttcttttagcagctttaaaatgagtgttattttgccagaagaactaacatatccatggacaagtcagaagttaaaaccaaattatttcagttttcttgtttagattagctcttctatagaacctcagagtcttcctgaatttcaggtatttcacttattaaaaagataattatccctatctattttatgtgcatattgtgggaatcaaattaaataagtcggtatgaaaaagttttctaaaccgtagcagaagaccaaaaatttaagaggtgttagtatctccacctagtgcagcatctggtttgatttgtgtcatttatgattagtgtgtaataatcattcctctaaattgttaacgtcagtgtttatctctatttgaattaacactttgtattttcttatgatgttctgttgtaattggaatatcgctggagaatacaaaaagtgttttttagtcattgtgtgtgagaaagcaacacaccaagatataccacaatgttctcgtttgctgagcaaactactcttgctttttaatgtggaatgtagaagaactaattgaaaagagacaaaatgaattttgactcaaattgaacaggatgaatcataacccactttctcatctgagatgtgaggaagaaaatgtaaaggaaaccaaccaccacacagctttactgtcagtgtcagcataatcaatatagagtgtttttcaacagaataaagaatacatttctgcaaggctgagagttgcaggtagtcggaaacctagttatttttgctttgtctatagtctgctaaaattgtctcgttctgccttggttaaagcattctaatcaagagagtttggggcccctcagtaattgcttctcaaaccattcagaaatgtacctgtgatctctattgaacagaggccaatcagagactggaccctctattgaacgtctggtcccagtgtcattttgtcagatggtcaagagcagggagacggcagacatacagaaacctggacaggactgaattgctgcttccctgaaaataacttacttgggtttattgatgtgaatgattaaacaaaaacactttgtcctattggattctagaatttcgatgcataatccacttagcttgtgaatgtagcttaaaaaaaaaaagattttacacaaataaagaggcactatagcatatcccaggaaaaaaactctaattcctaagtcaaaatttatttctaatttttgttactattgtatttgattcataactcttatgatctttattttcctcatgtgtgtttatatattttctattttactgtaaaattactaagatgggagagcacatctttcttatcttactcttcctctcttccccaaaaagaaaaatgagaagaggagatagagctggatgatttttttaaatatctttgtgccactccaccaagagttttgcttgcaatagaggttctctagtctgatttgatcctaaaccattctcactaatgattctgcttaaaataagactagtacatattgagcactgactatttagtatgagttctacatgcattacttatatctggactataactctaggcagtagatactgttttttacaatgagaaagctgaagccaagatgagttaaataattttcccggaatctagtaattagagttgcaatttgaacacagaacccagctcttaacccctgcatataccatgcctgtgactatagatttcagaaaatgagctagccaaagcctggaaaaagattagactcacaggatctgtgctcattccatgacttttctggtaaatcctattctgttttttcctctactttccttgggggatgtttttagtatgatttgattttctctgattgaaagctctcactactaataagggagcaattagaaatacaggtacaccatctctttgtttgctctgtaccagatgtctgctgagacagtgtctttgccctcctacatgggtagtagtgcccagttgggctgcttagtccagataacaaaaggcgatttctgaccgtaattttttttgttgttaataacacttgaaatatgcatctttattcctccattccttcttggacttgaaacttggttattatgattgtagcaatatttatgtccagaaactctcttctccccacaatttgcctcaatccagtactgctttctttcacacacgtaaatagttttaacttttaacgatccatgcctatggcatcttctagtctagtgatgtgtagaaaagccaggcccagtctcattgcccaggtggaaataagagagagcaaggaaaaggggactgattttgaaaataaagtcaccctgttgacatgtcatcagtcaaaagagttcagtgcaatagctagcaattggctcactcagtcggaagttgatgctattttaggccgtcagcggcagtgtcaatgtatctgtgaattttgccattttatttcattaagatggttcaggaagtcagacactgattaactgattcttcgacttagttcccactcctaattttggatgtgtggtgtctttaggaagctgctgtgtcaccttgattctaaagaaaagtttcgttgtgcctctagagcaatccggaacagtttacccttgtgtctggttatgctggaacctgctgtgttctacctctctggtcacaggtggtatggggatacttttgcttctggttctcctctggcagatcaagcaaatacaatccaagtgcgtgcagcccgttcccattcaaaatgtatccgtcataataacagcattctcgctgacgcattagactcaaggtggacttaatttggagatcacctatgaagacatctgtggaaggaatggcctcagcattgcagtcactttcgaagtcaagaggtattctagacagaccacacagcatgtataggtaagactaggaaaattctaagttttgtgttgttgctaggggcttgtaatcttattttatttgtaaacatgctctaaataagaaggataaggatctctagataggaaatatatgttgttctttgtttctccatttattcaataattattgaaggcctatgatatgccagacaattgttccaagcatttccattaaacattagtccacaaaatatagacagaagtgcttacaaatagctcaattccaatatgatacattgctggagtttggtgatatgggaggaaagaagttagaatggcttactatgaatggaaaagtggagaaagattttctgacatagatcatgttaagactgaatattaatggaatttttcaggtaagccatgaattcaagggcatttcagacaaacaattcaatagggacaaaggtatagagaccaacaccaaaaaaagtgcaatatgactgccaaagaatattggaaggagaaatgagactaaatgaatgattagtggccagatcaagagggcctcttatttcttactaaagaatctagagtctgtcctgaaagtgtggaaactccatgaagggtttcaacaagggaaccacaagatattgattaaagatcactctgggtactattgtggggagaggtgttcaatgggacaagatttgggggatgaagatcagtctgggtgtcatttgtacttgtctaaggggaataagggctggaaccaagatagtcatcttgtgacaatttagagaagggtttcaaaggggcgtaagagggatgggctgagacttattcctgggcctctatcttgggtgggtaatgacatcactaagtgatgtgagaaaaagagaaggagttcagtaatggtgatgccatcagtccacagagatcctctctttatcaatacttattgagcacttgctgtgtgtacacactgttctaagcattggtgctacagcagatgaaaagcttcttttatggggcttacattccagtgagaagaaaatgatgacacataaataaaatacatagcaggtcagatagcagtatatcctattgagaaaattatgcaggagaaagggatagtgagtgatacagtggtattggagtggaagtattatggtgaatagtgtgaccgctataattgtgaggtctctattatgggtgaaatctggtctgcctaattttgtttcttttccattttttgtttgtttgatgaattattatttctcgtaaacaaggcaaataaacagcaatagcaacataaacatttacaagcacatagatgtaggcataatagtttgtgttgccaacataacacatgccaggaaaaacaaaagaaaacagcagctaaaaaaagtaaatatcaaaaaagggagctttctcagacacaaattcttatcattcaaaatgctgtgtagtttgaattagaaagtcacagaatgggaccttagatttaatccaaatctcttagtttaggcagaaaaaccttcagccgagcaaggaagtcagttattcaaggacacacaggtaggtctacaatttaggtgctctaacttcatgtctaaggatcttacccttatcaccatcccagaaaagcccaaagtagcttgggtctgaatttccactttgccacagtaaccttgagcaagttttgcttctctttgcaacagtttgctcatttgcaaggtagggatgattataaaagtgtctgtgatagggggttttggaggattaaataagttaataatacatgcaaattacttacagatgtgggctgacacacagttaatgttcagcagtactgagagtattgaaacgttatgatacaggctacttaggttttgtgtatttgaacataaacttcagaccaatttctggtgatgaccacgggtaagatattctgtgttttagttaagatgatttccagttaagatgttgaaatattaaatacttttcttgggtcactgaataattataaaatatattaaaataactttgatatttatttcattcatagaagttctagacaatccagtctagagaagagttatgtaaaattctacaccagaaatagaaccctaaccttgaaagacagggacacttattcatatatgtatgtctaacacaaatgggcctcataattgttgacagccacttattgagcattgaccatgtgccaagcagcatgctgaacacttcacatagctggtcttacttaatgctcacaacaggtaagcattcatatccggatttttcagatgagaaaattgagtcttaggcagttcagtaccttgtccaaggttatacggatatcaagagcctagatcttcataagccaagtctctgttctttttgctcagcaaatacctatttttaatgaggatgcttttctcaactagctactatattctgcaaccagtctgcattttacactgctatcctttctgtgtcattcctaatactcattcatagaattataagatcatagattgttaaggctggaggaaacctgaggagtttcttggttctcagcataaagactcagaatcacctgggggagctttatcacattcaaaactacacacccacacacatctaccttgtatttacaatgaaactctgatctactgacataaccctagatccactgagaaaatattattactcggagaaaatttagctgatggagtgtgccataccccacgtgtgatgagataacaaaaaaagttgacaattactgatctagtccaatcttacatcacaaacatgaaaacagaatgaagagtgacaatcactttctaaagatttttaaaatgtcacttataactatctgcaaaagaacctgcgtcttttgacttataatgttaagtgattttcttgtttattccttaaaactgcctttgtagaatgcactatgttatttgatggttctggagtaatacaaaagaagagagtgattaatttgcctgggatcctacaacaaaccagttgaccaagagataataagcttattatattatgcagatctatacctattcacttcgtttagttaagaaacagctcatcaatatggaatacacattttcatagtagatttgtgggttgcatagcttttttgtgtctgttttcaatttctgttcctttgataactgaacaaataacagagatggtgaaacccagcaagcaaattatcttccagattttatgtgatctcccttctctagtgagttggtatgtctactaatgacacagtagattataaggttatttggtttaagtaaatatttatgcagagcctatgatatgtccatctctgtcttaggtggggtgaattagaattactataagtgctttctgaaaaaaaaaaaaatgtaccatgaacaaatttagaggtctctgcccccaagaagtccatagaccattataggttagagaataaaaaatatatgataatcccttttcccatgtgataaatgttataaaggagctctgtacctatgattatgagagggaatgtttgagagctctaggaaaaacctccctagggagattaagaggtgatatctgatgtcttcatgaaggaataaaatgtttccaagtagagaaagagaagaaagatgttagatacagaagaaacagcatgtacaaaggtatagaggtaggaaaacatggtattctgggaacaggaagatgttacttcctaacagaacttctctgtggctgaagccacattgagttgagggacaagtagtgggacaaggaaggatagagagtctggagttcagtgataaaagatcttgtgtgatagtcataggaaggatgttttggatgtttacctgtgcaaaatgggaaattgttgactattgtcaaacaatgggtaacatcagattagtgatttatgtaaaactgaagggataaccatttctactgctgtataccacttggataaccttataaagccacttaatagggaataatggggctggaaatttaatgggaatagatttaaagtgcttgtgggataagaaacatgatattgctctcttttgttctctttcagttcaaaacaggaagtgcctaggtatgcagaaatgcaaatcaagccagctatatttttggtgtgttttgtgtgtgtttagattttcacacatcagcaatactgtaagaacactatgtggccaggcacagtggctcacgcttataatcccagccctttgggaggccaaggtgggaggattgcttgagccctgggagttcaagaccagcctgggcaacatagtaagaccctgtctgtacaaaaagtgaaaaaaaaaaaaaatggatgggcatgatggcatatgctgtggttccagctaatctggacgtggaggtgggaggaggatcacttaagttcaggaatttttggtggctgcagtgagctgtgaccatgccactgcactccagcttgggcaacagagccagaccctgtctccaaaaaaagaatactattatgtgaataatccaccagattcaactaaaaaatggccatgatgttttaaaagtacatatatacacacatatagatttaaagattactttcaactttctaagaaattagtagatctttagaaaatcattgtgcgtatgtgcatatgtgcattgtttgtgctggtcccaccttcaaggagaaaatatttcaagatcctgatgcttacttaagaggttgtatgtgtttaccatggaaaggaccttggaaatcatctcctaattctgacttcattatttatttattttgatgaagcaaatggtgcccagattgaaacaggagtgtaagccacagccaccaagtgccagtgcccaggctaacacttttctccattaactctggaaaccttatttcctttttgtaccacgtatttacagtgtttggtagttatgaattgagtgaattatcccaaggttggagatatcttggtactcacttgtaagtggagaaacactaataggaaaatattctgggaatctggtaaggaagtatgagtgaatttatcatatttaacctttgttcaaatacattaagccctttcttccctttgtcattctcaaactggatcgacatgataggaggagaaattttatcaactaaaaggggttgtgtcaataagtgtttatgatacctctaaacttaggccttaaaacaacacaatctgtgatctgacagttctgtaggttagatgttcaacatgagtctcatctggctaaaaccatcatgttagcaaagctgcatttgtctctgaaggttctttctaggggagaatcccccttgctttttctgacttctaaaaactgaccacattccttgacttgtggccctctttttccatcctcaaagcctgtaacatagcacctctgaccatttttttcatagtcattctgtgtctggccccagctgggaaaagttctccaattggtaaggacctacttgattagatatgacccacctgaataacctcacatactcttcctatctcaaaactcttaacttaatcctatctgcaaagtccgttttgtcatatacagtagcatgttcataggtttcaagcatttggacatggtcctctttgggaggcattacgctgcctgtgacagtgctcttctgatacattttcagtgatcttctagacataacaatcctggtcctgggaacatgcatggcggggacctaaataagtctattttttaagaggccctaccctttgcatagattctaatcttggggtaaaggaaagtttgagatttcactccacctttttttttggtgctggtatttccactgtgggaaagatcattcggatttaacaaccacatgaagctcctggattatctggggcatgtttgctgattcccaaggaagcttgatctttttgatggagcacttgagctggtaagttattagaagctgagctataattttccttggcattggtcatttttgtctaatcttttatttttttgttttttttgttttgttttgttttgttttgagatggagtctcactgtgtcccccaggctggagtgcagtggtgcgatctcggctcactgcaacctccgcctcctgggttcaagcaattctcctccctaagccttcagagtagctgggactacaggcgtgcaccaccatgcccgggtaactttttgtattttcagtagagacagggtttcaccatgctggccaggctgatctcgaactcctgaccttgtgatccacccacctcagcctccaaaagtgctaggattacaggcatgagccaccgcgcctggcctgtctaatcttttatttaatgcatctaggctcctcctttcttccttcatggtttcctttttcctacttccctatctcgttttctttccttcttttcatttacagagaaatggtgttagaaatgaatgagaggagtgagcaaagaaagatgagggaaaaatagatgtgttaaggagtatacgcataaagaaaagaggccaggaggaaaagctgttcaccccgactcccatcctaatcttgcgtagtctttcgtttcctgagaatagttaggtcagaagttacagtagaaactttcatggaatacacaaaagggaattaagtaaggaaacttgtgaccgatgctatgggaaaggacatgtttgtcaaagcaataggttcttcctgagttagagaacaattatggttcccccatggaaatgtttatctgacgcaatgagaaccaggtcagacacaattcagaaatgaaatgaataaaattattctaagatctagatgggaggagacataagggattgtgttttgatagtcttaagggtgcacttacatttacatccccaaattccctcttccatgaaccactgtgcactgtacattgccacattaatgctaactgtgccaattagattaactaatattggtcaaaaaagaatatcctggccgggcgcagtggctcacgcctgtaatcccagcgctttgggaggccgaggcgggtcacggtgaaaccccgtctctactaaaaatacaacaattagctgggcgtggtggtgggcacctgtaatcccagctacttgggaggctgagacaggagaatcgcttgaacccgtgaggcggaggttgcagtgagccaagatcacaccactgtgttccagccctagcgacagagtgagactcttatcaaaaaaaaaaaaaaaaaaaagaatatcctaatgaagagaaaaatgacagaaatttctaagataactgtttcatatttcttcattaaattaaaatgaaaatacatcttcttagagtattggggtataaattaaactgaataataccagtgaaaatgctctttcaactataaagtattagagttgagaaagttctttttgtttgactattcattctgtcatctcaccttagtggtaatttcttctgcttggacaatagagcaaagttgggccagtaccactttggcaatgggcatcaaagtcgaagaatcccatgtgcaggtcgaactcagtgaaaaagggctggaactggctgctcctgcccgcttcctgccatagtcaggcccacatttgaactttattatttcgggggtaattaccttgtgtagtcgtaaattttaatccaagtctcatatgtgactgtggatgggtacagtctaaagggaacatttctttatttctctgctgcagagtgactacgtctacagtcaaaagttctcaacctatcttaggaatcttactttacttcaccaaaaacgtgtgtgtgtgtgtgtgtgtgtgtgtgtacatttatataccatacatgtacacgctagtatgctttagttaaaatacaaagcctctgtagaaaacagaagaattctgcaatacccctgaaaaataatttattttctacatgctatctcataaatctgtactaaaatcaattttgaaaaattaagccccccttctctaacatggtactctctctctttatttgaattgtttcatgcacttcaacaattatttctagtttcatttcttttcatgaggactttattccaagataattcaatttttgttgctactgtgcaatctttttgcttgttgttgttgatgtgtggttattgctagtttaaaggaaactcttgactttgcttgctcatatccaaacactttaccaaattcagttgttaacaaacttatattaacaacgttttcaggttcttcagtgattattaggctactgaagtgtttttgtggttgttttgttttgttttacttctattggaattcatgtggctgtttatattttgctagaaaattatgcattttgtcaagattgtctactgttgttactatgatataggcgtatttctcacttatactttttaaaatatctgtcttgtccatattcatagcttccttttgctttgactgtttttcctttttcctccttagtggaactttcctaagaagtgtgtatatgtgtgtgtgtggagtttgttttctaactcattacttttaacgtttgccttattattttatatatccttctttaagtttatttagttattcattgttgtagtatcttactctgaatgttcatttatatttctctgtctcttctgtttactaataaaaagcatttaaattgatgaaatgcctctccttgactttatctgcatcccatttggatatcttttaaaatttatcataaaggtgttataattcagtcattcttccacataagaattattcagaaacttatttctaaattatttttatcaaaaaatgttattctattttttaatttgaaagaatttaagtcttgaaatttattagtgacatgtaaattcctgactgagcattatgaaacttgtttagttcattgctgaatttggtattttgtcagctgggaacactaaatacccccacttaacttgctatttgtgaagctcagagtagcattggggttcctgtacactttggcaattgccccatggctaatttggccaacttccaattcctcagggagcaacaaagagttgtctcattgccacctgctattaactaaatgcttaggattcagtgtcctaggggtgactgggagacatgggaatggattattgtaacagcctgtggaacctccttccctggggaattttgagaacagcaaagaaccatctgtctgggctggttttaggagcagccctgcctgaaggcaggtgcacggattagatgacctgtgaagattgtcatccatcccaatgacttcaatggaaaggatgcatttgctgaatttgaaaagagtccaggaggaacactgataggtttggggagcatatggtcaagagcctgagggtattgagcccttcttgaaattggagacactcggtgtcaccccatgccctgaattccagaatgccataatctacacgtgaacccagcagtcattcacccttgaaaattatgtgcagatgtggttcacattggagtattcacgtcgttgttgatcataagcagaattcctttttaacacatagctcaactgatctatacccagaacatactgttgaccctgattcttctggttaagccggatctgcctgtataatacatcatttactgacccactgacattgagttttcttagcttgtttctcagtggttgttctgtgtttgtttcaggcaattaaatatgttgatgcatgtttcagaagagctctcctaattatatcaacaatagctttattatagttagaaaagacaaaatgctaaatgaattagccgggttaagtcacatttattgtgatttaattcttactgtatgtagtgtaatataaataaaataaaaattttattttattattattattattttttgagacgaagtcttgctctcatcccccaggctggagtgcaatggtgcgatctcagctcactgcaacctctgcctcctgggttcaagcaattctcctgcctcagcctcccgagtagctgggattacaggagcctgccaccgtgcccggctaatttttttgtatttttattagagatggggtttcaccatgttggctaggctggtcttgaactcctgacctcaggtgatccacccacctcagcctcccaaagtgctgggattacaggcatgagccactgtgcctggcctgtaataacatattttaaagttacagagaaagggcaatgtccccaaaatattttcatgatgatatgtcagacatatggagtttcaaactaacactgtggtaattgttgtgtgtctaaacaagtgacaacggggctgggcagcaaaactagacatgggagaagccaactgatccattgagctgtcccagcaagagttagtgggattatgatttatgaaagacctgtgtggacaaggtagtttggaggaactgaatggagggagtgaattaattagaagaatgagacaggactagccacaaacttctcctagaagtttaaactattttaaaaataagagttgtggctcatcaaaaaagtagtgttttcaaaaaacacagccccttcacttaaatgatacgcacagtccagatagactgcaaaacttaatgtttagaagctaacaactttttaaaaactttattgatctgatctgtactgagaacagattttctctgtgctttataataaaacataaagatcaatcacaaaataatttatcaataaattttaaaacaaaaattttaaagtgtatgtaaatatcatataaaattaagaaaaaatatgtaagaataatatttgcaatgactatgataagcaaagggttaacaactgtatgaaaattttcatgcaaatacaaatatcccaacagagaaagacaaggaatgtaaataattcttaagtagataaatacaaatggatatttaacttaaaaaaaattttattcacattagtatgaaaagaaaatttaaataattgaaatctagtttttcacttatgaaattagcaaagatttaggaaaagaaactactgtcatttgctgctggtaagaccgtaaattggcccaaaacttttagaaagttattttacaatatttctcaagaactttaaatgtctcatatctgtcaatccagacagatagatggatggatggatggatggataaatatcagatggatggatggatggatggatggatttatcagtaatagatacatagatggatagatagatagatacatagacatctatagagatatatgtttctatataaatatatatctatattatcctaaagaaatatatatttgaacaaaatctatttatgaaaatgttcactaatgcaaaacttataatggcaaatagaaagggaatctgctgaacaaaatattatcaatcccaaataatgagatattgccaaaacactatatttaaagaacttaagtgatttgggaaaatattatcttgtgagggcaaatacattaaatttgtatattcagtattgccaaatttatataaaaaaatgggtagaatttctttttaaaaaacaccttaaaatataaacggagtacttcccaataatcagattacatgtgattttattttcccccctaattttccttaattttcaagttccgtacaatgaacatgtgttattttcataagtataaaagacttttttataaaaagaaatatatagaactaattagccaaataggaaagtttctaagaacaagggaagaaatttgtgaatggagtggtgaagagatccttggactgagagctgggcaatgtggatactaacactggctctgtcacaaagaaacaaggagacttattgaggttctctcttctggctcaaagattttatgagccagtaatttatcaaagagcccatcctagtgtacccatgggcctgtcaaccctggtagacaggttagtagcccagatgaaatttcccgtggatgaattttagaactccgctccattgatcacccttttttgttgttgttgttcttttactcttctggaagagagctaagaaacttctgataccatccccctttcccactcgccctcagttgtgagatggaggcagcaaatattcagtgtgttctttttggtcttaagtagttctagactcagataccacctcagcaccaggctgagtttgggctggctttggctacggtttgctgctgaatgtatcagtgatggacttttgaatgtttaatagccttagggaatgtggcagtgtcccctacatagagaactgtagattctttagtccaccatttccaaccctgtgatttagattgtcattataagcatcacaggatgccctgagttgagaaaaatctgtgctgtttaaatggtctttaagcagcctttcctttctcctctttctcagctctattctgcttaggatatggcttatgccacttaatcaacatgctatcatatgctttctgcattccagacatatattgaaatatcttggttgttatagccatcttctcccacatacatcccctttctctcttcccctctacatttttttctgttacttgttatttttggtactgatgtgcttttatttgagtaggatattggaatgcaattgtcttcttagtccaccatcccctgacctgtcattattgaaaaacaaaattctgtagcaaatgagtccccgaaagtgttttttttcaaatgatgatgatcggtcacgttgtgaatctgtagactcctttgcgaaaacaacaataaacacagtattatttatggtggatatgctaggtacatccaaagctcttcatatgtgttgccttgtataatttcctcagcaactctaatttaatagaaactattgtccatgtatagatgaggtagtttatacccagataggttatacaaacctgtaagtaacagagccaaattttaaaggcagacaatgtaactgcagaaaccttgttcctaattgtttaatggaatatggtttagaattctgtgtggagaatcttactctaccctagtggtaaacttaaagctctttaatttactgtggttatattatatatgtgcaatggatccctattttcaaacatagtcgtttgataaagtgtgggctgcttttcatcacgaatgtaaaaagtctcttagttgctacacccagcaactaagtgtcctttaattcttaactttgaatacttaattggatccctggtgctatgtgtatttgatttttgttgtgaaagttgcattcactgtgtccctttatttgacatcagcaagatgtaatttctataaaccaattaatgatgcacctttcaactcttactatgagaatattagctggtgtaaatatcggactccttgtgaaggatgactcgctatctgattggtctttaaaaaaatactttaggaaataatggcttgcccctgcatataccaatttgaagtctttctaatatcagccattagctgggatccacatggagtacatagacaaatgaccatagtttctactgtaaaaatgcctcaagatcttgtaggtgagattaggcaattagataaatgcctatagcacaaaatgaattaacatgattgcttgaaaagaattaatttctgtaataatttgaagaaggaagaagttatgtatgctttggggggtatacagaaaggctttataaacaaccctatgaaaaaatggaccacagttttaaacgggcaatccacagaagggaaacactgcaatattcattggaaaaagaaaaggaaggaagggagtgaccaagagaagaaacaagaaggaaaggactgaaatcttgtttgcctttttggagaagatagcatttgaaatgggccttggataataaggtgtgattgtcgttggtggaaatgaattgcatccagaatgcagaaataactcaagcaaaggcatagagattggaaaacatggggcaggtagaaaacaagtccagagtctttgctgcttcttagaagatgtataagggttttattttatagttttataatgaagggcttttaatttcaagtgatgggtcagtgtataattccttaggagataaaattccagggaaaaggaggaggggttataagataaatctagaaatctaactcataaaaattagttcccttccagggagttagttactccaaaaatatccttgataagctaactctgcatggatataactgtgttatctgtgagctggctacagacaagaatttacaattgtctgtagttgcagtctttgagctgcagtcattcaatctctgtctactgctaaaagccagagtttggaaagagcccttatgcatgcttgataatgacacaatttgactgagaatactgccattttataataatctctgaaagttacttccttggtctactgaatctcatattttgtgaagttaaatgaccaatgactgtcattcattggccatgattgtcttgagtttgttgatactaaggtgttatttataatgtgccttttgtttctcaagaatatgttcgcagaaatcaccagtagtgttatccatgtgtatggaaggccagactgtatccccttatgtactaacagactgtatggcaagaagggagccaggttgtcaatgtgagagctaatgttgatatcaacacaggcatcagaaagtcaattactctgtttccctagtttactaaatggtgcttttgcaatagggaccatgttgcctaatgggctgtgaactttaatttgttcataacagtgccaatgagtaaatggatctacctgtggactttagagtgtacttctaacattttaggactgcaagaaagtagtgtgttttatcctctgatacattcatattctctattggagcatacctatccaagcccaatatcctacatcagttttaataaagagaaattacatttaattgtgtctctatcctttcatattaatccattatgaatattttattccacaatgttagaaaaattacattaacttattagtgaagaacattcttttataagaagtgctttatacttcagaacctcataacttactttaaatatttcaggcacaataactggtaagagatgaaaaataagcctgaactcatagggtaaggaccatttagaagtcttttgtcttcagcttgtgattgttcagttaaacttatttgatgtgtgctcagcaggttgtaaaattcctatctttctggagtgatccataagagattacttcatagtgaaacacttaagtttgattcttatgagttgcaaaatgattttccaccaggaaaaataaagaatatgggttccatcaaaagtcaggcatgaattctcatctcctgataaaatgtgaaatatctttgctgatcctgtgcctattctcagtttccatgaccatgcacaattattatttttagcaaataagcaaatttgaggcaaaaacattaatttgataagatatctgcaaatgcctttctggaggagaaaataaatttaaaaagcatcagtgtgtttcactgatatgcacaatcccccacttcttataagaaattaaaacactagtttttaatatcttcagagagaaaatgagtaaaggaagcacagtattttccgaaacgtgttatttaaactaaaaccatgaaatttatgaaaaaaaaaaaaagtagacccttccttgatacacttggtcccaccgaggttcaaagtttcctttgaattggggggggaagggagattctgtaatttaagttttaaacttctgtctttgtatctatccttgtgctggtactccgctatcttggttgctatggttttagagcaaatcttcatatcaggtggtctaagttctccaactttgttcctcttttccaaaattagttgaactattgtgcatcctttatatttccatatatattttagatgtggcttgtcaatttataccaataaaggattctgttgtacatgtaaaccaaattagggagaactgacactttaacaatattgtctttcaatgcatgaacatggtatatctctccctttacttcatttttttttttttggttctctcagcagtgtttttaattattattgtaaaggccttgcacatattatggaacaaacacatattatggaacaaataaatgtaaaagctaaatctataaaacttttccaagaaaagaaaagaattcttacaaccttagataggcaaatatttcttaaggagtatacaaaaaaccccacaaaccataaagttaaaaatgataaatttgattttataaaaactctaaaacttgttttttaaaagacaccataacaaatgaaatagcaagtcccatacagggagaaaatatgtgtacagtatgtgtatatgacaaagattttatgccagaatatagaaataattattaaaactcaagaagaagacaaagaatgcaatttaaaaacaggcaacagatttgaaaataggcaatagatttgaacaggtacttctctaagaaaatacacaaataaccaataagcaaatgaaaaatgctcaatatatgtagtcattaaagaaacaaaataaaactctgtaaggtacctccatacattgatgagagtggctaagactaacaataccaagcattagctaaaagacagagcaattgaaattctcatacactgcagttgaggatgtaacatggtactgccactttggaaaacagtttggtagtgtcttaaaaataaaacgtgttcaacatatgacccagcaattctcctccttgacattgacccaagtgaaatgaaaccttttttttacacaaaggcttgtacacaaatgttcatagcaactatatttataatggccaaaaactggaaacaacccaaatgttcattaacaggtgaaaggacaaattatgctatatttatacaatgaaagatgactcatcggtaataaataaatgatctgctaatatgcacaaatacatgaaaaaaatcttaaaaatatgatgctgaataaaaggaaccagagctacctccacccctaaaaaagactgcctaccttagaattatatatttacaaaatcctggaaaagacaaaactaatctatactgacacaaagcaatcagtggtttgctgaggctgggagtggggaaaggattgattataatggggactgacaaatagggaactttttggggtgatggaaatgttccagatcctggtaatggaggcagttacaaagtcttataaatgtattgaaattcatcaaagtgtacagttaaaatggttttatttattgcatttagattatacctcaacaaaggtggttttaataaataaacaagaaaaagtgtttttcaccaattggtttgaaattcggccaaggcatatttgagcgagggctgtcagccttgtatttgttgcaagtcacagtgagtatgtcctaatggatcctctacaaggtccaggttaggtttctttaaaggatggcaagaacctgaaacagtgtgagtgcagagaacagtgaaacagtgtgtgtacatagtgctttgatttttgtgcattttttggtcctaatattttaaagtttgctgaaccatacctcatagaacatttacctgctttttctgagggaaatatctttatagaacttttccaaagcattctgcatagattttattttaagaaattaaaacattttatttgtattaatttacataataattggttaactcacataattacaatgacaagatcatacagtaggagcagacttgggatcaaatgcagctgactctaatagcaggtgtagcaggaggcacacagctgaggggacatttgagacgaaattgaggccaggttccacttcacattgtactagggttaagcgtgtccacccagaggaagagaatccttaggcctaaaagagcaaaagtgtacagacatactcaagagtaagagagtagccaggaacaccagccaagccataaactccagtctgtgtgtgttaacagataaaattaagagggtaatctagggagtctattgctaaatgaagggcacattaagtctcaacagtattcctatgatcaatcaagcaaccaatgaagtgtacaagcagaagtgatttgtcatggaatttcagagccagaaagatccttaaaaaggcagtgtactccaacttcctctgaagcttgtgtcctacctacagaattcccaaccactctgcttgaatgtctccaaagaggaaaaaatttagaagagaagacaaggaaaattaatcacaagataggcaatgaataggcaagtggtaagaggccagttttcccatcctcatttactctaaatttgattcatagattattgagcctcagatatctgtttgccatctggtctggtcagtctggtttggcatgcgtcttctttctctttagagtttgatgacgttttaggctgtgaggggcatttgcattgtagtagaaattggatgatgtcagacttgctttatcacactttctcaataatctcttttggtgagtttgatattctacttacagctgctaaagctccttataaccatacgcacaaacatacacttccatatagtcatacatactcacaaacatatatacacagccatttacttacacacgtgtacacaaaggtgtatatccacacacttacatgcacaatgagagatgcatagtaagaatttttccactacccctagtttaactggaagctgtagaaaatctgaactttattatattgatctctgggatcatccacaaaattgcccaaaatgggaatgcggaagctgtttcttacctttcattttctccacatccaatgtgtcctcttcaactgtgtattttgaaacaacctttgaatctgtccccttcccgcaactgcactgccaactgctgatatcattttttgcaaacaagtgtaatgaaaagagcatattctttaacatcaagcaaactaaggtgcaaattttagctctgcatgtattcattgtgctatcttggacaagttatttaactatcctgagcctccttgtcttaatgtgcagatagaagaagataatgcctacctgataggtggcataggaaaaggtcaaaaacattattttctactcccattgctccccttgcctgaaacattataatggccaaacaactggcctcccaacctcctttcccctcttcagtttttcctctacattatagctagagattttgctaaaatgtatatatggtcatcccattttttacttgaaactggtatcttcctgcctataaaacacattttgtttcttagtctcacataggaaatcctttttagtctgtcttgggcccaggactccagtccgattttcctcccattcctacctgccctcttggttttgaatgttccacacaacttcattcctttctctgttaattggcttttcctttacttagaatgctttcccccttcctgctttttagggagaacagggtaaactgttctccctatccttcattgagtctcctttcttttttctaaagttttttcttatcagcatccctcccccaatttgagctcattttctagaaagaattaatagctttcttatatgactctcaagatatttctgtgtggttctctaacagccttcatttattttatatggtaattatagatgtccatttgttctagggaaggcaggtgtcaggtcttactcatctttatattcctggtttgacatacagtgcctgatgtctagtaagcacttgatatctgtttattttaatgtttatgccctacattatctatcacaagtattaaagattgataggtgctctgtaaatgttaaattgagttaattattttcaatcttacaggaagttacataagtcattcctgtattcatttgtgaattttcgacatcctatattaagagttgcacttagaatgtgagttccatgagggcaacagcacttctgtcttactgctctgtctgctatgttggcccataattaaccactcagtaagccttttgtgaaaacaacctcaatgagtcttctacctcaagtcttttgaataggaatggatttaaagctgacccctaatacatctttcaaactttaagtcagtaaattttttacaaacttttttaagttgataaatccctcagaaattattctgaggaagctgatgggatagaaatgaaacagactaaggggctccaggcaatcaccactccccttcgttctccttcctctgttggtggggatcaatagagcaggatcctcaaaactgtggagttctttggagcatactttgaaagcctctaattctattccacgctctaatttccaaaagagggaactgaggcccgtggtggttaaatgccctttccgaggttacacagctatacatggtagagccgacccatgtcttctgactctcatcccgttgcacttacaactagcctgcatgttccccttttcccatatcgcatggatagcatcttacgcatctaagtttttttctttaataatgatcttctcttttctttaagagacaccatcactccgagttgtaccacttgcaccaggctaaattattcctcagtgtttacccctttcagatatttatagaccatcattatggcactccctagtcacctgtcagcttcctaatatgtacatatatggtttctttaatctttctgtacagtcggcttctctagtcccttaatcatttgtaccattctctctctaatgcctataagggaactgtttaaatatagtccatatgggaaaagtaacctcaacatgttgtaacagggggcagaaaaacacgctgaatagatgaaaggaacaatctacaggttaattagtagtatggccacaaatatgtgcacagttttgtttcagaaataaagcaagctgtatttgttgtaactatctcttctttgaacttaacagaatgctgataatgccaagctgtgtttacagtccaaatttttgctgaagaccttcaactttgcactctccctgtgtggtatctcttgcccaagacagaacttcaaataaaatcacatagctgatgcaagaaaccgttactgagcgtatccatttttatgcagtttctgtggacttacatggtttctgggagctccctataagccttagtaagggaaagctcttgacttatctcactagttattagggatttggatatatgtttactaaatgtgataatctaagtatggaaactacattagtacaagaggaatcacccagaaatactctactggcataaataaaacattacctattgcccagttttctcatttgtttcattttgtaacttttataatgtgtcaataagtttgaagtcttgaagggctgcccagaaaccaccacagagtggattttccttaccctcaatctgccttcatcaaaatttagtttgtgtgtttatcctataaaatttatctcataataaaaactgaagactaggacggtccttagaaaaacacttgattcggtgtatttattttataaaagggagtcacagagagaaaatgtggccagctcaggtacatggcttcctaggcaatgttccatttcgcaaaactttcattggtccagaaagtgtaccttcattcccaaccaaatccttcctataatgctttccatgcctttcttctgtggctctctctgatgatctcacaggtctataagctcttacaggtagaaatatgatttcttgctgtgttcttattataaagcattgccatgcaactgagaagtaatgagagccagtggattttattagaatggaattttaacttttctactttaaaacccagtgattctgctagtctggaggtagcaaagaaggatgactattttctctctcacacaaagtaagattctgaaggggcttattctctgaatgaaaaacgagaggagaaaagtaagaaccttctaatgttttattcaaatgttaacaaagaaatttgagaagcatgtttccttaaaattgacaccatttttatcccaaacattctggtaagtgatagcagatgactgtgcaagcttctatggagagagagagaggaatttttccaggagcatagtcccagtgggaagtattacctaaaagtaatacactaatcactttcaatcttgcatatttccacatactgtgtgcacacatatgtgtattaataactgttccctagacgtcacttcagcgctcagacagcttagtgttgctatgcgaatgctggagatggaatcagatgcagactacagtttagcaatgagaattcttcagagatacaagaatggaaatggccttaggtcctgcctcatgggtctccctctgagctccagtgtaacatcgggtgtcaagtatttgtggccccatctgcccactccactgagaatctaaatggcattgccagtatttgtgaggtactcatatcttaaaagtcagtgtactcaaatcagtcttgcattctaccttgtggattttgcatggaaattttttagaatgtcattgctgatggaagccccagatatataagtacatctgctccatcgtactggtgatttttatagatattcataagaaaatttattttacagcagtttattttagaggaattctttgcattttatttgtatgtgtgtatacttattttactggcaggatacacacacatgtatatacacacacacacatacatatatacacatacatacatatatatatgaatgtatgtttgtatcctgtcagtaatactttgaggtacctagggctgagattactatttctcttccacctatggctcaaatgggtaaaatagcttactcaaagtcacagttcatacatgtggtgcagcttgaatcaaaactcaattcttctatccacagatttaccactacttgagtagtctgtggtgtttaaaaaaaataataaacaacaggccgggcacagcggctcacacctgtaatcccagcactttgggaggctgaggcaggtggatcacaaggtcaggagtttgagatcagcctggctaacatagtgaaaccccgtttctactaaaaatacaaaaaattagctgggcatggtgacgtgcgcctgtaatcccagctactcgggaggctgaggcaggagaatcacttgaacccgggaggcagaggttgctgtgagccaagattgtgccgttgcactccagcttgggcaacaagagcaaaactctgtctcaaagtaataataataataagacgaagaagtaacaaagccaaactggaaagtttctgttaaatgaatgttctagataataccaacgtataaagcaatcattttataccagctatggtcaaacagggaccagagccttgacttttttttgcctcaacacagctctgcagaacccactcagtaccccatgtcctactgccattcctttggtttccagaacattgagatgtacaaatccaaaacaccacagtgtttcagagagaaatggcatgactctactggttgcaattgtaatggagttcaccttgttctggagtcatacagaagccatgttgtagacttagtgtcccacgcaatactcctaattacaatgaaaatctactgttaggtagaaggagaaattcctcacaatcaggcaacagcgcctactagtgggaagaaactgatacttgaggtagggcacctgggagatagctctgtgcatcttgagagagtgctacactgagagcccaaaggctctcaggtctcatctctcctgacagcttgctatgacatcttaatcaatgaattgcctctctcttaccctttgttatagagtctgtaaatgaagagtttggaatggctactttctaaattttctacacgtcctatgacccttgaaatcctcttaacaatgtattatggatactttgctactaaacggtaaaacagaatcccgagtaagatgaattggcttcctaaggaagtagtgtcaggggagaatagcaccatctttggggccagttccatttatgcaggtaatatggtatggtccagctcaaagatcactggactgggctgagttgcaactctgctacctacttctcaagtcatgtacaaggtcattcctatgttaactcatgtgttgggaagatgataattgtctcatttagcttttagttattataagattcatatgagaatatagaaattatgaagttttatgtgaatctgcaaatttattttcagtctttatatatcacaattttaatttaggctaattataatttttattttcccctttttgttctatattctaaattcgtatctcccatggaggcaggtactgtatggacaaaatcttttattagtcacatattgttttcatccattttgtgctgctatagcagaataactgagactgggtaatttataaagaatgaaaatttattttatcacggttctagaggctggtaagtccaagatcaaggcaccagcaggcttggttttctggtgagggctactctctgtttccaggatggtgctttgtgctacctcctcacatggcagacagtggaagagcaagccagcagaatgccgcatgaagcctctttcacaaagggctttatcccattcatgacagagaagcccgtatggcctgatcaacactttttaataaaatcacaatatctactgctgaattttggagggaaccaattcaaatcatagcacacatcttttctaaaatggaaagggtaatatgatcattggagaaatactcattcctttgcatattggtttactatccaagccaggtgtggtggttcacacttgtaattccagcactttgggaggccgagatgggtggatcacctgatgtcaggagtttgagactagcctggccaacatggtgaaaccccatctctactacaaatatcaaaaaattagccagccatggtggcacacacctgtaatcccagctactcaggaggctggggccagagaattgcttgaacctgggaggcagaggttgcagtgagccaagatcgcaccactgcactccaacctgggcaaccgagtgagactccatctcaaaaaataaaaaaaaaagtttactatccagagaatcttgtccaggttaacactcttttttgtctgctttcttcttttgtgaaacaagaaggtaagagggacactggagaaaacctaatgttctttacaaaatgagtcatagttctccatctgcaaactgtggctcccatttatgtcttggtgtcaatatgactattacatgttatgtacatggattccacctcatttgcaacatagtcttctgcctgagctctgtttgttggatctgatctaactttacatggtcttaagtcacacattgaactcttaagttctgtaggcctctaagcctttttaagttttagtattttcatcgttaaaatgagagtgattataacccttgctttgctgcctccaaatattattgagggatcaaatgcattgataaataagataaagcactagacaaatataagggatgcttgatgacttcacagagggaagattattctgttgctggctgctgaaatacagtagctttagaaaaacccctttgggttcccttattatcaggtttggtctcaaataaccagaataaatttggagatttcctaccacaaaagctaaaagtacctgggcagatttaccctttgagtggacctaagggaaatgcagattcccacgggagagatcacggagcagattcaaaccataaggcaaaaataattgttgcaatagcggttctaactgtactagtaaatattgatttttctgttagcagatcaatcatgaaatgaattctaaatatagaagactggttaaaaaattaagacggagaatgtgaaaatgtccatgtgtaaaaattaacttaaagagaaatcttgctttggccaaaagaaatactactgtttctgtcaggaatgttctgtgatttaatcaagtttcctgcctggccagataattttaggaattgtggacttttaaagtagtaagtcagtttagaaaactggttaagtggacagatgtaaagtcagactgcctaagccccaattccagcttcaatatttaactctgtggttgtgggcaaggcacataatctctttatgctgccttttcatcaactgttatggagataatgatagaacctacatcatagagttgttggggtgactacatgagataatacaattaaatacttaacacctggtccataaaaagcgctgaataaatattgactattatcatcaccccggggtctacaaatttttgtaggattaggattaggattgaaatttctaccgaaaaattccatcagtaaaatattgataaatataaatcttaaccaactgcctcagagacatagggacctctattttccactcattgactgtcatctttagagaacagtccaaagcatgtgcctttctgttctagttgttatgagctctttattttgaagttgaactatatacttcctatagtttaaaggagaaagaagtaggtctcatgctggacaccttctagatgttacctcctccgaatttcatagccaagtatttaaggcagttatgatcatctccctcttagagaagcctagaaaaggttactgcagtgcttgacagcaaatagaaactcaccaagtgcatttgttgagggattgacagaatggctggataagtgactcaactaagaccacttatctagtgagtgcgtctactcagctgcttgttttgaagacaaggaaattcgggctcagaaaatttaggaaacttgtctaggctgccaatagctagtaacaaaggcaagaattgcatatctgattttctttacaccatgttacatctaactgttcaaaagataaccatgtattatactcgaaaatgcaaaacagggttgttttttgttttgtttgttgtggtggtggtgatggtatttttgttttgtttttgctacttttcctgagagtggaagttgttatcaaaaagttactgtcatgactactatgtgtatagatgctattagtttcatcaaggttgggaatagggtatatgttgcccaactttctgcccctctccgcctcatattaaagttccagtttcctagaatatatctcctgggagatttggcactagccatcactgcattccaataccccgggacaaactactcttggtggaacacagaagcatacagtccttgttacagcagtggttctcaaactcacattcctgatggaaagctagagttgaagggtcaacacccaagagctgcagtggaggaccatcacctgtcctgattcgccacctgtggtagatcatgactttcactaagatcccctgaggcttgtggggatggagaagtgatgctggactggcccttcctctttccctgcaggtgttaatgggttctgctcctaaacaatactgatataggtcagagttatgattgaattgtatacatagaaacatgtgctgattgagaaaatgggctttacaagtcagacctggttccagtctcagccacactacattctgcctttgagactttggccaggtgatggaacatcaggtttcttatctaaaaaggagaataattggttggtaggactaaatgaaaaaatgtatgtgaaatgcttaggacagtgctgagcacagataaaaatgcacaataattttctattttttgttagtttccttcacaatacatatatttacatcagcgaaacatgcttgcttttgcaaccttctgtgggactccccctcctaatttaccacctcacctgaaggtctaagctaagcaaatctctgtctataaatgaatcacatcgtggttagactttataacaacttccccttgccaggagatcactcagccttcacttcatctcatctggtttgctgcccaggcctttatccactcattcctgaactcctctccctgacaaccttggggttttggcttgttgtgtgcgtgtgtgtgtgtgtgtgtgtgtgtgtgtgtgtgtgttttgttttttgtttttttttactttaccttaatttctctttttggactaagatgttaaaatgtttcttaatgtgactgtctccgaaactgttttgtgtctaccactcatcctagtggcagtcattgatccttttcttgttgcgagtgtttgagtgtgggtgtgtgtgagtgtgtatatgtatttgtagagggaaaaacaagagagagggaaacagacattggagccacctttcccccactagccacgtacctgttgaaccttcaagcctctctatagaatcagatatacacaagcacagtgacagaactacatgtgtcctacagtccagcttttaagatatgataaaaactcttgtattcacagagctaaatggcaataaccataggagattgcatattgctacattatgtaaagacagagtcccaagaaaatagtgagaactcagtttgatgtatgatgtgatatgtgatatcttactttacatggctaacagttgacattctttgtggattctatattgtctaaggctacagaagagccatatgataaattcatcggcaacccaaaagaagcctgttctatcgcagtgcttccaattaatataagtaaaccactttctctggctcaatgctaccaaaatattttatgagaaaatttagctgattctgctcatgtatattttcaatggatggaaagccattgcaaacttttcaaactaaaatataaagatagcattagggagaatactctctctggtgaaaaacaacatgtattatgatgcgttaggaatttctttttttcagccaactcgtggttgagcagtctgtccccaaactgttttgcatgcggacgaaacctgtttgggcgatacttgtcagcttttcttctgacaagcaggacagaaataggcacccccagaacactgagtttgacttgactcaacatagaatcacctggagagttttaaaagtttctctcctgtaatatcccacctccagaccaatgaaatcagaatctttggagttgggaaccagggatcaatatttttttttttaagtttcccagatgattgcaatatacaggcaagattgagagtcactgtcctagagtataagcagtttaagaaacaagttgtctattattacatgcatcaatactacagagtccatgaaataaaagctttggtgataagaaaatgccaccatcctagagccttcagttaacatcatatgggcctgtcatataaagaatgcaaactcattctgttatctttttgggccttcagtggaagataatttttaaatcagcttaatggaaactgtgcttcaggaaaataacttcagtagccatatgtaggataaactggagcaggttttgtttctaggaatatgttgccatcatttcactacccttatataatcttattgattcaacttttagaaccaagactttttgcagaatatatcgaagaatgtgcttaatgggaatgctgatatatcatacaattggcatatagagcttcagttcattatcatatttaaaggtacaatattaattttgcttgtgcttaaaatgtctattataattcaagtagcaaggaagacataaagaaaaatgtgacctggctttacatctgcacatatttaatactttacatttgatggtgaataatgggaaagtttgggagtatgtcatgctcagtcaccatgcatcaactcccaaaatggctgtggacagctttggtcctgcctcaaaacaagcactgcttgcaaaagagggtctgtggcttatttttatcagttgtgtggtgatcacaggaaaaacattttaaataaaaagtttattttgccatcatgaaagaaacaaattcatattaccaaaagagaaaataaatatgacaacccagcctggtgcagtggttcatgactataatcccggcacctcaggaggccaaggttggagggttgcatgatcccaggagcttgagaccagcctgggaagcacagcaagaccctatctgtacaggaaaatattaaaaattagctgggcttggtggcgtgtgcctatagtcccagctactggtggcaagggctgagggaggaggatcacttgagcccaggagttcaagggtgtagtgaaccatgatcgcactactgccctccagcctgggcaacagagtgagatcctgtcacaaaaaaaaaaaaaaaaaaaaaaaaaaaaaaaaaaaaaaaaaaaaaaaaaaaaaaaacaaagaaaagaaaacccatatcacgctatgccacttctcttgttcaacctgtagatttccctggaatgccactattcacccatgccatccccaaaaatgacttgttaaaattctaactcttcagattagctccattattaagacttctgtaaagtctttctgttggtaagaggaggtaaatcagagatatcagaacaatcaggaagccattgcaatagcctttgaaaggaagggtgattaggtagtaggcatgtggtggaaagcaggcatttctgacacattgctgaggttgctatagatgggagagcagaggtgaaggataagaagaattgttggctgaatctagagtcagtacaaagcaatatataaaataagtaataatatataaacaccatttttggttttgtttggaaatcttaattcactgacaaagttccccatcggctgccggccctctgtcatcggatcttttgattgactgactgctcagcattggcagcaagctcttcacaccagccctgggtctgagctaatcagctgtgtttccttcatgctctgatgccttgaagtttggtactattctcctggtttctcttgtttaaaagtgctgagatacttgtctaaaagatgggccttaagattgtggtgtgcttttaataatgtgtggggtaagtgcctctagaggcaagcatacactatgcttgagtaactttctctccattctgaatctctccctaaaggacacagtttgtaaatgtttgttcatgtgaaaagggaagattcaggtaccttttctgtcctactgatgtgtggggctatttttatgttttgttcttcacttttttctgtacttgtgatttaaaggtgccagactggttaccctcaaggctagtgtccccactgtatcccaagaatagaaaaaataatgagaggcagcaaaactggcctgtgtctgagtccagcatattaggctgacccactctagaggaatattctccaaagcataaagtagaagatcattccttaggaatacaatacagtccatctgttttcatagctgagaaggcaattccgtgtcatgccatcatggagccactgcagtgttttggtatccaagccatagtcactcattctctccgtgagggaaaactagaatgtcttttcctcttccacctttacctttcaaaattccatccttgaaggttcggctcaaatgcttctttctccacacaacctttcctgagcccctgtgagtgtggttttccttccacattccatagcactttcttctaagacgtgttacatgctttgccatgtgactattgcatgtaggttgtcttgactgtgagaggcactgacatcgtgacatcgtcgaattcatttttgtatatcacacagaaggagaacatagtcgtgggcaagagtagatatttgaggttgaatagatggaccatttcaaagcttatcttttcagcctgacctttaaggctttgctctggccgttccctctaaatcagtgattgaagtttgctcccagatcctcatgagtagctatcaaactctccataagccatgtaggctcaggttcttggattccaggtattacacttcgggcatcatagtctgaatcaaaattgctacttttagctgcttagtagactgccattaccaatagtttaatgagaactacttttttaggggacggggggaagtgtggtccacagatccctgatagcccttcgtgtactatgtagtgaatctgcttgacatctagaaaagggaagagtaatatagaaaaagaattttgttgacctgcctgcatttaacaaatgtaaaatgtaaaattacagctttcacaggaatctaatatgcttttaataatcatatggattggtaatccatttactcctaatccctaattcgttttctgcaatgaaatgttgtcaaagggtggcatgaagctgttagaatttaagcatgattttcaaacatagcacattttttttgtggttttgtttttttggttttttttttttttttttttcagaataatttcaaaaatagtgccatatgaaatagttttgttactgttggcaggaaagtccaaaatgttatctcataataaaaacaggtacaagttcagtcttggataaaaacttttgaagtctgccacaaacaaatactatacaaaattttttcatcaaatgtcaagactgtggtatcaagactttataatgatatcaactgtagtggtgacagcttagtttccaatactttaactctttttccagcacttcatatttctttttggtttgagatgaagtctcgctctgtcacccagctggagtgcagtggcgccatctcagctcactgcaacctctgcctcccgggttcaagcgattctcctgcctcagcctcctgagtagctgtggttacaggcacacaccaccacgcccagctattttttgtatttttcatagagatggggtttcaccatgttgaccaggctggtcttgaactcctgacctcaggtgatccacccacctcggcctcccaaagtgctgggattgaagacatgagccactgcacccagccttcatatttcttattccttaggaaaaaaactaagatgtatactttgggttatatttaaagtcacattcaaatcccacaacaggatataaagaaatacttttcagggccaaatacaactggagaggattagaaataaatttacctttttttctctcacgttgaaacatctagccctcccatgtttgagtgtgaaatggctgtcaatccaatgtgatggagtgctgaaagccgtcttcagtgagaagtctctccataatgctccctaacatcagatccatgttaatcctgatgcacagaactgggaataggtaatatagcatagtgtttaagagcacagatgctgaagttagactgcttaggctggaatttagttaaccatttgtgtgactcagtttcctcatctgtgaaataggcataataacagtacctgcatatagactgttgtgaatatgaaatgagttaatatatctaaagcccctagaaaaagtctgacatatgtgaagcactacatttgctataccttatctatcaaagcctacagcttctggctaacattcccagtgttctataattattagatagaattttttttaacttagtagaaacaaagactaagaagggaaactagatgtggacgtgacgtctagctcaagattcccatgatggagccacatagagatatggatggcaaccagcataatgcctctcactgacataactatttgtctgaatttatattttattgttattatttaaagcttactgcaaattttaaaaactgaaacctgatgtccatatgtaggccagatgccacattaatcaatttaagaatgctggagcttcgcagaatactgcatgaacaacgagaaccgtggccctgaaagactcaaaaccctacagtatatgaaactattgcaggatgtgtggatgttcaaaggaataacagacttggaagcaatgcttactgaattttgatgtattaaaggatgtcaagtccaagagagagataaggtctcagaagacagaactagaaccatggggtaagcagttagaatgaggaagcactatggctcagtaggagaaagaaccttttagccatcaaagcgatctagaaattaaaggactgccttgggatctgcctgtcactgagagctggctgcagaggttttacaatcagggcttttgtaaaaggaactaaaatttgagtttggacccaattatcttacattctaactggatgtgtagaatctccaagaagaaagactcttctgtactgttttatagattttgccttccactccaaacatcctgagtcatgttccttttatacttgcatgtgagatgagagtcagagcactgacctcaaagccagcgaccgggttctactgttcctttctgcaagaacttagactatgagactcaatcccctcaaccgattaatgtaaaatcccctccatgccaatcttgcagaggataggggtggctgtactggtgatcttgctggggtaatggggtaatagtactggggtaatgacggcaggagtggtggttctattgctgctgacgttatgaacctgctttctcctccactttggctttagcaggactgaagtactccttggtgtgttcttatcaaacccttttttttccaggccgctgtgctcgctgtggagaaaacgtagttggggaaggtacaggatgcactgccatggatcaggtcttccacgtggattgttttacctgcatcatctgcaacaacaagctccgagggcagccattctatgctgtggaaaagaaagcatactgcgagccctgctacattgtaagttccagatttgttcctcaagcactttgcaaagatgtcttctgtggctgaatgccagtcactctagatagaatatagccatcagatctttgcttcttcctagacttcaaaatgtgtgtgtggggtgtgtgtgtgtgtgtgtgtgtgtgtgcgtgcgcgcatgtaaattagcatattgtaatttttttctacacatcccccattcataagcagtcagaaaggtgtattagcatgggactgccattcagttagtggtctgctgggaagatcatcagcctgtggctttctagcatgtatgtacaagctaaaattttctttcttaaagcatcagaaagctttccaagtagctgagtcacacctcttataagatctcaccctacatttgaagtgcccagtagtttcaaggaaactttacagaatctctggacttgtcagtcctcttccagaatactgggccctttgagtccatttttatctaccaaaatgtttcttccccctcttatccaacaggtttttaatgatgcaaacaggggaactgtttattataaagcaccttaaagagaaatgaacagtaatgctgactgagctaatcattgttttcttttattacagaacacaaaaactatattttaataatatacctgggtaactaaaaaattctcagtcatgttaccttagcgttttacaatgctacttacttaatctacctgttaaactattctctggtagagtaatttgatgaatgaacacagacttttttcatctattgtaaatttctttgctatccttcagcatgattttaatctttgtttaacacatgttgatgggaaaagtagtgttttttgtttgtttgttatgtaaacccacaaaacagtcatggtttgtccctcagtgcccagagatttcaacataaaagacaccttggtttctttaccaaggtattgggagtcatacttggctttacaaggttcacatttattgaagacgtttttggcctggttggtattttcctataacttggcagctctaacccattgtaaccttggggtctgtagcacagatctgaaagttcatcaagattaaggcttcgtaggattaaatatggctttgcatctgtcttaggttcaattttatttcgttttctttccaaaggtaacttaatacatgtaacatcatttctttccaaaggtagcttaaacacatgtagagccatacagtggtagagttggaaaaaaaatcttaaaatcatttgcgtaattactctctttagcaatgagaatgccaagacatacagaagaggaaagcgacttcgtatgacctatcattagtgtcagaaccaaggctgcattccgttattcacgctccacagtcttagattctttgcagatgctacatggttttcattttcctaaacataaagataaacaaagtaatgtactgttgatctggaaggagcaattatgcataagcgaaagtctagtaaacaaaagcttacctctttagaatataagaatatttcaaatatctttgaaatctttattgaaaaaagaaaggcattacataattccttgcctttttaaacagactaaaccgggtgtcattcacaatggcttggcaccacgtttatgaaattatttattgccacgagccctaaggtagtgatgttggcagagtgtgtagaggcacccagggttgtccttacaccaagtaaacacatactgctgtgtttttttatagctcctgtctattttttatccctttttgactccatagttgatttttgctactttaatgatgctactgtggcagcagccttcttcagttgttttgtttcaacccttgttagcttgaaatcatatagacagtattgggaaacagtgtaacagggtgggaagaacatgaatttgaatttcgttacgtcacttagtgcctcccctccttgggaaaattatttactctttctaagtatcagttgcctcatctatataatggggacgatggcagttattttccatgaagaagaaatgagacaatcctagtaaagcacactgggcctcttcaggaaaagtagtggaataaatgttattctgggattaactttaatgatgtttctgaaactgtttaatatttctgaatgtgggaaccttacatgtgcagtgaaattcactgggctttaggaaattattataacctttcagacatactcctcgcatttttacatgtttgcttgcttttctgagtgcgtaacaaaactggagaaggtctaatctgattaaataataggtttctacagtgtgtgggctcaagtttctatctccattccaggcatagtatgggtctctgtgattctgtaggatgccagccccttcttctttggtttgttgttactatactatgcttatgagaaggaaaactatccgggagatatttaatcgcgtacttggaagaactgggtgaattcaaataatggaaattctaaccatttttttttttttacttctttccctcataagaacatttaatcaaggtttttctttaatgagatctattcgtggtgactctaaaatgtaatttaattcttatcagaattcagttaagctttaccaaagacccttgttcaatattgattcgagttcagcacagtcctcaagccctcagatggatgtatcagaactttaatttcttctgaacttttatatgtccaataagctgcatactagaagtgtaaggaggttgaggaaattgggcaaatgaaataaaacaagttggctttgaagatagtttgcattaaggagaatcctagaactatgcgtctctcttggaaccaaaagccttagaacaggaagcatattctgtgtgatccagcaaaattgcctttggttacactgttgaaaactgatgtctaaaaggtattccatacaaaccagagcaaacctagcccttggccatcagtcagtgtgcctgtcttttttttttttttaattgatggaatgagaatattcaagatagtggcttaattatttttgtataaggaccagcatgtttgatactctgagttcaggaatgagaccagtctaatgtaaattaaatttacttctgcctaaattggttgttgatcaacttaagatcctattaaaattaaaaatttacatgattttgagggaaaatgcaccagtaatgtctgcagctttggttcaatgatttttaatattttcctgtggtttattgagtttgttcttaatctttgtgcttaagtagttatgattaaacagtttgattcagtatagcattgtaattctctttaatcattttacatattttgttttctattttttatttattaacataatacaaatgttcatatagttttgcattgttagtattcatttttagatttttatctgtttagttttacatttagattacacacttcattttaaaaccatttgccagtcaaaatgtattgtgtgttttgcaatcttttagaattgtaaataacatgcctatagatagttaataaaaattttattttttattttgaattacatccttagcataaattctttgatttatattaccaaatcaaatttaatctggaggacttttgcattaccttgctagatttctttagaaatatttttctaatttacagaaccatcaacaataatgaaactatatgttaaaatgcaaactatcccctatggcagaagtttatttatattttctgaactaatttaataagcacattatgtcttagttattttaagtttgtgtaattattagcaaaatcaatgagatgcttttcttctttggtgatatgtctcttgaaagcctagttttggttattcttatagatttgaatatgtaaacagattaaagtaaagatcactaaaactttgttaggaagtgatataaatagaatgtatttatcctaattctagctctcctggtgtgaccttgggtaaatcatttagcttctgagtatcagtgtcctcatttactaaagggagatattaatttctcccatgtcttcacagataaggaataagcagttgtgatattttgtatacatgaaattatttactaatataagtgcttaatctgattaacagaatttttatcattgctttttttttcccctttagtataatgtgatacactatagaaaccctctaaatctggggcaatttcttggctgtagttgctatggaaatactgaaataaataaatgtcatggaaggaatataaggacacatattaaaagcggaggttcatgctttgcttaagaagatttttatgttggtatgaatatgaagggcagcaacagtgcctcctgcttatgtacccttctgcacataaagagacagccttactcataagtatagttttagaaaaagaattgctgttttattcctagcattaccaaggagtctgggcctagggacagagtgcatcagaaattctcagcaaaagtctatttatgaagtggcagccaaggatcctcccccaaaccagtgcttttattcccagtggatggactccaggtcctaactctctgacagcagaaggtggtacagacatttttactagagttgaaatccaaatgactaaagggcctctggaaataggaggccaactccacaggaggctaaacactttaaggtacctgaaacttggcgcattagtgaccaacacactagcagccttttgctcccttatgtcatcaaatggctacagttaaaacattctaacttgtcagcctacattaagaggtagttttgtacctctgcaggaaagctgttcttttatatactcaattcttcttaataaaatgttttaaaagcacttatggccagtgctttatgtggatgttggaaaaggaagcaagagtttggactaaacctgaaaaatccacatgaactttcttcctttttttctaattgcctacgtctgctctctcacctccaaggagtgtttgtctgtgcctcttgtctctctttctgtctcacacaacacacacacacacacacacacacacacacacacacacacactttcttcttgctgttacatcatcatttcaccagaactctcctaggaaggagaaaaatggttcaagaaagagaaaaatttgtcaagcactctcttgggaagttaagcatgttacccactgggaatagttatctcttccattcatacagccccttacattttataatgctaccgagcatctgttgttgcatgctgtcatacctagtagagccttgtgaaatagatcatggggagattattagtctcattttacaaatgtggctcggatgttttcaaagtaaatgacaaaacaaagactatgaataacttttataatttacactttattgcttggcccatactaacatccgtgctaacattcagcaactaattttttttttcttttttgagatgtggtcttgctgttgttgcccaggctgaactcaaactcctgggataaaatgatcttcctgcctcagcctcgcaagtagctaggactacaggcttgcaccaccacgtgcaacgtgcaacttaatgttcaactcttttttttttttttttttttttttttggagacagggtctctctctgtcgcccaggctggagtgcagtggtatgatcttggctcactgcaatctccacctcccggattcaagcaattctcctgccttagcctcctgagtagctgggattacaggcgcccaccaccacgcccggctaatttttttattttttcatagagacggggtttaaccatgttggccaggctggtctcaaactcctgacctcaggttatccactgccttggcctcccaaagtgcttggattacaggcatgagccatcacacccagcccatgttaaattttctacgtgaagatcctaaaagcccccaactactcagatttaaaatcaggtataattatagccttttcccagaaaattttaattgataaccacctgactcatgctttccagtatcacagaacctgaaatgctaaacttctactgatgaaaaaccataagcccttgtattttcttgagcatttgaggccttaaaaagcaaaaaaaaaaggttaaaaatatttataacaactgacattgacattaacatttgctcagtgctttaacttttatgaagcacttttcttttatcatattaccctctaattaatgatcctagaaaatagttacagttatttttgccttcatttccagtggcaagaaactgaatcttagaaagtgtcagcttgcttagttccatagagtatgagtgtcagagctaatacttgaccctgggcctctgattcccaaggccggctatctctacatctaacagaaaacactggaaatcccatttgctgttgctaggttacctttttcccatgatggtaattcttttttaaaatcctaagtttttcattaatgtacgcccattagagaaaaattagcaaatagaagaagaaaggtatgtaattctctcatctcagtataatagttcacattttgtcatgcacttcttttctgttatgtttacctgtgggtatggaaggatgtatacaaatgtaaccacacatctgtatacatgtggttacatacacacacacacaatgagatcataccttaactattggttagtaccttgcttttgttacataacagtatatcaaactttgccttctatacagtccgttttaaatattcttgaaccactgaaaaagaatatatgtcacctacatatgctttctgaaggttgattcaaggatattttccaaaaggcaaataaagtaatcaaaataatatgcacaagagatgcatagcaaataaaatggtgaaaagcaatgaagtaataaaactactggtaaaaaaataaaggggcaaagatgtagtagtaaactcagaccaaaataagataatattaattacctactaactacaatattcatagaagaaaagtaccattcagtacaaaggtatcaagcagtctgaagaacattactttttgataaatgtcacagttccccatgaagaatagccctgagctttccttcattaaatatcattatattgaaatgtataatttaaaaatactgaagtaagagataagaagggtgaaaacatattctttataaaaccttaacacattgcttttagtctttgataaatcataaaaaggagttaaataatatgattgataacgttaatttaatccacatacactgatctatgcaaacaaagagtttctatcttctgtctaaatctgcatgggagatttagaaaaacatttatcatatcaaagtctaataggaaattgtagacagttcctactgtggctggcagaattacatgtagccatatagtagaacaagaaatgaataaatacataagcgcactcttgggttaaggaatcttagaaagtagtgatgatgctaacactgcatagcaatgagaacgggatggagccgacatagtatgccaagtaatactagtctcattaattgcaacaggaaacagtgcatatgtattaacttaaaaaactagaacagacaagaaaatcaaccttaaagaaatccattaaaataaaacattgttgataagttgaaaaatactgcaatgtttagatctggggatgattttttgaaaagagcagtgaaataaacatttggttaagataaccaagaaagaaacaaaaactacagaaaattaggaatgaaaaagacactcagcatagatacagatgacattttaaaattattgcacttaaaattttatatgagagactatgttctatgcaaatctaaagtacaggtgaaagaaacttgaataaactcgtaaagacagatggaatgtgaagctactacttgcaaaagagccagaaaatttcactaatcaaagttttcagatctccaaagaacaaatgatttctgtgctatttcaactttaagagcctagcaaaaaacgagatgcttaccaaatcattttataaagctagcgtgctcccaataataatacctaacctaggttacccccagaagacaattctgtgataatctaactttcataaatgcagaaatcctaagtgaaatattagcaaattgaataccacataataaaacattccagttattccatattcagtgctagaacaattaggaatcttttagcataatttgctatattgatatatcaaaattttagaaaaactagtaatctccatagatgcttttcattaaaagggcatttaataaaatttttcatgcattcatatttaaaaacaaaaacaatggcaatgcaaaataagctctaagtagtatttacatatttcgatttattatgcaacatttctaacatatataaagatatgaagcataatgacaaaggtccatgtacctgttatccaatttaagaaataaaacattaaaaattcagtagaaatcccttgggttctattccatgatcatgttcccccagagagagccactattctaaatttgttttttatcattttatgcatttctttaaacaatatgtagtgttgttagcacatagtgtttcttaattttaaataaatggcattctattatttgtattagtgggagacttttccactcaacatcttaagactgtatgtacatatagtcatttacaaatgattgattattcttctagagaacctgaaaaattttaaatattggaataatgaaagtttagtaagctgacaatataaaaatgacaattttaggtttagaatatataacagaaaagtgtcctcatacagaagcaataaaaaatataaaatatctaggtaaaactttaaaacgtataaatgatctaagtgaggaatgctaaaaaagttttgcatgaataattaactcatgagcaaaaagggtattttggggattgaatgtgctttggaaagcctctctcactttaatagacattcgtattatcaccctttattatacaacaatgttttcagtgggggaatgaatagttactacactctcctttgctagtggtatttatttagccctttcaaccaaatatcccccagccctctgctcatcttagttactgctcaccacatccttgcacgttccaaggcagcccttacttggtaaggaaagagaggcacagacctgtaagtggattgcccagaacaacaaagaggcctagctgaacataaccctttcttcccagttcctgttgcaaaccgtattaactgctgttgtcatagaattagaatgctttttaaagtccagcaggaaccttagaaattcaataatgccattttatagctgagaaagctaaatcccaagaaagctgagtgttttgcctgaggttatacgatttattaacggcagaggtgggactagaaaccatgagtcttcatgaggccttcaaagaactactttctttgggaccgacatgaagggtttaaacatttgtggctacaggtccagagagacatccctagaaaatgctgagattagtaagattttggttggagagtgtagaaataggacagcgtttgctttcaccctaaccagaatgaagggtctcagatttccaggttaaatgcctctgaaactttattctagaaccttcccactgccctagtttgtttaagtcaagcatgaactcaccactcaatgtttgccagagtttggatgaatgtcagcatcaggctactgtaataatggtttaagattatttaatcccattagttatacacttcattaggctgagtgaattgttggcagtggttcagtaaacttcctcctttagagataaaaggacagaaagaaaataggaaaggagcctattcctcattttctttcatagttataattcttttttttttttttttttttttttttccgagacggggtcttgctctgtcacccaggctggagtgcagtggtgcaatctcggctcaccgcaagctccacctgccgggttcacgccattctcctgcctcagcctcccgagtagttgggactacaagcacccgccaccacgcccagctatttttttttttttttttttttgtatttttagtagagatgggtttcaccgtgttagccaggatggtcttgatctcctgacctcatgatccgcctgccttggcctcccaaagtgctgggattacaggggtgagccactgcactggccataattcttaatggataaaggaatgataattacccagctgtagcgtggactccatattagtacggtctcctaaactactcttcattctcaggagaaataaatgtttgtaacctaatattctctattagaagaaaatggacagtggcagagaagagagtgtgtgtccgtgtgatcaggccataaagttaatcttaaaagtaaacctgaaaataaattcaaagattctagatatgagagtcttttacgtagtggggttggtatgaggcagtaaatgattttaaggaaagaatatagaatttaaagtgagacctggttcacactcagccagctgctattctgcattcttccctttacttttagcttcagtttcctcacacttagaatgaaaacaaacaataagagcaaaccagtttgttatatgttctcacatctgactttgtaaaacagtttgaaaacattagcgtgctcagctccaggattgtcccatgcaggcaatgactgttacatctttcccttctttgtagtttatttttgcccagatggatctgcattcatttgtactatctattataatattgttagaattcactattatactgtagaattcattaattctattatattgtagaattcactaattctataatattgtacaattcacattatatattataacattgtagaattcaccaataatattgtaaaagtcactaataattcataaaaggaatgaattcatttgtgatcttatcaaaaaaaatttaaaaagaaaaaagaggccgggcacagtagctcacgcctgtaatcccagcacgttgggaggccgaggtgcacagatcacttgaggtcaggagttcgagaccagactggctaacatagtgaaactccatctctactaaaaatacaaaaattagctgaatgtggtggcacaagcctgtaatcccagctactcgggaggctgaggcaggagaatcacttgaacccaggaggcagaggttgcagtgagctgggatttgtgccactgcactccagcctgggcgacagagtgagactccatctcaaaaaaaaaaaaaaaaagaaagaaagaaagaaagggagaaagaaagaaagaaagaggcacttgaatgaaagtactgtttcttagctcacatggttatagggtgaaatgaggattcggagaggacaggactgaacaaaaatcagtgtgggggctttgagtcgtaaataactgtaccagggcttagccccagttagacacataacaaatctgcaagagagaattttgcctaacttgaatcaccaaaggacaactgtaagtcagcatttcaggctctggaatattacttgcatacccacttggtttgagaacttgtggagtctgagagatggcaagtcatgagactaggagctcggttttctcaaaatgtgtcagcggtcacctgctttgtaatcactgtgaactcctcattaaaaagtaaagttctggactcctccccagaatttctgcacaaggagacaggaactttgcatcttttgcaaggctcctgggacagcagggagttgggaggtaaatttttatgcacagtcaagtttgaaatccactagtctgtacttccagtcaagctcatgcaaaaattggtcccaaaatatgtttgcattcttatctcccatcagctctcctacacattctttttacaacacttgcccaaggtgaggactcttctcctggacattgatatggaggtttctctgtctattcccatgccattggttgcctaccttctgccttttccgatctccagccttaaaatgctttcctggaacttaaccaactagatgtaaccatttctgaacatgcaaggttttcatttccacatctctcataggattgatcctcaccacaactggtattatcaagtcactggcatccttgacacactccagtactgacaggaaccccttgaagactgtgcggggtgcggggaggtcacccttttttcttttcttttcttttcttttttttgagacagagtctcactctgtagcccaggctggagtgcagtggcgccatcttggctcactgcaacctctgcctcctgggttcgcgccattctcctgcctcggcctcccgagtagctgggactacaggtgcccgccaccaagcccagctaatttttgtatttttagtagagacggggtttcaccgtgttagccaggatgatctcgatctcctgactgcagggaggtcacctttaattcgtctttgtcttttctgtagtgcttatcataataggtgaacctattgctgctctgatagtgagggggatttggggggagcctgtgtcactctagcactatgtctccccacagtcattgactcacataccctttgcttgccccttcgtgcacctaggacctgagactatgtatgtataagaaggaaggaggagaacttggctctgagagactatgaacagagtcattgctgaaatgtaaatatcaaagattgaagggaaagatgtgagagtgaagccagctgtctagcttccagccgtagaatgatcataagagctactacactcaaggtcaaacacactgactcacccatgaaaattgccaaggagtttgagtggaagttctctgatattccaatgactttgaatgggacacggtaattccttcccacagccagggcttacttaaaataagtaaatgaataaataaagtctactccctggatcttttttttgctcttgtccctgcagagtaaggggatgccagccaaggctgacatcatcattatagcaagacaggtgctttttttgaatacttcacaaggacaagggcctggtattatgtaggtcttcaaagaatatatatatatataaatttttttaattcagtctcctacatttatagtatggggaaataagacaagagcgaggaatgccttgcttgggatattgcaattggatggctgcactgaggactatttaagcaaccttaaaatcacaaacacacatctgtgatgactttttaattatatctgtcattttggaaaagatattaaacatcttcctcagaagttatttttactttacacactctttaataatgttaaaagatatttgatgcaatttatattaataaagctcatgggacgtgttagtaaaaataaaattgaatcttctaaaatatattcctttaaaaatgaatgtctataattttatgctagtttaagcaaataatctgaataaatcctgtttgtttagcataacacatgtacacgtagtttctccacaaaatggaacgcgctaaatgtgttggggcctcaggaaagaactagtggaagggggcataggaggatttgggggcaaaaggaggaatccaaaaagaaggtcttcatggaggaagagacctgtcccaatgtgtcattcggtagatctcactttctcctagtacctcatagtcattcatttttcacccccaacagacaagtggagactgatattattcccttttacaatgtaacaaaatcaaagcttagaaaaccagggggtttggaaaataaggaatttgtgtaggattaaaatagaactttgagctcctggactctgaatcttagcttctaccttgcacttaaataaatttatgctaacagatgtcctgtcatcagataggacttttttttttctttttaatgtcggcaagtctcattgttacagctctctggtctgcccagtttggttacacctgttttgagattccttgcctatacccttccaactgaagacaagcacttcctactgtacttacagaactttcatctatgtcttggtttaatcttttgcctttgttttaaccgtttaccacttctgctttatattggtaggtaatcttacccccaaatacatagactatgagctccttaggagcaaactcattttttttttcctgttgttctttgtgtctttttttccctatccacctccaaatcttactccacatttctgaaaatagcacccaaagcaatacctctcactttggggagtatttagtacattttttaaaaaatgaatgtattatacagtctggatcaccataacaaaaatacaaggactgagtgccttaaataacagagatttattttcttatagattgagaatggaagtccgagatcagggtgttagcactgtaggattctgctgaggactgtcttcctgacttgtagatagccaccctctcactgtgtccttacatggtgtgtgtggggagggagcaagcccactaagtgtcttttcttataaggtcactagtaccatcatgagggctccatccttatgacctcatctaggcttaatcacttctcaaaggccccatatacacatactatcactttggggttaaggcttcaacatataaatttataaagggactcaatttagtccatagcaataaattaggccttttgactatagatctgtaagtgcataattggcactgattgatggattgcagatcagaatatcctatgcttctagttatatagaaactacatgcttagtgttttttttttttttttagacagagtctcactctgttgcccaggctgaagtgtagtggcacaatcttggctcactgcagcctccacctcccagattcaagcgattctcctgcctcagccttctcagtagctgggactgcaggcatgtgccaccacgcccagctaatttttgtatttttagtacagacggggtttcaccatgttggcccggatggtctggatctcctgacctcgtgatccacctgcttcagcctcccaaggtgctgggattacaggtgtgagccaccacacccggcccatgcttagttatttaacagaggtttattgagcactgtgttggctttaaacaattttgctagacattcagtagggcctgatgagtgtttaagacctcgtacagttcaggtgcattttcctttaaggatacatttaacctgctagatgtcatctcattttgaagacaagagaaaaagagaggaagacttgttttttcagagggttattatacattcctattagatcattaggaaattggcacaagtggcaggaagccaaactgacctgagtctggctgggcagtgtctgcaggttactccagcaaagctgctggaataacgatgtgttcttccataaagtgctttttgtcaaagtctcttctggaattaactcctcatgcacagatcgataaaccccaccaacttgccaatgtaattaagaagtgacaggttaagcataaccattaattaagttcaaagtaaaagaaaatgaagaagattgtttttgtgaaattgtgctgtcagatttttctcaagggtatttctgagttcctataaaggggaatttaggaaagggaggagaagattgtctccacttccttgggaaaagtgagtgtttaaacacatgtccattgaatatttttaactgaaaagtgaactatttgccagttttaagagacattgagtgagcaccttctgtgtgcaaaagactgtgctccgtgctatgcggaatacagcgcagtgtgagacttgttcacgctctcgtggagccctgaggtgaatgagaagtatcagacatgtgaacaaatataacacaaggcaaagtaatccaacttatctgtgagagattcgggcagttgtgagagctcagaggaaaggccatgccccatcctacagtggggagaggaggggactggcatcgagaaagacctcccagaggatgcagcatttgagcaaagccttgaaagtagagtaggaatggataagggggaaagaatgaatgagaacagttccaatatctcaacatttttttatgttgaattccattatagcttctaggatcaaaggaaaagaaatcagcctcttgttcagtaaagatttgttgagcattcattatatgtgcattattctgcagaaaatttggggctgggagaggtaaaaaaataccttcaggataacaggctttttcacaaaagtatcaaatagtcttagactcattgtcttcctctgatggcatcttaatggaattcaatacaaaggccaaaattcctttgttttgaagccacaagaaaacacagccaatggaaaagccgtgttagtgctgcctgtcctattctgataaggtgaatacttaaaagctatgaaagaagcactgagtactgctggacagtttgagttcatttggctggtagaattgagtggaagtcaattctcatgccatttaaactggaagaaactgaagattctccaacccaagctcctctttttgcagatagtcaactgaagccctgtaagactgtagttttatagataaaaaagagccatgtgaatttcctaaatcacataacagtcagtttattatttgacatttatggtacattcacatggaagagaatgattagacatttccaggagagaataacgactcccaattccctgagttaccattagatggtattaagcaacttcacttaattatgtacctgttttccagttatgttaattatacatcctttagcatttaccacctgtaccaatcatttagcataataataccttatacttaaatgcaagtacccagaatacttttatagttgttttcatttgatattcacaacaatcctacaaggcaagtgttatttctagattagatatgagagaactgaggcatagagaaggtaacccatatagccaagaaactaaaacagggttctgacatccattttctaactatgcatctaggtttttttttttttttacctctgcgtctaagttgcctgcctaaatcgccttcagtccattgaaatccatccaatcaatatttactgaacatcatctgtatttcaaatattgtagtgggcattgggggtatgaaattgcaaaagagagaatcatcagtatttgggaaactcactgtttgaatgagatagaaagccaaacagataaatgggaattattttaagtgccataatgggtctatgcactgtctttggagattggatggacagggtagcaaaagattgaggagctaattttgctgctgtttatctaagcatgtcagggtcctgtcttttcacgtagattatgagtgtcttggcatgtcttttgtctctctgcatcccccgaggctccttgcacagtcctcacactccactggcgttctgttaatatttgttgatgatgatactggtgattttttctctctgacatccagaacactggagagattttctgttggcccttgggtataacagatttttatttatacatttgaattagccttttagaaatcattcttaagtaaaatagatatctttttagtgagagagtttctaaatacgaacttattcaaaacagtaatgatattctattttagccagctaatactcaactacgatttgcaatttagagagttgtgcttgtatagattgtccctttctgaagtgagtgaattgtaactttaaataagggctgttaacacatcaaaatagtttttaatcagcctcaaaaattccccttatttccaagtatcttatttttactatttcattgatgtttcaagtggaatcaaatattccaactgttttccactggaagaagatgaatttcaggtacaattcagtagcaaagaacacccatgttttcaaaataatggagaaatttttttctcatatgaagttatgattaaatttgtgaattgcacaagcttggaattctgctgcaggatgcctacattctgtattgctttattttggtcatatattacaaatggaatatttcccagctcatttatatacagttcctggttgctgaaattttactggcaagctttgtgaactaattttacttctcaaagatactaggaataaagtgaaaatagggtcttttctctcataggtctaaaagatacttctttcctttaaccattacattctggaggtgtaattaatccaaccctgctgtagataggatctcattataaagattctaggtaaacagtctttctagcagaaatgatctttttggttcagtcttgcagcatttcctaaaattgctagtgtacgtagtaaatagggaggtaagtggggaaatttcctaaaaatgccagtgtacagagtgaattgttaggtaaatgagaaaatcaggcttgatttaccaaccaccccatgtgcacatacaaacaaacacacactcacaccaaagccaggaaccctgcaacaaagttctatttaccctgaggagatataaaactttgtgactgccactaaattatttttttgaaaaataatacagaaatttgtaagcagacacaacagctctagtttatccaccaaataacaatataaatgggacaagcaaagagaaactgtaatttgaagatttttgagtgtgatacttataaaagtgtgtgtgtttgtgtgtagaaatgtattgaatttgagagtaatttatggaaagtgctgtcagcatggtatttcaaatgcttcacaatttgaatttaaactagtcaatgggatcattaagattattatgcatgttttccaaagagtttgaattcaaatgacaacttaaaagaaaaaaaaaaagatgtccttgaaaaactaaggaatgttagtgcacttatagaaattcttgcagtttggagtaatttgccacctccccttctgaaaaagtacctgatgatagtgtgcttgagagataggggtattgcagacatattccttaggtgagtaaaactgaattgtaaagtggatgctatggaccatggattatttcatttagtacgattgacagtagaaaatcaggaagggacgtgcatcagtgcgaggctgacacacagatctgaggatggcagaagctcactgaatagcacacgcaaggacccttcaaactcatcacatgtgccgtttggttccctttcaatgggtcggtcttggaatatggaggtctgctttcattttgtgccaagtaaccacgtgagcagtttacaaaagatacaaacagaaggctgctcattcatttttcaaaaagacttttttttttttgcaatggagtttgcaaagtgattttgcaatggattttgcaaaaaaaatggatgccattttttttaaataagtgtaattccaatgatgggaaatttactagctctcaaggcagcttttccttgtgttgaaatctctaaaggttaaaaagttactttttggaaagaagtctatttccttacaacatgttttcattggtccatagagaagacagctaatacatcttccacttggcagccttttaagtatttgaagaaaattctcaagtccatctgaatcttctgttttggctaacttctagttccttcatccatttccaacctaaatttgagcctaacgaacagatttcttctttcttatttaaatatatatatatatgaggaaataaaggcacagagggcttaagggagttgcccaagaacatagagctggttggatgactggaatgtaaggctgtgtggctctaaaccttgtcatttagactagaacacctatacgtcagttagcttcctgccacttcttgttttctgcctggataggactttataaagagtttggaagaagggagagttccgacgaggtacagaaatcagaacttccccttcttccaaactatatacaaataatcagttaatcagattaaaggactcttagtaacattgaaatcaaacctttgtgtttccaggagctctgagaacaacaatttttttggagcattgcaatctcttgagtatccaaaatgattctgtaatgatgtctgtgaggtcagaattggagcagcaaatggaattcctttaagggcttcccatcaatggacagctgattccagaaatggaggaggcacagtttgtatccaaattcataagcacaagtgggagaaattaggctttggtaaagagggtgacattcccaaaggaatcatctgtgaagttggggaaggaattcaagctcagggctgctgttctctaccaggttcttcagccagctggacatgctccccaggtttctactcagtctggaatgttagtaaaagtccacttcctctccttgtttctcccttctagtgaaaacgttcctcttctctaccttcctgacctcaagaccattgttccacacatcccccctcaggatcccaccccgccattctcattctcattacattgtttctggatccatgtctttatcagatgcagcccactgtccctttcagaagatgccagaaaatttacatatgtgatcaaatgttcccatcacaacagttctttccagtaatcccagtgctgggcagctgattccagtaatggaggagacactttcagctattaggcaatggatcacactttcaaaggagattgagcaatctcctcatcaagttgtacttagagcacaaatctggtgccaaaaggcactaccggattcagactgacagcactgagagttttgagtgaaagggaagttagactggtgttatgtgtattcactgggaggaactcaccgggagaaataaagagggtttccagtttattcattgtgtaaagcggctataatagtatttataggggttttgtgaatgtcaaataaaattatatttggaacagtggctagtgccataagtaggacttaacctttagcaatatgtactacattaaaaggaaggtggacacatgagtgatctctagcattttgtgactggaaggaaagagactggatgaccactcttcagagatgctatggacagtacttttgtcaaggactgggagtggagaaaatgacttatagtggtctttccaacatgaagtttgtattaatccgttttcacactgtgaggaagaaatacctgatactgggcaattataaagaaaagaggtttaattggctcacagttccacacggctggggaggcgtcaggaaacttacaatcatggtggaaggcacctcttcacagggtggcaggagagagaatgagagacaagcaaaaaaggaaaagccctttataaaactatcaccccctgcctcggtgcggtcgctcacacctgtaatcccagcactttgggaggccgaggtgggtggatcacgaggtcaggagatcgagatcatcctggctaacacggtgaaaccccatctctactaaaaaaaaaaaaatacaaaaaaattagccggacatggtggcgggtgcctgtagtcccagctactcaggaggctgaggcaggagaatcacttgaacccgggaggcggacgttgcagtgagctgagatcatgccactgcactccagcctgggcgacagagcaagactccgtctcaaaaaaaaaaaaaaaaaatctatcaccccccttgattcacttacctcccactgtgtcccttctacttcacgtggggattatgggaactacaattcaagatgagatttgggtggggacacagccaaaccatatcacacatgaaacacagaaaaaggacatctttttacatggatcttctgatatgcttgtaccaaagcccacagtatatcctgtcttcttgaaagagtatcatagttattcatttgccttggatggaaataatgttgtaataccagttaatacttttttcaactaaagggaatttggcttcatctccagttgcaaattcacatcaggaaatatcaaatccaaagatcaaaactcagtatctcatcactttcaggaccatccttgccacttgtctcaggcatcatgtacctggaagctgaaaagcaatgtacagaacctttgaattggagagatatcaatttgaacccagatcctgctacttcctacattgtgaaagggatcaagtttctttagttctctaaagcaaaggtttttcatctataaaaggaggttaataaaagggaatacttatcatgttgaattaatgggaatattaaatgagtttatgtggtttaattgcctagcacagtatctgcctcctaagatatgtttaataaatgctaactgtgactatagagatttaccctgaagatacctgtcatgtcatgccttctctgtcaaatagatcatgaatgcagttcctagcctctctctcctgttataccctcctagcaatattctgatgcagatgaacccagccacttgtcttttgcttgccagaacagctgaatgttgctgggaaaaaaaaaaacaaaacacagccgggcataatcatatcattataagttgtgaccagccttgacctgcgccttgaccccacccacagcctacattcttacaccctgctctcaactgtttcagacattctctactgtgacttctatctcccttccccactccttccttctcaagggatgccctggcctcattcttcatagtgaaaatgaaagctgccagaagaaactctttcagcttctgctctcaaatctgtgcccatcctttctgtcccttagtgcctatcagattatcagttgccaattggtctccatgtatctctggtccctttttcccctgtcttctgagtgccctggctccatggatcatccattctttatcctacccaatgggattcttctcgtcaacatccatttgtgccccagcttggcccatattttccctccattgactccacagctctctgtagctattgctttatcccttccttcacagccaaactctggaaagttggatattagaaatgctgtctccacactattcacaatagcaaagacatggaatcaacttaaatgcccatcagcgacagactggataaagaaaatgtggtacatataccccacagaatactaagcagccataaaaaagaatgagatcatgtattttgcaggaacatggatggagctagaggccattatccttagcaaagtaatgcaggaatagaaaaactaatgctgcttgttctcatttataagtgagagctgaatgatgagaacacgtggacacaaataaggaaacaacaagcactgggatctacttgagggtggagggggagaggagggagaggaatgaagatagctgttgggtactgggcttcatacctgagtggtgaaataatctgtacaacaaacccccatgacatgagtttgcctatgtgactaaaccttcacatatacccctgaacctaaaataaaagttttttttaaaaaaagaaaaaaaaatcctgcctccatttttctatcaagtattctgcctgctaccaggcccctatcccttcatagactagctgaggacatcagggacttccatgttgccaaaaccgtgagtctaatcagtgtttacctaacttgatatctcattcttacaaaactgtccctcccaacttccttggcaccccagcctcccgattttgtttttaatttttcaataggttattgggggcacaggtggtgtttggttacatgagtaagttcttagtggtgatttgtgagattttcgtgcacccatcacccaagcagtatatactgcaccatatttgtaatcttttatccctcgtcccccttccacgcttccccccaaatccccaaagtccgtcgtatcattcttatgcttttgcgtcctcgtggcttagctcccacatatcagtgagaaaatatgatatttggttttccattcctgagttacttcacttagaataataatttccaatttcatccaggtcactgtgaatgccattatttcattcatttttatggctgaatagtattccatcatatatatatattccatcatatatatatattccatcatatatatatattccatcatatatatatattccatcatatatatatattccatcatatatatatattccatcatatatatatattccatcatatatatatattccatcatatatatatattccatcatatatatatattccatcatatatatatattccatcatatatatattccatcatatatatatattccatcatatatatatattccatcatatatatatattccatcatatatatattccatcatatatatattccatcatatatatatattccatcatatatatatattccatcatatatatatattccatcatatatatatattccatcatatatatattccatcatatatatatattccatcatatatatatattccatcatatatatatatttccatcatatatatattccatcatatatatattccatcatatatatatattccatcatatatatatattccatcatatatatatattccatcatatatatatattccatcatatatatatattccatcatatatatatattccatcatatatatatattccatcatatatatatattccatcatatatatatattccatcatatatatatattccatcatatatatatattccatcatatatatatattccatcatatatatatattccatcatatatatatattccatcatatatatattccatcatcatatatatattccatcatatatatatattccatcatatatatatattccatcatatatatatattccatcatatatatatattccatcatatatatatattccatcatatatatatattccatcatatatatatattccatcatatatatatattccatcatatatatatattccatcatatatatattccatcatatatatatattccatcatatatatatattccatcatatatatatattccatcatatatatattccatcatatatatatattccatcatatatatatattccatcatatatatatattccatcatatatatatattccatcatatatatatattccatcatatatatatattccatcatatatatatattccatcatatatatattccatcatatatatatattccatcatatatatatattccatcatatatatatattcatcatatatatatattccatcatatatatatatatatatattccatcatatatatatatacacacacacacacacacacacacacatacccacacatcccagtttctttatccacttgttgattgatgggcatttgggttggttccatgattttgcaattgcgaattgtgctgctataaacatgcttgtgcaagtatctttttcgtatgacttcttttcctctgggtagatacccagtagtgggattgctggattaaatggtggttctacttttagttcattaaggaatctccacattgtttccataggaccagcctgctgattttctctttacctatgtctcagttacctttgctgttttgtattctccctgactcctaagttgtccagtctctctgggatcattttctttctcaattttctctttagtcaccctcatatcctcccaagcttttagatatcatcagtatgctgacatgtctcaaataggtaccatgatggttttgttactattttttatcttagccattctgataggtgtgtagtaattatctcattatagtttgacttgcttttctcaaagtgctaatgatattaaacatcagtgcaggctgggcccggtggctcatgcttgtaatcctagcactttgggaggctgaggcgggtggatcacttgaggtcaggagttcgaaaccagtgtggccaacatgctgaaaccctgtctctactaaaaatacaaaaaaaattacccgggcatggtggcgggtgcctataatcccaactacttgggaggctgaggcaggagcattgtttgaacctgggaggcagaggttgcagtgagccaagagcatgccactgcactccagcctgggcaacagcgtgagactccgtctcaaaaaaaaaaaaaaaaaaaaaaaaaaaaaccaaccatcagtgcagaagaggatgtggagtggagagactgcatcaattatattttgctgatgagaatataagatggaacaaccattctagagaaagttttgggaatttcttcttttaaaactaatcctgcaactaccatgtgacccagcagttgcactcctgggcatttatcccagggaaatgaagacttgtatatcccagggaaatgaacaaatcaaatatttgttcatagcagctatatttgtaagattcccaacctggaaaaaacccagatgtctttcaacaggtgaatggttaaacggtggcacattcttaccctggaatacgatttagcaataaaaggaaggagttgttgatatatgcaacaccttgggtgaatctcaaaagaattatactgagtgggaagggccaacccccaaaggctgcatactgtatgattctatatataacattcttgaaataacactatataaatggagaacagattagtgtttgtcaggagttagggatgggagacaagaagtcagggattaggaattgggggtttggggtagctgtggttataaaaggacaatagaagggatcattgtggtgatggaactgctctgtatctttgccatggtggcagatacattaatctatacaggcagtgcaattacataaatcaaatacacacacacctgcatgaacttacacatatatacagacaagtggagaaatctgaataagattgatagactgtatcaatctcatattctggctgtaatattgtaccatagttttacaaggtattattgttgggggaaactggataaagggtacttagatctctacgttatttctttcaacttcatatgaatctacaattataagaaaatttaaagtttaatttatagaaaaggcaattttagatttgaaataaaattcctacattaactgaaaaattaattaaatataaatttaaaatcaaaattaaaaaccctttgacaactttagatctctctctcttacacacacacgcacacacacacatacatctaagctttattgtctttgctctactaacagttcagctccctgtaattcagtttctatccccacctctccacttacaccacacttctgaacatcaccagtgacctctttgatgtttaatacacttaagactcttcagtccttatcattcttgagctcttgcagcatttaaagatgttgactctatctttgtttcatttgacttctatagcaccgtacactctgggttttcttcctatcgctgtacacaactttctaccgtttttaatagatttcctctcttcattccttaaattctccatttttcttgagttctgccctaatctcccttcttgtctcaatctgtactcctgagttatttcatctgcttccgtgagtacaaatatcatctgtgtgctgagaactctctggccaaaatctgcagctggatctctctgtaagctccagatatgtatctatcattttagcctgcagtcttcatagattggcccataggcccacaaatgcaacagtttcagacagaacccaaggtgttcccttttaaacctgctcctctctgtgttccttttccatgaatggcattaccttgttgctccaaccaaaggcacaggagctggcctgtatccttcctcttccttcagtatcccctcttatccacttattaaccaatttctgacataatactttggcttcctttatatcttctttcatttatgagacaagttccttcagtgttttctagtgacttttcattacttggaagagacagttcatactcctcacactaccatgtaaagagctcatagccacatgcacacacatgcacatccacttgtgcacacatacctaaacacacacccaaaacagagagattgtctcatgcctgtggctgggtaaacacttgtccttgatggaatgtgtagctttcccatctccatcccaatcacctagccaaaaactctcctccttcaggcctccatttagacatcacttttccctcaagtatgtgtgattcttgtgccttatcctccccatcatcctgtaatagcatcctctgcttttcctcatcatagcatttagaagactgtatttaaattacctatttgacacatacctcagtagctatacattttccctaaggggagggttgatgtcttgtttctcattgcatcctgcagtaagcaccgagtaagtgtttcttgactctggggctgtactgagttgaagaaggatgacatcactgactacagaaccctttgtataagcatcaaaggggtagcagtggggtaaatgatcacatcctggctaaatggttccgattcctacaaccctgcagcacgcccccccggctctaaaccttttagtcatttcctgtgaatcttgccagcactcatttcattttttgttttttccattttcttcatctttcccacatagtatagaccagaatgaatcaaggtctaacttatgctgactgtccgtgttgcatcatcagtctttggggccccttctcagtttctgtggctgctcttgtgcctgctgactccatccctgtagaccttgctgttcctcccagtctgtggccactaacctcagttatttttactgaatgtgttacctcatccatagtgagtcttttgttgttgttgggttttttttttagcaacaatgtattttttaattaaggtatgtacattgttattttagacataatgctattgcacacttaatagactaccatatagtgtaaacataacctttactgcactgggaaaccaaaaaaataagtgtgacacactttattcaatagtcactttattgcaatgttctggaaccctttttgttgttgttgttgttgaacggttattataacatgtctgatttagaggaaagtacactgaactgaaaatcaggaaagctgggcccagggggctggccttgagcagctgactaagcctgtacatttaattcaaaaagagctactcaggttattcccttaatcggtcttatactttatgacagtaagcacttacctcgttctgtcacatggtgtggccagattatgcatgtactatgattcaaaacattcacgtaaataaatcttcctaacatacaagaattatgtgtctgtggtgctttccagcttttgatgtgcttgcaaacccattttctcatttaatcctcacaaagttggaaaccagctcacttacttattcatgtttacaggaataatcaacattgatgccaataattttgattatatattttaaaaatctcatgaaattggttttaaaagaatcatttattagacaaaaagagtgaacctatcaacaggcaattcacagaagagaaaataaaaataacaaatgaaccaatgaaatgatgttcaaattatttaaagaaatacagtttaaaatattattttttcattctcagaccagccggcatttataagttcaatgcttggtattggcaaaagtatgggaagcatgtactcacatgggcttgtgataggagtacaaattaatacaaccttttcgaaacaaaatttagcactatctttcaaaattttaggtgtgcactatttttgaccctgcaactcgatttcagacagtaggcgtatttgcataaaggcacagtggtattctgtttcagaatacacattgcaacatttttatgatagaataaaaggactagtaaaataaagtacagcaactgcatgcaataataacatggaggctatcagaaaaataagacaaatctatatatgctaattaaagacaccttaaaaactattttaggaaaaaacaaggtacaaaataggacataaaggatctgatttgtgtttgaagaaaaatttcaaacatgagtgtttatatgtgaatgtgtgtgtggtgtgtgcgtgtgtgtgtgtgtacatgcttatacaggcatgtataagcaatctgatacatgcctgtataagtattacccaatcttttagtgattatctctggaaaagagttttacttttcattctctacccttctatgacagttgaatttttgaatttttaaatgaataaatgtgtgtgtgttgtgtatttttaaagttaacatacagactgagcgcagtggctcacgcctgtaatcctagaactttgggaggcgaatcacctgaggtcaggagttcaagactagcctggccaacatggtgaaacccttgtctctactaaaaatacaaaaattagtcgggtgtggtggcgggcacctgtaatcccagctactcgggaggctgaggcaggagagtcgcttgaaccaggaggtggaggttgcagtgagccaagatcatgccactgcactccagcctgggcgacagagtgagactctgtctccaaaaaaaaaaaatgttagcatatagcgtagaattcagcttttcttattctaggtagcgatggtgcttttcactgctttgcccaacttaattgacccaagtagaaaagtcttcaaaaaaaaaaaaacgctttagaaaaacactttagacactttagatttatgtgacttcaaaagtcaaaaatggtaataatcctgcttaggcagaagccttgccctcagtcccaaaacatgatggacaagcgggtgacttacctgtggcttttcttgtatcttgcagtctgtcagcaatcatgaaatgtaggcctcagagtggaagggcccctagagaccatccattgcctctcaggagcatggtcattctgcagatcaaggtcctgctctgggagaaatgggtgcacactcactctgcgttctgtccagcccttctgccacctacatttctatgcttttctcttactgctaaatagcttcctaaaggaaaagtgaatggtctttgtgaattcaaacctcattctgttgcttccctatttaaaactcttcaatgagtccctcttcccaatgctctgtctctagttgttctgtatataaaagctaaacttcttcacatgtttctgtttctcttgtttatgcgatcgtttgtcattggccttgtgttggtgatgtatgttctgaatgaataggctccagcaattaagtgactgagatgaaatgcttttgtatctctctagcctcatttcttttttttttttaccactgtgatgcaaacacatggaactactgttctccattgcaccatgattagtctatccgtagtcttttgtgtgtgatctttctgtacctagaacactcgtcttgggcttttgcctggccagtacattgccatccttcaggtctcagctgatttttcacttcttccatggagccccctctgacttcacaagattgcgttgtcctgctcatatgtcctgctcagagcatgctgcatgtctcacttcatagcacctgttatttttttagtatagattttggttttgtttgcctgcaccccattccttgaggacagggaaagtttctgtccccctgttgtgttgaggacactattaagttccctgccattacctggtgcttaacacatagtagatgctctattagtgttggaatggatgagctctagtgagtaagcgcctaagacaacacagaccctaaggtcttctgaacccaaccaagtgccctgtttttgctgctataccaggctgtccttcttcccactgccatcctcctggttctgttctctcagcccaagcaccgtgtgtagcctaatcatgtatatctattctcagagtttgtaggacaggatacgagttaacaacttaacgcccttcaagattttgtgtaacagggaaaggagagaacacctggaatggttcccgcttggagaaacgtttttcatccttcttagtttcagctccaatcagatggattcagcctgtgacagtcaacatttacagcccttgggagcagctccatactcacctcctttgcctgcttaccgcaagctcactgcctcctcctcagattgtgccagacataccaggtttgctgccggtgagaagcaacaatccaaatcctacctttctgttcaggtcccagtaaaatcttcactggcagcattttagaattgccccttccctcttctctcaaagggctgctgttcagctggcaggaccagcttctctgatgcagtgcagttcagtgcaaaccaacggaaagcccacagtttttttgtttttttggttttttttctaggtgtaaacaaacctggttgattgtgaggcaaagaaaaataacaaaaacaagtgagaatacattagattaatttactctttcttttttcccgctcattcataatgtgattgaaatcagaagtaaagaaagtaaaatcagagtgagttccctctgctcagtcacccaccctgatcacaagacttttggaatactgggaggcactgcatttaagtaagtatcagctgtatggagagtatgaggttaagatgatgctggatttaatttaaagtctcctcactggtttgcgtgaaggaagatttttatcaagcagagtgaaagagacagaatcttgaagcttccgcagaggggaagaagacagggccgtgcactgcgagtcagtatgcctccagtccctctggtgggcaccggtccacatcacaggaagcccagctgtggtggctgtcagtgtcagaggggctggcagacagtagtagaggcccagagaagttactttgtacgtatcagtctagaaggaagagattatgaagattagtcaagcctccctttctcatttatccttttttttttttttttgagatgaagtcttgctttgtctcccagcctggagtgcagtggcacgatctctgttcccgcaacctatgcctcctgagctcaagcgattctcctgcctcagcctcattagtagctgggattataagcacccaccaccacgcccagctaatttttgtatttttagcagagatggcgttttgtcatgttggagagactggtcttgaactcctgacctcaggtgatcctcccacctcagcctcccaaactgctgggattacaagcatgagccaccatgcccggccactttctcattatactgatagcaaaattgagacccacatcagcgatctaacctgtcatttcaatgatgtcctgacataagagtaagcggccagcctgccctttaagtaaagcctactcatatgggagtatatgtgctttattaattagcagaagggtatccaggccttcttggaagctgtcttctctctgtatgggtaaatgggcaacttttctagccttccgtctaattgggtttaatatcagtgaaagaatctttaagaaggtgtgcccttaggtgctagggccagtattgtaggtggcaaccaggtacattagtctctgcccttgtggaactcatattcccatgtttgtaaaggagtctgggcctcttatatgtggtaaatgaagtgactgtctatgtagttgcctttgcaggacacaagtccttgccttagtttccctccagccaggactgccccaccgagactattcatagctccaacttaaggtgctttaataaagggcagaaatcatgacaagaaaggacgcttttcttcaggcaatgaattcagcctgattttagaagctgttttggagaggtctctgtaagcatattacattttattccctgcagtacaatatttatacatggataatttgtattgacagttgatagttacatagaggtatatctcactggttctcaactctagctgcattttagaatcaccaggagaattttctttttcgattctgatgcctaaatctctgccctagaacaataaaatcagaatctctaaaagtgaggcccagacatgggcagttttgttattatttatcattgtttaataataaatattacgtaaaagtcagacttttaatggctcatttgtagggaggagaacttgccatttcccaaagtatcaccagcataaaaggtgaatttgtattttgttctctaagtttctggcatattctgaaactgcaatttaagtgactctcctacctctgtcttactcccaatttatatttagctggattcatattagagggcaagaaggggcaaatagaaaaaaagtgatctttatcaaacccatttccttgtgttagaaaaacgatttgttggaaaaagccatcgaggagatttgagattcagcacaaaaaagaattcgatatcacctaatacaagctgagaagggctacctcagggggtccttgtgcacctcactaaggaaggtctttggcagaggcagagaccatgacaaaggttttttttttctttattggacaagagccagaaaaaaatggccccaagattatgctcagccccgggaacctacagaaaccatggagcagtaggaatgggtagctagccgtgttagaagtaaatttgaggccgggtgcggaggctcatgcctgtaatcccagcactttgggatgccaaggcaggaggatcacgaggtcaggagatcaagaccaacctggccaacacggtgaaaccccgtctctactaaaatacaaaaattagctggacgttgtggtgtgtgcctgtagtcccagctactcaggaggctgaggcaggagaattgcttgaacccgggaggtggaggttgcagtgagctgagatcatgccactgtactgcagcctggcgacagagcaaaactccgtctcaaaaacaaaacaaaaacaaaaacaaaagaagtaaatttgattaatgaaatctacctttatgtttttacccaaagtgttatcaggaaagataacgttaaaaaatacacgtgattttcttaatgtcttagtttgagcaagtaattctaactactctagcaaacacatttttaaatctcagggatttaacacaatgcaagtttatttttgtctgacaaaaatcccccatgtttagccagtgcattccacgtgggattcagagactctgtcttattccatccagtggttccaccagtctctaaagcctagaggtcctatgccagattatgtgaattaaaattagaagagagtattaaggatcttctgggacagtggtgggatggttacagtttccagactcataaatgtaaaacagtgttccttctacaaatattctattggctggggctcattcactttcacacagtaacaaagaatgcttggaaatgtggccacactgtatacccccaaaagaagaggaattagtttggttcaaatttatctagtctctgtcatgctttcatcatcatcatcatcatcgtcatcatcatcgtcatcagctactgtggatcagcatactttcctgcaattttccaaatcgaattttgtggttatatattaacagagtatataaaattcattttccctacataatatgtattttattcctatatgtgttttctgcagtggtctgatttatatcaatgactaacatatagattcgatttgcaccaactagataatttaatctcttactcctccttgttgacagttggtggggtgcgccttatttttgaagaagaaaatgcttatccagttattcagccaatctcagttgacagcctatcacatgtcaggcactggaaattccgtggtgagcaaaaacagacaagtggcctgctttcaggaagtttctattctgttaagggagatggacagagtgttttaaaagaaaggagtattgtcctaagataattaaaacacaggaacctgacttagacagagattaagacaggcattcctaaggaagtgatacttcactgagttatgaggagtgagtaggagtttagacatctccagacagtgcagcacgctgatttgaggaactgaaagaaggccagtgtggtcagagctcagagactgagggagaagcatgatgcaggatgagttttgagagataaaccatgaaggacttaggccttgctaagcattttggcctttttcccaaaagtacaggaaagcctagccattttattattttataccacccatccattacaggcttttcctgaaaggtctttggcaataggggagctatggaagcaacatcatgagtaagtgactgggggaaccttttccctaagtgttgtggttgctagccacacaccatgtattcaacatctctccaactctcctcatcgtttcccagagctgaaagtaagatgagcacgaagaaaccatgtttagttaagaacatgacccgaagagtgaaaggtatttcctgttccaaataggagcccagtctgcattttctactacatgatttagtagaaagacacattggatttgaaccatatttcttctgctagccaattccatcttatctacaactttttgataattattttgagaaatagatctagatcacagccttccaattcctaggccaggatactttccatttttctacacagaccccattgcagtcctcccttcttcacaatcttcaaaatatccttctgattgaaccagatatcttattcttcatcccgtttcctgccccctaaaatgacctatctttcccttctaaaacttccactaactttaaaattggagctcaaggcttccatctccacagactctgccctgacaacaaattggttggttttattttcttcccaatgaatagaatagccgttagagggaattgtcttcagctcttttcccctcctcctcctcctcctcctcctcttcctcttcctccttcttgcaaatacaaacacagcagggctctatgcagctggttactctaggctctggtaacctaacatagcaggggaggacagaagtcaatagcgtgagaagtctgtttttgtcacggatttgctagaagctattaaagtgttcttcctaagtctgttacttcataggttgagggaagtaatgcatcccacacaagaggactgggatatgtttaaagtagtaggaaggcatttgccactattctagtccatcctgcccatgctgcctaatgtttgttcctacagatcaaaatctcataatcttctagacttctagatacagaagagttggagagatcaaagccttgcctctgacccagattattcgatctcatctggcatatcctacactctagccatcctgacctgccgtgtgttcccctaaagctcccatccttttctgactttgcttttcctcattctgtcccctgcattgaaatgcctttcccacatctctatgtctaaatcttacatggccaattccaacgtaatctaatctctgaagattccctttgctccccagttagaagtagtcactccctgctctgctcactttttgacatatattaatttatatagctatgcatttatatgtgtatgtattatattccttacaagagaagcttttgagagaagggcctataacttttctttctatttgtgtttcccaaagctccttctggtgggaaaaatgctttgaggttgaattaagctcacattgaactctatgatgaaaccatttgcttatgaacttggacaagtttctttacaactctgaaccttctgaattttccaccaggagaatgggaatgaataagtaagaaaacttataagacagctcctggtgtagggcctgactcatgtcaggttcccaggaaggccactttatatccttcatacatttgtatgtctgtgttgacattgaatgtttgcatgacatataaaatataagtagtaatgacaaatttaatagtgaatacttacagtagtgcatttcatcctatgaaacgggcaatctggcccattctatataataggggagaaaatagaaacttagatttactaattagttcaagttggcacagatataaggggatctcagacttcaactcaggcagtcaggcagggcctatactcttgatattcctttcttgatactttctcagtatcaaattaccacataatagacaatgccactcataaatctagcccactctaggaacataataaggcctgttgagacattcagagatgtctccctgatcttcaaagatgaatttttattcttccctaagctgctgtctcttcagtctcaacatcctaagttcattttatctttcctcacaggtcaggttttcagctctaactgtgttcatcctggtggctctgccctggacatactgcagttcttttatgtacctcttatcgtatggggtacaatggctttcggtactgctcagtgaggggagagaaatagatagtgtagtttctgatgtcaaggaacactttagagagaccttaattaatgtagccatatgttgacttcctggagcactcataacaacatgggaagcccacgctgggaagatgctgagtaggaataagagaacaatgctaagagaagggaaatttcaccgtctgtgaagcgtctgtttagattttatgtttaaactttatgaactctgtcacttgctggtgaattttcttgctcagtatcttaaaatacagctgcagtgtgggttccaccctcttcacttaaaagggtgattaactgtttgtgatgaataattatttaattgccagttcagctacatgtgtgtagttgttttgcttctttcctcttcagtgtgagccaaatcttctcaataataaaaataatccagaattagtcaactgccttttatcatgttctcattcagcctgctggagcaagaacattccaattctacatcacctttagcttaaaaagtaaataaatagaagctctcactcagccagttgatagttttactctcacagcctctcctgtaactaataaagtcttgacttcatcttgaaccttttactctatctttggataaaaatttaatcagaaagaattattgctcttttaatacctgtttaacctttacattcgcgatgggtacaaaaccacttaagatttaaagctctcttgttatggacttgtatgctgacctacttttcctcagagatattttttgcaagaattgttgaagcttgacatggggatcactgcaaatgtctcagctttgccattcactgctttccattcctatgtcctccttgccctgttaattattttaacagagacttgctattttaaggaagctctttatcgttactaaatctttttttattgttaaactcctttttctttccagcatagaagtatgtcatgttttctgtcttcagaatgtgcaagtgcttaccttctcataaagtgtgcctgttaccttaattttatagtctttatcacaaaaaggtacgtaagtggggttcagaatagtgtcttgcacttaaggtttaacttaggttttagtttcttcatgcaagcaacttgcatatgtagagaggcagcatgctatatagtgcaatgttcttcttggtttttaattataaaagtgatttcttttctagtaaaaaatcaagttatgcacaaatatatagagtgaaagtgttttcaactcctctctctagaggaagccactagcagttggcatatttccttccagaatttgttgtgtattataaacctatatacgtgcgtatgtatacacacacagtagtacacacattgttctgcaccttgcttctttgttttccctaagaatgtatgcttgatatatttctaaaaataataatgtatatgggtctaagtatttttagtgatatagaattctataggatacatgaaccgtaactcccttagtcatttctctactgattagtatttaacattgtttcttttttttttttttttgccattaaaagcaaatatctttgtgcaattatcttcatgaaatgttgaagctttctttttttttttttttttgagatggagtctcgctctgtcgctcaggctggggtgcagtggcgcgatctcagctcactgcaagctccacctcccaggttcacgccattctcctgcctcagcctcccgagtagctgggactacaggtgtctgccaccacgcccggctaattttttgtatttttagtagaggtggggtttcatcgtgttagccaggatggtctccatctcctgacctcgtgatccgcccaccttggcctcccaaagtgctgggattacaggcgtgagccaccacacccggccaaaactttctgcaggatatatttttaaaatgggttttccaagtcaaaagtgtatgtatgtttccattttgatacctactgaaatagctctccaaaagtgaaaccaaatttattcttttcaatggtatgtaagaatgcctgattccccatactctcattaaccttgagcatgttccatcttttaaatttttgccaagaagattgtctaaaaatggaatctcattgtttgtatttgcatttttatgatttttggtggatttagcatcattttctatgcttagtaactgcttgcctattcatatcctttatccaggttttttgttttgttttgtttctttttggtttggttattcatgttttccttattagtgtattggtagttatatgagttttaaccctttgtcagtggctaatttggaactcctccacagatccctgggggtttcttagagcagctgactggctggcagagctctccatggccttacctccccttcctcttctccgaactcacacacacactgatcgaacagaatagaccaattattacctgcatttcatgttgggctttgtgcttgagattaaacaaaggttcccggggctaaacgtctaaaaaacattgccatggaatgaagagccctagattttgtcataaagtcatctgtcctaggctctacaatgtagcattttcaaattggaagagccttcagagattattttattaccaacacccatgtaatataaattatacagttaatatatgttgatatacatgcaatactgaagaaatctctaatgcattctatattctgtaacagtaatatgtattttattatttataatagcttcaacatatattgaaaactagaggcacatacgtctataaacagtgctcagggcgtattattttggtgtttatttatttattaggtatttattattttatttagtccatagatgatgcatttatctgagaactcctctgactcaaggcccagcaagaatctgctgcccacagttatgagtagctgaactgggccaagcttttaattctataaatagcgaatctatgtagacactcagctagttagtaccagagtggtacccagatccgtgatgtcttgactcttagtacagtgcacttttccccactttgccattctttgctggtgaccttgggtagatcttcttaactgctcagagcttcagttcttctctcttttaatgagagtaataatgcatgcattgatatcctgactaggatggagttggataaagactgttcttaccttttgtgaatagcatagtatcttacagaattgtgaggaattatccaagtagctattgcccctcatcatggtgttaaaagtaggattgctagtttgaacggtaactgcaggaattcaatgtgttttgattttagcatattcccgtatcatgtagaccagtgttaatatttttagtattttatcttagttcttttttttctgaaagtcttgatttttcccagttttattttttagatttgaaagaaaaagaaaaaggatgtaactatgactcttatgttttcaatctctctgaaatataacaaagtaataactctaaatggtcaacgtagtagtctgagggcattctcttgaatgcttagttctgtgttacttaggatccattcatagagcatattatttatattatgtgaggtttaactcttcattataactcatggaatcaatgatagaaatgcaggttatttatactgtcagtcccaagtatgtaatattaaaccaccaaaattcagtttaagaaacttgcaataagctaccacttggctcaaagcaaggaattaggatggtcaggttgaactttctttatatataaagaactgagtctctgaaaaaggaaaaagacttttaaatgacatccagtgaatgtctttttaaaaaataatagctttaatggctgggcacggtggctcacgcctgtaatcccaggacttcgtgaggccgaggtgggtggatcacctgaggtcaggtgttctagaccagcctggccaacatggtgaaaccccgtcactactaaaaatacaaaaattagctgggtgtggtggcaggtgcctgtaatctcatctactcaggggggctgaggcaggagaatcacttgaacccgggaggtggaagttgcagtgagctgagattgcaccaccgcactccaacctggggaacaagagcgagactttgtctcaaaagaaaaaaaaaagctttaaaatatatattgcatatggataaatttacatatcataaaagtatacttggctaagttctcaaaagtaaacacacttttataatccccaccctaaaaaagaaggaacattagcagttaattacttcagaagttttcttcatgacaacctggttgtatgcctttcttttttcctaaaagtgatcactatcctgacttataataatactatatattagattaaaatacttttgttgtatatgctttttttttttttttttgagacagggtctcactctattattcaggctagagtgtagtggcacaatctcagctcattccaacctccgcctccagggttcaagcaaatcttgtgcttcaaccacacaagtagctgggattacaggcttgcaccaccacagagagcaatttttaaaattttgactagagatggagttttgccctgttggccaggctggtcttgaactcctggcctcatgtgatccacctgccttggctaggattacaggcattagccactatgctcaacttgttgtatatgcttttatgcagttttcttttgttctgttatgttcatgaggttcttctaacattttaaatatggccatagtttatcttcttctagaagctttaataattttaggtgttacttttaggtgttttattgttttgagttaatttttatataaggtgatcaaattttgagtaaaggtatttttccccccatagggatgtccaattgttccagcaccatttgttgtaatttaattaatcttatgcagattgtaaatcagatgcatgttacagaccatataaaccatagatgggtctatttctggattctctattctgttccatcagtctgttaatatatgtctgtccattctccagttcacacactgtgtgggcaattatcattttgcagcaaatctagaaatcaggtagtacggtttgttctgctctttcaaaattgtttggctgttctagttagttcacctttgcatataaattttaaaattcgtttgtcagtttttacaaaaatccttctggggttttgattagaattgttgaatgtaggtgtaaatctagggagaaattacatcttaacaataattatgtcttccagttcatgaatatacatgtctgtatttatttagattgttaatttctttaattattgttttatatttttcagcgtaggaatattgtacatatttcctaaggtttataatgaagtattccatgttttggggtgcttttacaaatggtgatttaaaaatatgcaatttcaagtattcattgctactgtatagataagattgatctttgtatattgcccatgtgtgctgtaactttgctaaaattatttattctagtagctttttttttattcggggggaggtttaatgaaaaaaattatgttttcaatgtagtgcatctttatatatatatatatatatatatatatatatatatatataaaatggaatacaattcagccataaaaaagaatggaatcatgtcttttgcagcaacatggatagaactaggggtcgttatcctaaatgaaataaattagaaatagaaagccaaatactgcatgtggtcacttataaattggagctaaacaatggaaacatatggacatacagaatgaaataaaggtgggaggatgatgagggttgaaaaaatacctattggatacagtccagtactcactcttcggtttatgggtgcactaaaagcccaaatttcaccactacacaatatatgcatgtgagaaatctgcacttgtacccccaaatatataaacattttaaaagatttaaattacattttctgtgagtagaaacagtttcatttcattatttgaagtcatgccttttctgtttcttgcccaattgccctggctagggactttcagttagttgttgaatggaagtggtgaacatgaacatttttgcgctgttcccaatattaagagaaaacattgagtcttttgccattaagtgtaatgttagaagtaaggttattgaacatgctctttattaagctgagcaagtttccttcttttcattagttttctgggaggtttaatcatgaaagtgtgttgaattttgtcaattgcctttagacataagttggtatgataataagacttttgttctacagctggttcatatggtaggtaacactggttaatttttaaatgttgtatcagccttgcattcccaagataaaccccacttggttgtgttgtactactccttttgtgtgttattggatttaatttgccagtagtttgttgaggatttttgcatttgtgtcatgaggtatactaaactgtggttttcttttttggtaatatatttgactagatttgttatcagtgcagtgctggcctcataaaaggaattgatgagttccttcctctcttatattctggaagaatttgtatggaattggtattattatttaaatgtttggtacagtttgccagtgaagccatctggacctggaattttctttgttagaaggctttaatctacaaattttattcttgttaattgacagtttgcatctcttagaaaattggtccatttaatctcattttaatgtctgtaagtactgtggtattgtttccctctcattcatgatatttataattaatgtcttatttcttttttttcttcttggtaagtctgaatagagtttgttgtgatttttttttcacaaaagaattagcttttggtttcactgagattttctctattggttttctgctctcaattatattgacttctgctctttattattttactacttttgcttggcttgggttaagtttgctcttctctttctatttccctaaagttaaagattcagttgttgagttgagatcttttgtttttttctaatatgaacatccaatttcaaagtactgcttaagttgcattctacaaattttgatatattgtgttttcattttcattcaagatattttctaatgtatctagtaatttttttgacgcatggtttatttagaaatgtgttatttaatttttaaatatttggatattttttctaggcctttctgttattgtcttttagtttatttccttgtgatctgtgaacatgttttgtgtaacttaaattcatctaaatttgttgaggtttgttttatgtgctagaaatatggtatatcttggttaatgctctgcacatttcaaaaatatgtgtattctgctattattaggtgaagtgttctatagttgtcaattaggttaatttggctaacagtattgtacaagttctctctattcttactgattttctgtcttctttttcagtaaattattagagggatactgaaactttgagcataattgtaggtttgtctatttctcctttcacttgtatggtttttgttttaatgtattttgaagccatactgttaagtgcacatacattaggattgttatatcatcttaaccccatattcaattccttccttattacataatatgattctttaactctgaaaatattcttgttctgaattttagataatattaatttaactttcttttattagtttacaaagtatttttccagccttttgtttttagtctatcaatgtctatataattgaagtagcttgcttttagacagatacgtctttcattttatccaatttgaccatctgtattttaatttgtgtgtttacactatttacatttgatgtgattattgatatagttggattgaaattcacaatcagcttttgttacttttccatctgctatatttttctcttcctgcctttctttgaattaaatgtttttcacaattccatctcatttacactatttgtttattatttatactcttgattttaatgttagtattaccctttgatttgcaatatacacctttaattaactagagtttaccttcaaatactattatatcactgtctgagtagtttcaggaccttacaattgttactctcaatttacttaccatcttttcgtgttcttgttgtcattcattttacttatatatattctataaatacacagcacattgatactaattttgctttagaatgttatcttttagagcaattaaaaataatgagaaagctaattcatttctgctttttcagcactttatttttttgtataaatccacctttgtgtctgataccgtattccttctgcttgaagagctcccttcaatatttcttcaattctgtcctgaaacagtttttaattctccttcatttgaaaactatttttaccaagtagagaattggttggcctttttccttttatcacttttaagatgtcacttcattgttttctcacttgcatagtttctgacaagaagtctgctgtcaatgtctttcttgctttcaatgcagtatgaatttttgttttctgactgatctcaaacttttatcctttgtctcttttctaacagcttgaagctatgtttattagggtttttagttttagttttctggttttagttttagtgtttgtatatatcctgtttgtcagtcccttaatttcttggctcttctatcttcagttggttgtttattctttagaagatagccaatatctcttcaatttttattttgttttggtggtttgttgccttcattcttttatattttctctttggagttctaactacatacaggcttaatatttttctataattctttgatgctctgttctcttacttttcactctttctataaatttctattgacctatctttaagtttactaattctttccccagttgagtctgcttatgagcctattcaaagtattcttcttctctgttactatgattttcatttctagcattttcattttattttcataagacagaatgagaaatattctcatatgacagtctctatatctttgagatcatgcaaattttcttcctttttcactagagccttaaacattaatcatagttattttaaattccctatctgatcaatccaacatctgtcttatttctgagtctatttctgtttgttgctttgtctcttgacagtgtgttgttatttttacttcttggtatgccaggtaagtttttgttaaaagccagacatattatataggataataaagataggctaatatatttcacacctgtaaatgaacatgccttttcttttgttaggcctttagtgtggggtgtttgtgtcaatcttgtcagaagttggccttgatttgaattttttgttgttgttgttgctgtgattccccttagtgcaccacagatttcaaatatctctaatgttactttgtctttgtggtgaggagtggttttccaaaaggactttctcagtatttgctccaccctcagatttagatcttctttttgtgcctgtaccacagagacaacttctttttttgtctgtctcccaaattttgcactgttggtgggaatgtaaattagttttgtggttgaacttgattgctgttactttttacttgatgcttttgaggcagagggacattttctgctgttaccttcagttttagagaggcagtgtggctgtgagtctccgaagcaggctgtttcagtgatcctgcctctccccgggactaaaatcacttcttattcttttcccctacctatgatgagttatcactggtgccctaagagccacaagactcactgttattttcctggggctgaagacctttattccaaagggacaatccgggagaagtatatgggcagggcattaagcctttcccagagctgctgctgttccgctcctgaagcctgcaccacaacagatactttatcagtactcttttttgctttttattttattctattttactttaagttccaggatacatgtgcagaacatgcaggtttgttacacaggtatatgtgtgccctggcggtttgctgcacctatcaacccgttgtctagttttaagccccacatacattagctatttgtcctgatggtctccctccctttgcccccatcccccaacaggctcagatgtatgttgtgcttctccctgtgtccatgtgatctcattgttaaaactcccacttataagtgagaacatgcagtgtttggttttctgttcctgtgttagtttgctgaggatgatggcttccagcttcatccatgtcactgcaaaggacatgacctcattcctttttatggctgcatagtattccatggtgtacatgtaccacattttctttatccagtctattattgatggacatttgggttggttccatgtctttgctattgaaaaatagtgctgcagtaaacatacaggtacatgtgtctttatagtagaatgatttatattcctttggatatatatccagtaatgagattattggatcaaatggtatttctggttctagatccttgaggaatcaccacactgtcttccacaatggctgaactaatttacattcccaacaacagtgtaaaaatgttcctatttctccacagcctggccagcatatattgtttcttgactttttaataatcgccattctgactgtcatgagatggcatctcattgtgattttgatttgcatttatctaatgatcagtgtcattgagctttttttcatgtttgttgactacataaatgtcttcttttgagaagtgtctgttcatatcctttgcccactttttgataaagttgtttggttttttcttataaatttgttaagttcctctagattctggatgttagacgtttgtcagatggatagattgcaaaaattttctccctttctgtaggttgcctgttcactctgatgatagtttattttgctgtggagaagctctttagtttaattagatctcatttgtcaatgttagcttttgttgcagttgcttttggcattttcctcatgaaatctttgcccatgcctatgtcctgaatggtattgtgtaagttttcttctagggcttttatggttttgggttttatatttaagtatttaatccatcttgaattaatttttgtgtaagatgtgaggaaggggtccagtttcagttttctgcatatggctagccagttttcccagcaccatttattaaataaggaaccctttccccattgcttgtttttgtcaggtttgttgaagatcagatggttgtagatgtgtggtgtaaattctgaggtctctgctctgttccattggtctatcagtactcttattctgcctcaggtctttcgtgtgagcatctgctgagatctgaggaaaagagtataaattaaattccgcttctatctgcactgcccaaagattctgtgttttaatactaccctacaactagtctcttgcaactggttaataactgtagttttttttttctgttaccaatagtatggcattcagaggccttaaggcagtaaggcatctgccttagtgttctgcaagtgttcacatcctgtctctcctcagaggcatctatctttccttagatttcaggttacagtagtttccccaactcccacttatcagtagttttgccttctgcagtctcagttacccatggtcaaccacagtccaaaaataggtgactacattacaatagtcatgtagagactattgtctctctacaaagagagagaaagagagagagagagagagggagaccacatacatgtaacttttattacaggatattgctataattgttctacgttattattagttattgctattaatcttttttgtgtctaatttataaattatactttatcataagtatgtatgtataggaaaaaacagtatgtataggggttaggttgtatccacagtttcagtatctactggtggtcttggaaggtatcttccacggataaaaggacactacggtagttggttgttctgcagcctcagttctctatggattcaaaaccagttttagatttgcacactgtctggcttgttttaaattattgtatgggtgggagtggtgctcctttcattttctccatcttgtacagaagccataattattttcaattctatataatttttgattgaatgaaaaataccataatttttttgttctattagtagacatttgaattatttatggttaggttcatgacaacaaggaatgcttctatgagcacatgtcttttggtgtacatatataaaatatttctcaagggtatagatgtaggaatggaattcattaattgtaggagaatacatacgacacacacacatgtatgagttatagggtatatatatatgtgcatataatgatttcagtaaattattgatataaaaattttcaatgaagtataactcatagaaaagtgtacctatcttaagtggccataggatatcatttagactgtaacataagagaactatagatattcacatccccaagcattaactgagaacctgttatacagtgggcatttaggaaatgaaaagtgaaggaaaagttactgaccttaggggtcttgaaagcgagaaaatgattaagtgctgtatacacacacacacacacacacacacacacacacacgcacacacgctcaaagagtagggagagaaaaattatgattggggaaatcaataaaagcatattggagaagacatcatttgatattaacctttaagtatagcagtgtagatagtgcgtaagaattggattatagaacttagtcattatgttaggaaagaaacctatggccttgttttatagcaattactggggatatccaggtcttttgcactggaagaaataatcttagaaccatttattaaggacagacccttacagatcatggggtccaaaactgtcttggggtcgaaaactttctcatcttatagatgaggaaactgaggcttagggaagggaagggacttgcctggggtaaatttttgctagtaaatgtacttaatgagatctctcagttacactgaaacgtttgagtattggaacattgtgcttttgttgttttctttttctttaaatccttaaaaaagttgtggatacatagtagatgtatatatttatggggtacataagatgttttgatatagacatgcaatgcataataatcacatcacggagaatggggtatccatctcccttcaagcatttgtcctttgtgttgcagatcattagaatattgtcttcatcattcttttattccccaccaaagtttttgtaaggtagtaagaggatctttgtggaaagaattcttattcccttacgttcctcctggtctgttcctaggtcaaggttgagtacgtttatagatattctataaatatattttattttcaacattaagtgtagttcatatagttgatgatctaagcaataagaaataaagtaaaatctggataattttggttactctgcttttcctctgtgtgtttcaactacaaaattcctcactacaatgctccccaattccttttattggtgcttgcagtgccagtgggcaaactgaattcttcatgcaaccaaagaattccaaaaacgtatttcttgcagctagcataaatctccagttccacaatggtagcagtggtggattttacccaatgttttaatgatgaatgtaatcagaacataaaaagatctaaatgcatactttgaaggaatttgcaaaaatgactagaagaactgaaaaaagcacaattcagtttgtttctttagcatctgtgtttatctttccccttctcttgtgcatattgaggatgttttaaagattatatttttaaaaccaaataaatagtttccaaaatgttcactgatggggtaaattagcgttctctttgtagatgtaattattaaataaattcaaaggactaaccctagaatgacatttttccctcattcctgggtaatttttgagatttcccctcatgcccaggagctaattatactctctcactctccctctctctctctctctctctcgctgcagctttctgtatgtgtgtgtgtgtattatatctaagaaattttactccaaacatctaacattctgggtacgggtttgatttggggaaaaaattacacttttttttttatcctttagcttttctccttaaaaagtatcagtgagggcagggaaagggaaggagaatggacccaaactaataaaaggattgatcagtgattatgaacaaaatatagcttctgtatttccactcactcagtatgaagtttgctattattttccccaattcctggagccagttattgcagcaaatttagcatttggagcttatagactcatgctagacagacacatatagaatttacgaatcgaattagaaaaatggtctttgaataatataaattgtactccatgtatatttttatatatgaatgaacctactggactccagtgagattagcaaataccttagctatttcattgcaataaaaaccatttttcagtcactcatgtccctctgggttcttcagtgatattatttgatgtatgctttattctgtgccatttattgtactgagtattttgcatgaatgatcttatgtaatcatcagtaatctgttaaatcagtatcattattattcttgtttcattgatattgaaatataaaagtaggttatcataaattaaaaggctacgggtagtgataaaattttattccaggtagtatctccagaatatgaattcttaatcactactcgtgtttattcattccacatgtcactgaatgcctactatgtctagcaaagttctagattctcttgtagttgcattactcagttattggctagataaccctaaacactgcagaaagctgcactctgcccccttgggattgcctggctccataagattattaccgttgctgagtttggggacccacttgagcaaatctagcatacttaaaaggaagtttttattctggagaagttttgttaacaaaacatctattggctgggcagagtggctcataactgtaatctcagcacttcgggatgccaaagtgggcaaatcacctgaggtcagaagtttgagaccagcctggccaacatggtgaaaccctgtctctactaaaaacacaaaaaaattaggtaggtatggtggtgcacgcctgtaatcccagctattcaggaggctgaggcaggacaatcacttgaaccggggagacagaggttgcagtgagccgagattgtgccactgccctccagcctgggcaacaaagtgagactctatctcaaaacacaaacatacacacatacatacagacccacacacacatacagacacacacacacacgtctatttagcatctgtcccaggcagtgcttctcaatagcatgttaatagatgctaaaggacctttagttaggaggtcaactggtctacctctgtcacttagtagacaagaaggttgccctaaaatatacactaagacagtatgcattacaaaaaagccacaataaggacatagcttaggagaaatgttatgatctctcttcaccagtctccttatatgacactggttcaattcagaagtagaggtgaagatagttaatatcctaggaataaatgttaaatctcccttcccctttcctcacagtattatagtcaattctcataaggaaatggccctaagttacaacattaagcttttctattcacttctaataactgaaattccgcccaactgcctcctcacttgaattccatgtactttttttccaaataaattaaatgactttctctaagtcaaatgctattaaaattcttgttgttcctcaaactctgctttcttgtagtatcaggtttattgtgacttgaatgagacttatttgtaaatggatgtattttccattccatcttgctcttgcatacacacacatacactgaaattcagacttttctgctagctcttagaaaacaaaagcaatgtgtgattcatgtgtcacccactgtgggaagttggatgttgcattgcatttgtctctcagtcttaaaagtcaatatggcaaagtcattagcggcagagcccagaagatatccctgcccatgagctgtggagatctggacaagttactttacccaactccaagactcagtgaatgctcttatccgtaaaatggggacaatgataatatgtcttcctccctttgggtatttgatgattaaatgagaaaacacgtcacacagtcaattcagtgcttcgcgcacaataaaagcttaataaatactagttatgattatgtttagccaacatgtgttggcatctgacactaaataaatacttgtccaatggaaatgaccagaatttagtgcccctaacacttcactgtagtatttgccatatggataagcaatctttattatgctatttggatttagttccaaagctaaccccacctccttatattgaagccagctcctaggccacctggataacttttctggcatttcaatgaacacaccaatacaatacaagcataattagactttctggattttagatctattctcaagtatatattgtatagagaaccaagatgttcaaggactgtagagccagttataggtttggttttaaagcacttcatcttagactcatttcctttctggctgatgttagttaaaataatataagcctgggcttaagattgtatctctgagtgagacaaaataatagatgattctatctccctttagaaaaaaaagaaaaaaaaaaagcagcagcagcagtaattgactcttacgcttaggcaagaactccacaatggatttgttggggaaaaaaaaaatgttttcctgcttgtatgtgttggtttagattttctgttgtatgtgtgttgtgaaagaagactttggataattattgcgattttccaagcagctggtcttccaatggcattgttacagggtcagtctattttcctttaatctgaccataatgtcatagaacactggctgtttctttggcaactgttcagggaagactagctgttttctctacctcaagccaatggtggactgcaggcaggttctcctgcaagccacagggaagcagttttcattactggggtctttgtatcaacaaatcacttatttcactgtgattctgttgagacaggatccgaaagtaaatttcataagaaaaaaatgattatacatcaagctcaggtgactttaaaatttttcctttacattgagtaaagtttctggccacttttgaccttttttttcaaatgacattattgatatgaaatcagaaactataactgataaactacaaactgctgtatagacacttttctacacaatggtcattgcttttattctttatctaagcctgaattgtaaggcttccttctctttttttttttttttttttttgagatggagtctcgctctgtcgcccaggctggagtgcggtggcacgatcttggctcactccaagctccacctcccgggttcacaccattctcatgcctcagcctcccgagtagctgggactacaggcgcccaccaccatgcccggctaattttttatatttttagtagagacggagtttcaccatgttagccaggatggtcttgatctcctgacctggtgatccacctgccttggcctcccaaagtgctgggattacaggcgtgagccaccatgcccggcctgaatgattccttctcatcttctgggaggtttttctgacttgctttctcaattccactctcttaggcagagcttatacctcccttcatgtatgttacatgtacatgtattgagtcagtgcatcctcctaatgaaacttttcctgagatctctcttatttactttcttccttttctgaaattctctgctatttagattcagtgccaaagaaattgacatttttatttacttgctgaggaataaacagaactcgaaaggatttgggaacccaagaccaagttttatgaaataactaatcttgtcttcctaaatactataaaaatcttatataatccctaatacttagcatagtgctaagcaccgaataggaatacaagaaatattgcaatgatctgaattgcttacaaaatattgacaacaacttcttcattggtaaagaaaagctgcttttgacctttttttcttcctcaagagtaagtagtgagaagcataaagtacccaagagtttctttgcctttttgattgttgcatggaaacaagtatttgcaaataattaagatgggaaaatttggctccttgaaaaggcaggactgctttcagatatatttgaaatgaacttatacagaagccaacatggttatcagagcaattgggtctatttcctatcatctcttcatgatatcttgtaaaaatgccctgtgttgagagcactggtgatcatagcagtggggttggagtagaatctggtgcgtttcttcctctacagatctcctaatagcacttgccctgttttcacagagccttatcaaagtttgatgtagactccagtgtgtagtagtgggcagtgacctaccagatgacctctttgaacaagagctagtttgagccagtgtatagctctgaatcgatggaagatccattttcaaatttcaaaagggctgttaaaacacttagttctgtattatagagatacacaaatggatataacaaactggatgtctcttctgcagctgtttcaattcgtatgccatgttttctatccttcttgctcctggcaattttctttcctgaagcatatcacaccttcttacatttgacaagcattttcacagctactgccactccctgctgccaaacaaaacccagccctgtttgaattcttgagggctgagggatggagaggagacctgtttgactttgaaatggttttaacgtcactttgtatacagaacaaaaatggaaaaccagatcctgtgtttgtctaaaaactaaaatttcaaaacctaacctgaggtggagaaacagatactacagggcaaggaaatgtctgggctcaccgcaaaggaatgcagcaagggaaccacctgcagacacctgtttaagagtttacgtttttgttcttccacacgattattatcttagtatctcaactggctatacatgcttttaggaaagttgcagggatcatattctaaggcgtatcaaatatgttcagagtgcaagcatgagcagaatctctcctctctgctagtgaggtcctgtaggtctacaagttactaacttcaggcttacagaatgttagaagtaacgggtgcatatcctgtaatcaatcccggtattgagcaaacaggcacaaatgacacccagcaagaaaaatgacttgctcaagacaccacagcaagttcatggttttctgaactgaattccaagtttcataacttctaattaatcctcctttttttcccccagtacagctaatatgctttttgtgaataataacatataataggtgtaatctgtcagaactatttaatagttgatagtatgtatcctcagtttattgaggttcaagctcttctgagtattataatactttctattggtattttctctcttgagctattccctaccttgaatctttcagactagagatttcagaagattacgtagtgtctgtgacttcaactacacatggatagtccacaggactctggactttcacggttccatgtcagttggacaggtgttactctaaggccctgcaaaaatataaagtagtttgagaatcactctcctgttaatcttcagtaaaattctgagctatttatatgtgagattgagaggcagcttggtaggatggaaagagtttagactttgtagttctactgccccaggtttgtatcccagctttatttcctaacagtgtagccttgggcaaattgcttaacctctccgaggctcagtttcttcaaataaaaaaatggaataagccttcccttgcagagttgttaatattatatgaacgttatatatgtgaagtgcccaactccttgcaaatacctaatatacaccagcttccttcccaggcttttgctggtcagatctggtttccacttaactttggctgttggaagataagataatttattatgaagataattgtctggtaattgtcatgagaattcagttgatgataattgaatgatttgtttacctttctgtctaaagagttgcaactcatgggggtcgtgtgtgtgtgtgtgtgtgtgtgtgtgtgtgtgtgtgtgtgtgttacttacaatgtttttgccatctcttcctgtatgacagtatttgattagtcaggtcttaaaatgctaaacactttatccttttcttttaatttcaattttagattttgggggtacatatgcaggttcgttacaagattgtattgtgtgatgctgaagtttgggcttctatcgatcccatcatccacactgtgaacataatacctgacaggaagtgtctcagccctttctccccctccttccttccttccttttggattcccaagtgtctgttattcccatctttacatccatgtgtacccaagttttcgctataaagaaaaaaaaaaccctgaatacctattgcatgcctcactgtagaggctacaggattcacaaaacaaggccccataccctgggcattgataaaaggaaggaaaaatgtagctttcaaaaaaatgaaaattgactttgttgaagggtattgtaatagaatcataaaactgagtgaggaaggaatgtattctaactacacaattagggaatactttgtggaggaggtgggttctggattttgaagacggagtatgatctttgacagatggtgttcggtgggaatgaggaaaaagaaaggtgagcttcagccagggattggaggtggaaaaaatgaacacatgggtggcgatgattcaggcagaggggcaggaatgtgaaggaactaagacataaaagtagaaagacagtttaggcctggtttatgagggggtctttgaatggcaaactcacctttggtggtccacgggaaggtttgttagaactgcaggagtgtgcccaaacctatatgtcaagccactaactgccagccatcagtttgaaaaccgaagcaattaagatcgctgtccatcttacctgaaagggaagctttgcactctaacttgaagtagcctagaaatttcagaaggttacatagtgtctgtgacttcagctacacatggataatccacaagactctggacttattttcactgttgtgtaatagggttagttttgtttttagcagattctcccaaggaagtgtggtaatcacatttctcaaaccattacattaactgctgttagcaataaattattgcttatgtgctaaaagtcaaaaaaagcttttcccctttggaacttctttactatactccctgatatgttttgctgtcctagaaactggtgtttgtgtgtgtgtgtttgtgtgtgtatgtgtgtgtgtgtgtgttcaattgagtcaagaacagaggagaggagactcaggctgaaaatgtcaagttattttgagtcaaatatttgtacatttactttggaagttatcactaaaaaacaaaaagtgtgtgtctctttgtgtctgtatctgtgtgaatctgtgtgcactcattggtataaaaggaggaatactcttctcaaaagtacacaccaatgttcttgtccaaaagcctactttcatatatgtgaatgtgaattcctacattctgtgtgtttgcttctcctcactatagcccatttctaacatatcccaacttaatttcctaaatctgtcctatctacataccacaaagtgcttaactgagaaattaacttctgtgttacagataaatggaagttagattaaaaggataatacattttcatttttagtgttcttaaataatcctttttattgtaaataaatataacgttaactccgataagtccagactacttcactgagttcaccaccgaaatgttttcacaaaatcagcatcgttataccttggcttttataagaagttagtatacgaaacttgtataggaaaatgtctctgtattatctatgaaactgttaataaatatgttttccatcatgtccatgtcatcgtttacatatacgagatgatttcctcttagaattcattctaaacttctttaacagaaattatctttttttgattcatattctcccttttgtcctggttaccagacagcacaagtgaccatcatgtttagatttctgatacagttctctcttccattcctctctgtagcctctgatttttttttcagacttcagttggaaaaatcctaatgaatgtaacttttagttacaggttgaattcttttgaatgtgtatatttaaaataagtaatgcacatagttaaaaagaaacatgtttttaaaacagtggttctcaattatagctaaatatttagaattatctggatggttttaaaactctgatacccaggcagcatcctagatcactcaaatcagaatatctgggtttggtcacggacatcagtattttttttttaaagctgcccaatgtcattccaatgttaagattcattgttttagatattctttattatgatgttcatcatttttacagaaacacatttccaaaaggataaatttcaaaatcacctgtaaacccataatttattataagtcactcttaacacctaaaaatagctaacctgctaacctttttcttttgctttttccttcttcttttaaactaaaattacaataatatatgtgcatatatagtgaatgtattcatttatatattagacacaatttacatatttatgcttatatatatatggcatacatgtacacgttacaatatgtgtatttgttttattccaaatctgttttattctcagagacattttcccatatcttcccagatatattttctgagaacctggtttttaatgcttgtataacattaatacttgtagttagaccattttttttactcattcttctattcttacatattaatgttgcagacaacatccttaaacaacttttgtgtgactaatccaatttttttccttgggaataaattatgatctattgatttatttctatgtgggctgaattttgtccataagaatgaaaatggtagccccctaagatgctgtttgctccctgatatctcatttttctctagaatacgaaggaatggctgttttctgctcttcctaaagattcaggatgtaataatatactgtcacaggtttcagaagcatgggaccttggcaccgaaagggtctctactagctaagttgtcttggaaatgagtgggtccacttcctcttctgatacaggaagaacagggaggtcattaaatgatgacggggctctttgaagtgaaatgaagcaacattggagggtgtagcatgtaaaaactctcttctcggatacaaaaaaaattgagctacttgggctaggagaagtgagcctggatttggaggcttaaggtttcaggaaggtctgagacaaacttaagaagaaatgcatcaagagggttggaagggacagacgattgatgagagcactgaaattccagtgtgatttgggtcacccgtgtgacatggcatatatttatgggatacctggaaaataagggagaaacaagacatctatctctgtcacactttggggaagtatacgattaagttccacactctgtggtggaaagaatgtcctggaggcccccagtctttctcactgtgatgccatgctcatttgataacctcataaacacatttctgttcttattgccttacccattctgatgcactgatcattttttaggccatgtgaacagggcagagcttgtcattatgcctgggacatagtgggcattcagtaggtgtttgttgaatggaagaagcaggcacaatcacagctttcccttctggtgatctgctttatgatacaatttccaggaatgcattgtgtctaaaattggggaccatatgtacaggaaattctttcttatgtcagtgtgaaatccctccaaagtaaatccccctttatggttttttattggtgtttattcttttttaatacagaaaactgtaaactttttattagggcaggtttttttgtgcaaaagccttgtcatgggctagatgacatttcttttcctgtagagatacttggacattttataattcaattacttccttccaaaagccatatttagaattccagccaatctgtgagccagaaaggagtgagccagtataataatcaaggtaatgtggcaagaaggtgtgaaatttcttagcctttctagaagagatgggtgaaaataaatgttttcagggtcagtaaataactttcccctagtagccagacagaaagcatcttactttgctcaagctggacctttgtcatttgaaggatctcctcctaatgccatctaagcttgagaggttcatatggctgcagcatggtttatcttgctgtttaaacattgtgtccattcaagctccattgtagacctttcttttaaagagagttcaccctgggatattaaataaaatggaatttggatggaaagttggcatcccagttcggaaccaatttttattgggcacagacttggggggagcagaaaaaaacaaacacaaagtctatgttgtaaatgataataaaaaaagaataagtaaaacaaatgaaaatgtttcgttttactaaggcttttttgcattcccatgacttcaaaatacttttgcattttatggcaatctataactgctttagtatagacagacaaagaacaaataaagttacataaatgcagagaataacagaagaaatatgtagaatgacagtggtcagttggtaaagattctattggaggttttggaggtttttgcataatttgtattagtccaaaaatattatgaaattaataataaattttaaagtgtatacgtttcttaatgtcttcaacttgccaattctgttgttagtcataaacttttatattcctccctatgtttatctttcccatctctccggcttgcttttgttattactgttgctgattctcaaaaccattagatcttaagtatattccactaccaaagtcattaattttaaggagaaaatgggaagttagaagccatgattttacttataataatccatttgtctcatactttcatctcaaaaatatgtatttaagtagaaagagagccagaaaaataaccgagagagttatattgtaattctggctctactgtatactagtagtgtgattttaagttggtaatttatcctctgtagcctcagcattgtcttctgaaaagtacgttcactcattcgggtggcgtgagatttaaaagaaatgactcctggtagagtagaatgaagtagaatgtagaatgcggtagcaatagaatgaagacatgagtattgatgatgtagcactggactgtgctatatgatagttaccagccacatgtggcttctttaaatttgagctaattagaattaaattaagttaaaaatttagctccttagtcatacgagccacatttcaaatgctcaagaaccatttatggctagtggctacaatattggacagtgcagaagaactattccattattgcagataatcctgttgaatagcacagacctagaatgacagctccgtgtagggcactgggaattgctgtttggggatggtatcaccttgagttggtctgtgacctgctgggagtaatgcagttctcaaagaactctaactctcctttaaccgcgtgcaaaattgtgaacctgggatgcgtgagggagtggttattttgtgctgaatggtatgtcagctacatcaccacagatgtgagatcagcagacttgcttattctgagtgccgtcagaatcgttaagtaccatatgtccagtgtcatctttggcacatttatctggcttcatctgagttccgaagtgaaatctcacagccgccttcataaatttagccatcaaagaccaaggtgatgatgacataccaagctttagaatcctcaagtagggtgggatattggtgctgggaatgacgaatgaagggacatctgagaatcatgctgcttttatggattagcagaaattcatcttacgtgaccaagagcagctgcataatggctagaaaacatttgccctttctgcttatgttttggttatcccaacacattctatgtgcaatgtctgagtttgaaagttctttttaaactataaaatcatttcccaaagttaggactgattatgaatatcatcaatgattgtttttaaatgtcattatggtaaagtcatagaatagtgaccatctgtgctgcctttgtctttgtataggtgcagtagtcccagcctttctttctctctctctctctctctctctgtgtgtgtgtgtgtgtgtgtgtgtgtgtgtgtgtgtgtgtgtgtgtaggatcactggagtatggtggtgaagaaagctgtcacagcacagaagttcagaaggaggtactgtgaaggtcccaaagcattgagcttagctagttctgaaagcactaaggttaactagtcaactcgagagttgggtgtatatactgctaaggaagggttcaacccagggggctcttgctctcccaagacaggaaacatgtatctgaagtgtgaatctattgctattatcctcagtttggcaggcgacagggttctgagagtgagagagtaatggaatgtgtatgtctctgctcttgaagataccaggggcacctcgaaaactcccctccccagcccagggtcaccacagccttaaccgactgcctcctttgcaaacctttaccatgggtacctagaaaaagacatacacacacacatttcagcttatggtttttgttcgtttgtttttgttttttgtttgtttgtttgttttgccagatacttaagatttaagggcaatcttaagggaaatctcttctcccatcttgactgaggcacagagatgtcctgttcccatgctgttgatgctgacagacgtaggacacgtttttttctccgtgtgccaccacactcaagcagaatgtataagatattttctgtctaccaaggatacctggtgacataatcatacctagcctttctttcctccctccgccccctcagcctctcaccctgccctcccatgggtctttatgtgtgctactctatgtagagtacaactcataccggatagcctgttacttattttggttcaggagcagctgcagaggatgaactggagaggacagtctacttgcaaacacttgtagactctccagtggacaggttacctctaaagaaagagaagcctacgctttcctactcactgaagttttttaccatttgcaagtggatccaatatatgtttgttttgggtgaggggctaacaaaatgctctgcggtttctgcaggtttccttataggagatcctgttatcctcgtgtcgattcttgccccattagctttcagcagtaaatagttgagggtctcatctggaaagttctattattagtaccacatggtcagtacattttaagatagacattttaataggcagaaaactgtatacaaggagagatgtgcaatgcagaataactatcaaatgatatctagatatcttagattgctactctaggccatccatggtcttaccccatgggttcctctaactcccttcatcctcccttaacattagctgtaggttttctcatcactgtctttgctcacgttattttctctgccttgaattccctccctcaagctccccacaccagcaccaccagcatgtaccctgttctttaagactcaactcaaatacctctgcctcaaaaacatattgccctaattgtcctggctgaaagtgacagtcatctctggaccccccccactctcatctctgcacctctctatgtcatccttaatcactttctgacttgtgttcttacatagttgaatatgccttatctctactacttgatattaaacttcataatgatgataagatcctatcttatcttctcctgtctcttccctgatcaggcctagggtagttcctcccacactgtactgttaagagaatacataatgaaaaagtaaatgaataaatggcagaaaccttatgtggaatgctggtgcaaacagttcctttgactgggggcttttaaaaagagactgattgtataggagatctgagcaattttcatattaatggaatggattattagagctggcatgaacatcaaaagaatctagccacaaccacctctcaggtcatcttcattttcaaatggggaatctaagatttagataggaccattccagatcacatagtgagtgattaatagacctaggactcatacctcatctgacatccaacaccacatgttcttttgaaataaggctggaataatagtgagacacacatattagacacatgattgtgagaagacagttttccaccccacagcacatgaccccatacgtttaagtccctgcctatacaaatagtacagacaaagtaacagcaactttagagggaaacatgactatttccatcatatggtgattctacagagcagaatcagaaacctgggtaaagagaaaagtcctactcagtttcattcttgttaaaagacttaatgactggagttcaaactggcggagtcattggcagcattaaagaagtggggttgaagctgggcaacatttccacaacagggagtggaacagagagacagaaaatattgggagtcttgtgccccatcagtagaaggagatgaaggccagagccaaatggtgggggcaggggtagggggaagattcctttctccagcatgtaacagcattatgggagtgaattcagagcttctgtgtgttctgagccaagtgcctgctggaatgtggactgtaaatctctcatcgtcctcttcactgacccacaagcaacccctgctcctcccatctgcttcccgaccacctgcctttcagtttttctttatataaaaaacgttttccattctcctaccttcctctctgtctacctttgtatggtacatctcatccctcttctaaatatttccatctgaccacatttttccctaatgagacaggctcacaataggataaagtgtaacatttattcatttatctgctcagcaaatattattgagcacatactgtgtcctaggcaccactttagttcttgagtggtcagcagtaaagaaaacagacaaaaaaataataccctggtggagtttccattctagtggggacacaataaacaaaataattggcaaattatatagaatattggaaggaagtacatgctgggagagaaataagctgggagggaaaagggagtgctgggggagaaggagctaagagtctcagttccagagttaggcagcctgagctggaattagaaccccagctgcatgcagtggctcatgcctgtaatcccagcactttgggaggccgaggtgggcggatcacctgaggtcaggagtttgagactaccctggccaacatggtgaaacccagtctctactaaaaatacaaaaaaaaaaaaaaattagctgggcatggtggcgggcacctgtaatcctagctacttgggaggctgaggcaggagaattgcttgaactcgggaggtggaggtttcagagagcagagatcacgccattgcactctagcctggcaacaagagcgaaactctgtctcaaaaaaaaaaaaaaaaaaaaaaaaaactcagctgcatccttcccagtcatgtgacctgggcaggttaagagaactccctgagcctcagttttcttgtctgtttatcaagagtcattagggaaactagtatctccttgggttgttgcagggattcaatgagatgacacatgtaacacaatcattacctcgggcctgtctcctataaatatagtgattgtcacgtttgttatttaaacaatattatatattgtgttttaggtattatgtatgtaatatatagtgtgaatatatgtatgcgttatgtatatagcattatctgacttcgtgcctctagtattacatgcttctcaaaatatctatagttttgtcggtatttctttctcctactagattgtgatcttttatcggcaaagaccacctctcatttatctctataccccccattgtgcccagcacatcagagattttatgtttggctgctgaatgagaaacaaatgggatactgttcttctaagcacaatcatcttatattagcattcatttttggaactcttctctaattcctgtcatttttgtatcacatcagaagaagagctatattccctccaccgcctctcctcgcctattaatcaccataccttcccacctcttacgggaataccgaactaatggtccttgtctcaatgacctgcctatcctttgtcccttcatgggaatcttctcacagatcaagttactatgatctacaaggccagttcccatagcctcgttccacttacacacgatcttaaccatttctgtccagtgggagtcacccactcacctcctaaaacctctatgcatgccccatacccctagtcataatactcttatacaaatgtttaacactttgcagttgaagacccaatgtcatacatcttttcatttgatacttagagtcactgtgtgaggtacaaacttcagatattaccagttgcatgttactaataaggaatcagaagctcagagagggggaatgaaagaatccaagtatatgtggctaaaattggccacgtcgacacctgaaatcctattatctggggcaatatacatactgggtttgaaaaagttcacacttagcagttgaatgacctgagtcctcaccccagcttggctacttactcaccatgtgaccctgaatagtgccttgaagcctcagggtttttttacttctgtaaaacagtaactcttgccctcccggacacatgggatagtttgaagattaaaagatacattggctgggcatggtggctcacatctataatcctagcactttgagagactgaggcaggtggatcacttcagtccaggagtttcagaccagcgtggacaacacagtgaagccccatctcattaaaaaaaaaaaaaagatatattaagaaacttttgaaagtataaatcatctaaatcatcatgtataaatgtaagagatatgaaataagctctgtgaaaatataatggctgatggcgtccctgtgtgaaagatagaaatggacattttatgtaatttccatacacaccaaacaaaacaaaagatctttagaatttccaagcatgagtgaggttttacattgattgtaaagaatatagaatgcggaaactcatttttaattattaaaacttataggctgaaaaaaagagtaagcactatttaaaaaaaaaaaaaaaaggctcaaccaggcgcggtggctctgtaatcccagccctttgggaggctgaggcgggcagatcacgaggtcaggagatcaagaccatcctggctaacacggtgaaacctcgtctctactaaaaaagtacaaaaaattagccaggtgtggtggcacgtgactgtagtcccagttactcggaggctgaggcaggagaatcgcttgaacctgggaggcagaggttgcagtgagccaagattgcaccactgcactccagcctgggcaacagagtgaaactccgtctcaaaaaacaaaaaaaaaaatgcttccccacacccacccccaacgaacgaacaaacacacttaggaaatagggaagaaggttatgttttgggacaactttctatacactgagaaaatccaagaggtctccacatctacctataaaattcagtgatgctcagagctgacatgtcaatttttcctattacatagtaagaagctcagcattatgggccgagtttattggacactgcagaaattcatttacattgtgtgcttaccctggattgttgttgagtccagctgactgttgcttcacaaattaactgtcctttgagacttggaaatattgaaattgcatagagtttttgtgaaatctcaatcctgtagtattgtgtatattacaacaggtgctcaatagacttctggattattaaattgagtaatatttgtagcaaagatctgtaggctgaattataaagctaatctgtggggggatgccaagatttctctatcattctgctatgtttgccatggtctaccaggagatggcgcctggtaagagttccatattttaatgtattctggtccaaatcactggagttggcaaagatggagaaggaggaactgagcagttcatccccaaagacatgatgacaccactataagtgtgaagccagcaagagtgcaaagactgagagcagcgtggtcatacctagacatttatctggagagcaaaatcaagcactggggctcaaagggttcagtcccagcagttaggagagagaggagtctcctaggagtagttgccccaacagctgctagaaagtcctgatcctttttggtctgagccaaccaggtctcagcccagtcccacttgcctcaatttaaagtgacatttttggtctctagctgggtgcttccccctctgtagcatataacaaggatacactttcaaggcagggagcctggaggacaaggagataaccctgcaggcctggccacccaggctctttccggtgttccatgtacactgcatagattgagtggacacccaggttaaagagatctctcagtactcttggattttcctttaccttaattttgaaattataatattttagacataacttgtgcaggatcacacagtgagtctataggagaactggatgagaacccaagttttctgactttcaatcagctctctctccctacatgtaccttaacatgtatcataaagatgactgttgccatatgggctaagccctccattttctgagtatgctataccacctccttccctcagaacaattaacagaggatctcataaagatgtgctatatatgtgtcccatagattttaatgagacttcagtaggtgggaaggtgtagtatttattctgggatattggaagagcaagttggataggaccttaaattttctacatagatacttgtggaggacaggctctagggtgacttccaatgacccctgcctcctggtgtttacatctctgtgtaatacctctccttgagtgcaggtgaatctgtaacttgcttctaatcaatagaagaaggcaaaggtgttggggtgtaacttaccatgattacatgttgtgatatacgagtccatctcagcagatagagagactctccttgacagcttgaggaaataagtgaccatatgagagaagctcatgaggcaaggagctgtgagcaacctttaggagctaaggacagcttccagcagacagccaacaaaaagctaggatcctgactcacatacccacaaggaaatgaattccgccaataatctgaatgtgcctggaaaagattcttccacagccaaccctccagatgagaatgctactcagctgacactttgattgcagcctgtaagactccgagtggaggacccagccagagtcatgcctgggccctcagaaactgtgagatagtaaatgtttgttgttttatgccactgagattgttagccaacaatcaaaacctaatacaataataccctttactgttttctagacagctgctatttagaaaagcctcccacccaataaaagagtcccctttatagttttccaagtaggtggttatcagggttctgcttcaccatcttcagtggcaaggaacttccatttcacagggcaaccatgtgtgtattacagaggcttgcatgttgtcaagttcagctgtggtcttcagcgggagcctaggacatgccagggatttcaaggtaggctggtgaggggttcctggttttcttggtcctgaaccatcccagtgccattctaacagttgcaagtctgcctccttcatgacaaaaggactggaggaaaatgtatctggcaagtcgataacactggatcgtttgctcccagctttaccacttggcatcagtgcaaactttcacccagttaaataacttaatgagccctgctctgcatgcttgcttcacagagttgtgacgatcaagtaagacagcatctatgacagtgtttgttggctgtaagtcagcaaatgattgcaaatgatgattattattaaaataatagtcatttgtcagtaaatatttgtcaaagctggtccacactgagggagacaggctctccagggaaactgctgatgcagagataaagaggagaccagccccagtttggaattgcatcactgattctgaattccccatggtacatttcaggtcttgcttcaggaatttgttttttgttttgtttggtaggaacaagaatcccctagagccagttatgttgtcatcaaacttagttgctaattaggcaccaaagcaaacctatgccagtgagacagagttgaaacttgaattcctttctgcaggtggagcgttggatcctagaggcggtgtatacagcttggctattttgatgcttctgcatgcaagaaggtttaagagaatctgagtaaagcaattagcatccctctgtctgcaggcaaaactggtttggacatgcttctctcttcttgaagggctgttagagccttggcagtgtatctgacgaaagatttcactaagcaaaatgtcttcacttacaaatccagccactttgcactctcagtcagcctcaaattcatttattttctttagagtttccctacaaccacgaaccaccaagaattaaattaatccccaagagcctgagcaattatgaggatgttgaatctatccattcaaggatgtcccagcaaggactgttcattcttttaacgtaaactatttatatgttttgattctcctcatttggaagaaagaaataagttttcatatatgtatttttcagggtgtattttatatatctgtttatattacactgttcacattactattaaagcatccccattttattgtaagtttattttgcctgcttcgggaagaacaagaccaagatcccattattaaaaccaaaatcttccacaaaagtttccttttaaaaacttagattaggaaattttcagtcagccagccaactctatagcctttgatacttggtcctacaaagttttcttcccctttggtctgaatgttttcctttgtctgtgcacactctattctcctgccagcatgataatacatgctgctttgatatcaagtggcgggaacatatagaaatgtgctattggtgctgcaatttgtatctttgttttcatcaaacttattatttaccattttaggatttttttgtttctttttgggtgtttttttttttttttttttttttggtgtgttttgtttgatcttggttttggttttccaatctaggcctgaggtccagtgctaatttgatgctagtgtgaactctctgagcctggttccttgacgttccattgggtgactattgcagtggttcagatgtggtgctaccagccttccccaccaaggaagttgcctgctttctcatctttgatcctcttcaccaactaaccacaacacaccagtgaaaattttaatttctccattcagttcctcagtttccgccaccaggtggtgagttcctgcgatacagataacctttttgtcttgttcagtacaacctcagtgcctagcacaaggccttgcagaaagctgacattccttaactctttatttctgaaatgaattaatgttcttaggttccatgtctcgtggaccaaataatgcaatcctagatcttgccatagcatctgggacaccacgtatgatgatttaggtaatcagtgaaaatccatgtcagcagctgccaatttacagatgaattatgtccaatggtttggagatgaatgagttttacagttcatagagcatgacaaaattcatcttagccttccattttatagatgagctaactgatctctgagagaggaacgacctctgaatgtcctgggaagagcttgtggcagaagtaacttctacctagtagtgtattttccttactgcctgttctcatttgataacagacccatatatcaattatttgcatccttcaattaacccacaagaaggcaaatttaatccagtgttagataaaataattattcacagggtcataacactattaaagaataagctatggccaggcgcggtggctcactcctgtaatcctagcattttggaggccgaggggggcagatcacttgaggtcaggagttctagactaccctagccaatatggtgaaaactgtctctactaaaaatacaaaaaaaaaaaaaaaaatcagctgggcatggtggcagacgcctgtaatcccagctactcaggagctgtagtcctagcattttgggaggctgaggcgggcggatcacttgactaccctggccaacatggtgaaacctcatcctactaaaaatacaaaaaaaaaaaaaatcagctggtggtggtggcagatgcctgtaatcctagctactcgggaggcggaggcaggagaatcactcgaacccgggaggtggaggttacagtgagccaaaattgcaccattgcactccagcctaggtgacagagtgaggctccatctccaaaaaaaataaaaagaatacactatgaggcagtgagatatagggcaagactcatgttaggactgccacagagcagtcagtagtggcaacaagaaaggaacgcccctacgatgtgacaagtctctaccttgatatcaatggaattatgaatgggcagagaggctgtgcccattcttacctaacagggaagctgtccataaataaggtagcaattcctgaatcaaggacaagccttctgcccagtctttatatgtaaagaaacagtagtttcatttgaagggaaaccattataattgtctcagatgtgcatcttgttccagggtacttctttgtatttttgatgaggaaccaaaggctttattatagatcttgtgaatacctgtcagccaggatttagaacaaatgcatttgggcaattttgccttttatttcagataaattttatatgttgtttctgtccagaattgtaggatcatgtttggcttttcaaaactgcaggaaatgtttattttacttttctttaaagaagaagacagtaatgaaaaatgtatcgactgccagcccactgtttttatttctctttgtgtgagctatggcttctccacatcttgagccttaaactctttgatgttgtctttttaagcataacataaaagattattccctttagtctgtaggcttggaggtgggcaaacatgacatattcctgggtattcatatttctataacaataattgatgcaggttttggggctgttgtatttgccgtagccttatatgataaacatttggcattccatgacgtttcagctttgtcaactttccaatcctgtatggagttccctcttattgtttctgtgtgaacaacttgacaagagtggcatccgtggtcagattcttcactctatccctgcaggacttttcattgtgctctgcacacgatggaggctcaatgcatgaatgaatgcatggatgaatttttcagtttgattccgtgagctgcttaattctattagatgcgctccctaggcttttataagacgtttaattggtacatgtttcttatcactttttaatactccataagtgttttgtgttctttgcagtagagtccaaataaatataaattaaaatgtttccaattacagaggaaatattttcagtatcttcccacaaataacactgggtttataaggcttggttcccgggtttcatggtcatgcttggttgactaactttgtgttcatgtggcataagattctaaactgtcagaactacgtgggcttttagagcccatctaaatccttctcactcacagacgagcaagctgacatatttgcctcatttattggcagtgaatgaattaaaatattgtgccttcatcaagatattgtgtgtatattcacaatgttgtttttcataaatatgtagcattactctgttttgtgactgctcctagactggctggttctagggataaagaagagccagagaagaaatctgggcttcccagcagcaccttgggaggccgaggcaggcagatcacaaggtcaggagttcgagaccagcctggccaatatggtgaaacctgtctctactaaaaatacaaaaattagccaggtgtggtggctggcgcctgtggtcccagctactcgggaggctgaggcaggagaattgcttgaacctgggaggtggaagttgcagtgagctgagattgcgccactggactccatcctgggtgacagaatgagactccatctcaaacataataataataataataataataataataataataataatctgtgcttcctgcttaatttctagttttggtattcctactatcaggcccaacctctgtcctttgtgttcacagctaaatttgatttgcgtttggtcagaggatgggagaacagagaacaatagtcaccctcatcagcaactgagaaattcagtctgttctgccaaccttgcttgtatcttttcatataaatcttgaaattgcctctatttcaagtctgatggtcagtgactaattattaaagccattacttgctttttttaaagcctgaaccttgctttccagaatcttttccacctttgagattattttaaatatcatcattactttgagaaaagcaaacttaacaaggatgccttaagaaatataaaggtgtcattgcccaggaggcaagaaagggaggcagaatggtaatgaaatgagacagcccttgctttggttttataagatctgggtctgaatcctggcagtgtgttctttctaactttaggtaattcaggagccctagaaacctcatctctctatctagtgtgggaaaacgtgaaacaactttgggccatagattgctctatgcaaactcaacatatgcaaacttgtcttattaaaaagcctatctctagtggttcctatccctagtcttgtttggttgggtagcttccaattaataacagcttcaaattctggctaatatttgtttagcacttcatggcttacaaagtacttcattattttaacattgtagtattggtaataatatcaaactttctgttattacaataaatgttccttttttactttattattccattactttattactgtttttcagatgtactgtgatctacattttacggatgaaaaaaagattctaggaggataagggactttgtcacaaaagttagcttctaaatgatggggggactcatatgcaccttttgaaactcctaaacccatgttgattccccaaaggctttggtggtcctaaacatttgacataatcagagtctattataaaaaggtatggcttatccagctcctggttcctcactgtctcctctatctcaaaatattctagaaaaaactttactccctgaaaatatacagctttaggataggtgcagctccatttcatactctgattttcattcctcatttgaaaagttgaagcgtaatttcttataagactttagaagttgaagtcaggactggataaagaaaatgtggcacatacacgccatggaatactatgcagccataaaaagggatgagttcatgtccttttcagggacatggatgaagctagaagccatcatcctcagcaaactaacacaggaacagaaaaccaaacaccacatgttctcactcagaagtgagagttgaacaatgaaaacacatggacacagggaggggaacatcacatactgggtggggcctgtcgtgggggtcgggtgcaaggagaaggagaggattaggacaaatatctaatgcatgtggatcttaaaacctagatgacaggttgatgggtggagcaaaccaccatggcacatgtatacctatgtaacaaacctgtacattctgcacatgtatctcaaaagtaaaattttttaaaataagaagaagttgaagtcagggtataggaatcacaatttgcagtgctatctttcacacttcttaccacctgatgaaaatcaccaaatagtatttcttcttttacctaacatctctaggaaagagagaaccctgactgcacctacaagtagggaaaggcatttgagttacgcaaagctgcttttaactctgaaactgtcctacagtgtagcatataaacagggaaaacattttattggtgttttaatagaatcttatctaaatatctggaatcttactgcaagggccgatcattactctaggtagatttcaaggcccacagctccattatgatgtcaacaaggataactgatgtttattctgtagttagagcccccaaggcttcagcaaacattttgctcatcacttgtaggactagcagtaaatgtaatcattgcaagactgagctaacacatctgctaacagggttgttcatttgagtaaacagcaaggtgataaggcgcagggacggaccattggattgagtcagacaggcccgagtacaaaaaccagcctcactacttaaatcttacatagcccattaagagtaagttgcttcactttgggaggctgaggcggacagattacgaagtcaggagatcgagaccatcctggccaacatggttaaacctcatctctattaaaaaaaaaatacaaaaattaactgggcatggtggtgggcgcctgtaatctcagctactcaggaggctgagggaggagaatcccttgaaccagggagtcggaggttgcagtgagccgagatcactccactgcactccagcctggcgacagagtgagactccgtctcaaaaataaaataaaattaaattaaattaaatttaaaaaagagtaagttgctcaactttttaaactttagttttattatccacaaataataaattataaattgctgctttacatatatgatataaaaatgcatcaatccagttaatttggggtaaatggtattattccagtcttacctcctagaatactcagaagacacaacggtgtatcactagaaggagatagttttgttttggtttggtttggtttcttcagtcttctttttcctattccttccttttccaagaaacccacgatttctttctttctttttccagctattgatgaggtcagggagtaatatgttcagatctttgttgtatctttgttccgtttagaaaccagtatctgggaattcaacagagaatttggggtcactggaagctatgttttacctacatacaactacatcttcctcttagacctagagactagatactgaaaatgcaaaaggaagccatattgacactcccaaggataagggaaggcattacatcatcctttgtaatggtgaatcttgtgcatttgtagagggctggactttggcttctaccatattgtttagctctgtcaaccccacacaaggactttatttatttatttagacagagtcttgctctctttcccgggctggagtgcagtggtgcaatcatggatcactgcagccttaacatcctgggctcaagtgatccttccacctcagcctctcaagtaactagcaacacaggtatgtgccacctcatctgactaatttctttttaattttatatagatgggatctcattatgttgcccagcctggttttgaactcctggccacaagcattattattatcctcatcttacacatgaggaaactaccagtgaagtggcttgcccatcatgtgaaattacatatgccagtactagcctgttctgaaatccagcaacattcttttccacctctagccttgtttctagcaccctttggcctccagagcaagctggggttcattttacattaaaagtagagccatctgatgtggcgggcatccaaaacacttgggaaaatgctactctgtttagaactcgcttttcttcctcccgggtcccagtgcaggaggtactgtgtgctatgtgggccatcagactgtccctggccatggcaggagaattaggagaccaccagggctgtagttaactgtaggtccttcattaagaccagccaattgatagcgtgtgttcatgagtccttgtgaagtcttttcatcagccacgtggaagaccccttagaaaaacaatctctgtaatttgtatttttggacatagtgctttaggaaggtggatgtctgaaggtgggctgggtttgaaacatctctcaatgccatgggacagtgtggtacagtgtcctgacaacttaagctcatcctgacaacttaagacactaaattctactcctgcctcttctagtctagttggtcacctgccctttctgaatttgtttttttttttttttttgagatggagtcacgctctgtcaccaagctggagtgcagtggcacgatctcggctcactgcaacctctgcctcccaggttcaagcgattctcctgcctcagcttcccaagtagctgggattacaggtgtgcaacaccacgcccagctaatttttgtattttcagtagagatggggtttcaccatcttggccaggatggtctctatctcttgactttgtgatccgcccaccttgggccactgcgcccagccctgaatttgttttcttaactacccatttatttgcttgaaacagatgacttaaaatattccttcctcctctgaagttgttctttaaacttttctatgtaagaaattgattgagctgtattcctaggtattttattctctttgtagcaattgtgaatgagagtttactcatgacttggctctccttttgtctattattgatgtataggaatgcttgtgatttttgcatattgattttgtacgctgagactttgctgaagttacccaccagcttaaggagattttgggctgagacgatggggttttctaaatagacaatcgggtcatctgcaaacagagacaattagacttcctctctttctatttgaataccctttatttgtttctcttgcccgattgcactggccagaacttccaatactgtgttgaataggagtggtgagagagggctaatttacattcccaccaccagtgtacaagggttcccttttctccacatcctcatttgttttttccagaagacagcatttgctattacctgtcttttggataaaagccattttaactgaggcaaaatgatatctgattgtagttttaatttgcatatctctgatgagcaatgatgttaagcagcttttcatatgcctatttgccatttgtatgtcttttgagaaatatctatccatatttttcgcccaattttacatcagattcttagattattttcctatagagttgtttgaactccttatatattctggttattaatctcttgtcaaatggatagtttgtaaatatgtttccctttcactggtttttgtcttcattttgtttgtttcctttgctgtgcagattaacttgatgtgatcccaattatgcatgtttgctttggttgcctgtgtttgtggggtgttactcaagaaatctttgcccaatccaaagaacattcatctttgtcaaatgagctatagaattaatgtttttcctatttttatttattcattttatatttatttctattttatatattcatataacaatatatttattcataatatcactttgaatatcatttgttttcatcttgcatttttctcatttttcattgaggcctaatttacatgcaatgagatactcagatcatgagtcgtagttttaggagatttggcaattgtatatattacccaagaaagttcccttaagttcccttattcctctttctattcaagtcccatctgccaccctcagaggcaatgactttctgacctctatcaccagaaattatttctatatgttcttttaaatcagataagaatcacaccatatttattttttgtatctggattctttcattttgtgcagttgtctgagattcatccatgttgttgtattagcagtcttcatctttttgttgtttagtatgccacgattataccataattaatttacccatttttcttttttatcataatcttatataagggaaaaacatgggaatacatgaactgtatctttggctcaaatccatcttctatcagttctaagggcctcagggtatttgccatgaggggctgtgacaccagcctggactattaggaatggacctttgcttctcacagcagtcatttattcctccactttttctactagcgtcatgtgaagtgggaagggtactggcccgagagttaggagactcgagttcaagtggcagctctgcgctggcttggcagtgtaactggccactccatcaccaggacttaatttcttcatcagtaaaatgtttggtttggactgaacagtccctttttcatctctgacatcctacggtcccttaaaaatccctcctctgggctgggcgcggtggctcacgcctgtaatcccagcacttcgggaggccgaggcgggcggatcacgaggtcaggagatcgagaccatcccggctaaaacggtgaaaccccgtctctactaaaaatacaaaaaattagccgggcgcagtggggggcgcctgtagtcccagctactcgggaggctgaggcaggagaatggcgtgaacccgggaggcggagcttgcagggagccgagatcgcgccactgcactccagcctgggcgacagagcaagactccgtctcaaaaaaaaaaaatccttcctctgggtacctcatctttttcagttgcccctgcagtccctctctttagcatttctgtgaggaagtatccaaagcattggattacttgagataatatttctggtcctcttcctctctcacactctacactttgcttttctagaattgaagcctggagaagaaatattgtctaaagagcttgctacaagaaaatttccctaaaaagtattgggtcttaaaatttcatctcattttcaagttcttagaatactgttaatttgcaaagctgattatggatggcatactttattatgctttttaatcatacttcaaaactgcactatggatttgttctttctgtcttcctcccatgcttaatcattatttttggtggcaccttctaaactgttgacttattttctttctttctgatttgtagtagatgttgtataatctaagtttaggcagagatagtgaaagtgctggcctgcctgtatttcagccagtcctgggttaatattattcatgtggcaatgtctgttttactttaggactcaacgtatttaatacttcctctcctcctctttacaatacatagaggaaaggcctttgaaacataatttctctccctatgggaaatgctttctataaatttttcattttcaatacaaactgcttcactttacaaaacagtatctgtccctagcatgaaaaaatactggagggatatgaacagtaaaggagaatatttttctagcttgtgttaaatcaataatgtagtgattccaagggaattgagaggttcgtgtatttattcatatattagtcaaaaattcaaaattctatctctaattaaaaaggaatttgagaagtatctaccatttttattgtccatctctttggacatatgctttgcagcacagtggagcggaaggagcgtagacctacagaaatttagagggctaaatttttaatattggcctggctacattgcctggactttgggaaaatcacttaagctctcttagccttagtctttttatctgtaaactgagaataataatgccagtttttcaaggttgcattgaggatcttaggtaatacatataacattcatggaacataaaatgtgaaccaatgaaggtgccaatgcaattacaccttcattaggagttgtcatttctgcggcttctcattagaacatcaaaattagttccttcaatctttactgaggcgcagagctttaaactctaactttgaaacttccaaaatgaagtgtgaaaggtctgaggccttgtgagtttgaaaatgcagttcacacttcattttagaagctccagaattttttaccaaattgagattggattcaggaaatcatattttaaagccctggttcatgccattttctaaagaagtacctagaaggccataatcagaatgcttattaagtgaccacactttgaactgcattgcagataaattacctctgtgtggggagatgtgtcttgagattctgcggtcaaggctcagacagccccagagctggaaacctcagagcatttatgcctctgtcactaaaggatggggttatgggggctggacagaaagcttgagagagatgaaaagttcagtgggcttgagggaggattactgaattacaataatatccacaccgtaaagtgaatttgtacttgcaagagacacattatttatctagaattttagaaagggtctcttttcaggtcactgtgtagattgcctgtgatttgttctccttgattgaatgtgagtgagtgtgaagcatatctaaacaggtctcacagcaagtttctttcataaatctcctctggtatatatgctgtgtacccttgacaaggagaacactattaatggcgacagtatgcactggaactcagagcactgacgtgggaattgggagctctcaggtctgttgtttctgccagagaatgactctgtgaccttgggacaagtggattcacaaacaagctgaaggagatcatatctgtcctagaccgaaagcttatctgagaaagatgctacatgactacaaagaggttatttagtttcttagttcagataaggaaaacactaataattagtccaaacttcgaggctttgtctttgtcttctaagcttgctttcccctgtgatgtccagtctctcctaaaccagataaggattcacactattaatctcgacaaaatcaattctttgcatttgtgcttttattaggtcagtcattagtcaatgaacacttattgcacgcctgctgtttgtgcagacactgtgctagtcaggggatgcaaaagatgagtccgtgctggtcccatttcaaagaactcaaaatatggtggagacaagcacgtatacaaaaccagaacacagtataatgaataccacaggagtatacccgcaaaagttatatgggtgaagaaagaaggattaattagttctgccagagaaggactaattcagggaaggctttggagaacagggcacacatgatcggagactttactggttcagtcagctatataagtgataaggataacatgaagagaggtgccaagggcaagaaagtataagatatgtgtagaggctgggtgcagtggctcatgcctgtaatcccagcactttgggaggctgaggcgggcggatcacgtgaggtcaggggttcaagaccagcctggccaacataatgaaaccccgtctctactaaaaatacaaaaattaggcgggcatggtggcgggcacctttagtcccagctacttgggaggctgaggcaggagaattgcttgaacccaggaggtggaggttgcagtgagccaagattgcaccactgcactccagcctggttgacagagcaagattccatctcaaaaaaaaaaaaaaaaaaaagagagagaaaagaaaagttacatgtagagaactgtaagtaatcttatctggctagaatatagggtaccataggggaatgactgagcatgggtcagagttgtaaacatccttatcatgccaatgagttggatttctccagaaggcatagagagatctgtttatagtttctaggtaagaaagagtttatgaacttgcctgtgtcttcgaaatatgctgtggcagaatagaaaaggtgatcaaccagagtaggacagaggccacacacatctgccctgaggtcagatacctatacatttattgtgtttgatagccaaatgattttaatgtaaactagttgcaaacatttaaaatttgggaaattttacataaaaatctagattttcgagcttctattaagaagtagagtgcacaatatctgcctagcaagaaacagctgttgctgagaagtgtcttccaccttcagctagagcatgcagtctgacatttgcttttctggttcttgtatttgagtgtgagactcttggagtaaagcaaacccagggtcagaaagatcactggtgatgatgttgcagttgtactgtcaggactgatgaaaacctaaactaaggtggaagccttgaggaatgaagaggagggcaaggatggatttgctgattgtttagatgtgtcatggatgaaagagatggagaaatcaaagaagactctcaggttgtaattttaggtaactgggtaggattcccatgtagtcagaaacccagaaagaagagaaggctttgggaagatgacagtgtattcaatgtggctttttgtggttcaagactttggaaaatattgattagactgttgaaaagtacttataggtcaggaacctggtcagaaagtattgtgctaaaataatattgttatgacccaagcagttgtaaaaataacttttattgtctaactctcacagtttatcttgaactcttaacaggttgtcaggcaaatatctgttcttgaaaccagaaaaacaaatcaagaaattgggatatttgaaatgcctagagtgggcttataactgtaaatgatattttacaatggaaaagtagaaacagtctttagcagccaatgtgaaataactgggtaatgttatttaatagaatgcaaatttgaaatgagtgataaccattatggagaattttgttaggaaaaaaattaataaagtgaatgtaacacatgaagcagagctggaactaggaagaaggaagtcaggctcctggggaaccaaattaaggagacttcccctctcaggcacttgtgggaccctgacggtaagcatctccttaggtactgctcccatcctcatccttgccttgagtttttgaaaaatatatgttagaaatgtttatgattatatatcacaaactgttattctcaattttatgaaattccctagatatgattacaatagtcatttgagatttatgatcttatctaattgttatgtatgtacccattgtggggtgatacaggcagaataagctctgaatttgagacttgtgaaaaccataagagcctcgagtcttgtcttatgagtctccgggtagagctgaactggctgcagctccaatgagaggcaattgcttgagaactgtttccaccagcatactgcatggaatgggtccctctctgatgcagatcccactgatactgatgtcgcactcttgctgatgcagatcccactgatattcatgtcgcactcttgctgattttgatgggccagtcaatagcagggcagcgtgtcaagatgctggagcaaggaagtcctttgtactatttttctcactgctgtcttttccttatggcatgccattctgtcttagaaaatgtgagacctgaagtagacatttggcatcatctagtccaacctctttgatacacagatgtaaaaactgaggcacagaggaggggaagaactttgctcaaatcaaaaagtgtattaaggatggatgcagtggctcacgcctataatcccagcactttgggaggccgaggcggatggatcacaaggtcaagagatcaagaccatcctggccaacatggtgaaaccccatctctactaaaagtacaaaaattagccgggcatggtggtgcacacctgtagtcccagctactcgggaggctgaggcaggagaatcgcttgagcctaggaggcggaggttgcagtgagctgagatctcaccactgcactccagtctgatgacagaacgagactctgtctcaaaaaaaaaaaaaagaaaataggttccgggtgttgcagcaagtaataatgattaaacattgtttaattaaataattaaacaatgcttgcttctctcccactgaaggaggtagaaggcacagcaccgtggtgagcgaggcccagctttctgctgtgttcctctgccatgcctagcatgcgaccactgtggagtgatgccagacggctgtgccattccagtgcactgaggacggagggacccttttcctctgaggacacatcatttcaccttaacccctttggccagaacaaagttgcatagctgcaaggacgactgggaaatatatttattctgggcagccatgtacttagctacaatttggaggttctaaagaaagaaaggaagagaatggaaacaattttcaaggcctaccacagcaaattggtgccatttctaggactagtatcctatttcctaactcctagtagaatgttttttctataccacagatttttaattctcataaagatgtgatttttaattaagaagcctataagaacattttgaatatgcacaaattcatcattttatatgtccatacgggatgcagtgattcccctttgcttaagatcaatttttgtttttattaatcccttgatatatagataggagtcaggcagacccaagtttaatttctgtctaccaacttgtgactttgggtccatatgaataaaaaaatctatgctttgattttgttttttcctctctaaaatagtaacaacatgtcatcttggggttgttttaaaaattaaatgggatgatattaatgaaagagcctagcccagtgtttagtattgaataggtagatatctaatggtacagataccagtttccttctttctcctcacttccttaggttccctccaacctgaagacaacgtatgtttctcatagataattacaaggaatttaaatccttgacaaaatgattttctggctatccatagcggacatgtctagatacatactctgttcattttaaaagatgaggaggttctgacacaatcagagaactttttaaaagttatggatgcctgagccccagccccagagataatgattaaacaggcctagaggttgttagtttttgaatgaagtttttagtttttatctgcctgagtgagtctgatgtgctattgtgttttacacagatcaatatgatggtagaatgaaacagagaaaacggggaagctgagaggtcacttaggcaggtattgtgattatctaagtgagagatgatagaacaatatggcaaaagatggaattaaaatatttagtgggcaaaattaataggacttgatacctgatgagatataggaaaaataaacttaatacatctttcaacactagcaaaactgtagctcttgaaatttatctgacctgaactaattggttcggggtaaaggagaggagaaattgtgatatgtgaaatatattaatatttagaaaattcttccaacattattaatatatagaaaattcttaattatctggaataatgagccaaactcaacaagataaaatctaagagggtcaagtcaaatttcattcttacctttaaaagttagctatacaagtacatcatataaatgtcatttactttgatagctgtttatattttttaaaaaaagaaagaaaacaagactggtagagaagatagtctgaccgcaagatcaacaataataataataatgtaggaccacagaaaagtaaatgaaatcttggactgcattcatctaaagaggagcatgcagaacagggaagcagcagtgcctggagtgctgagttcagttctgggcgccacatgatgaagggaacctggataaactagaccttgggcagacaaaggtgcttgggagagtgaggtgacagaaatttctcataaggaatgatggaaggtatccctttattccaataaaaagaagactaaggaaaggcaatgttttcagtgctctttagggctgttaaattgaaaaggcaacagatttgtctggagaggacagaagtagggccaatggggaagaagatatttatgtcaaaataagaaagctctaacaattagacctaccagtggaatgaacgaaccaagagagtgagctgtccctggacatggtataagcagcctcaggggctggaaaaacactgactgactgggaatgttgtagagggaatttatagatcagattgattggggaaaatagccccaaaggttctcctctctctgacatcactctatgattctatgtgaagttctagctttttaactatttttttgtataattaaataatttgtctttattgattgagaactaatcattaaaaaagctactgtcttttcatgtctagagatgataagaataatactacatgcttttgaagaaaaggaattttatgcaaataatcccataccagtgtattacgcttttgcagggataatcaagagcttgcaaaatttgaaaccacattttcccctgtatggaggaggaaagtctattttgcatccgtactttatgccttgggcattattattgctcatatgctctaggatttttaataaacctaacctgcttcatgaaattacactgcattaattcaacatggccatgtccaaaatttaatattcattcatttattcaagtatttattcaacaaacaatccctactatatttcatgtgctattgtcagtgctagaaacatcaatttaaaaatgtttaaatcctagtcttcgaagagtttataattaaatataaaaatattgtctatgtgtcaattactgtagctccaaatacctatttactccaaaaattagtgtctgaaaggaacaatcatttattatctcttacagtttggtgggtcagaaatttgatagcatcttgggccaggcgtggtggctcatgcctttaatcccggcacactgggaggctgaggcaggcagatcacttgaggccggggagttccagaccagcctggctgacatggcgaaaacctgtctctactaaaaatacaaaaattagccaggcatgatggcacgtgcttgtagtcccagctacttgggaggctgaggcatgagaatcacttgagcccaagaggcagaggttgcagtgagctgagatcatgccactgcactccagtctgggggacagagtgagactctgtctcaaaaaagacaaaaagaaagaaagaaatttgattgtgtctcaagtgggcaagtttggcttggggtctttcatgaggtttctggtgtgaggtctctcaaaggctgcttctccttacacctgggccaggagtgtttgaacagctagtctggaacaacttggggtcttcaggtatctccctctatctgcatgtggtctctccagctttgggataacctaacttcttacatggtaactgctatagtttgaatgtgtcctttaagttaatgtgttggaaacttaattcccaatgcaacagtgttgagaagtggggtataataagagatgattaggttatgagggctctccccttatgaatggattgatgccattattttggaagtaggttagttattgagagagtaggatgttataaagtgagtttgactccctcttgctctcttgctgtcatcctctcttgaccttctgccttctgccctggaatgacacagtatgaaggccctcaccagatgctggcaccatgatcttggacttcccaccctccattatcataaaccaagtaaatttatgttgttcaaaagtgacacagtcagtggtattgtattatagcaacacaaagcaaactaagatagcaactgaggacttcaaaggtatgtatttcaagagaaaactatatcacattttaagattagcattaggagggctgggtgtggtggctcactcctgtaaccccagcactttgggaggccaaggcaggtggatcacctgaggtcagcagttcgataccagcctggccaaacatggtgaaaccccatctctactaaaaatacagaaaaaaaaaattggtgagcacagtgtcgggcacctgtaatcccggctactcaggaggctgaggcaggagaatcgcttgaacccgggaagtggaggttgcagtgagccgagattgtgccagtgcactacagactgggcaaaaagagggagactctgtctcaaaaaaaaaaaaggttagcattagaagtcaggcagcatcactgctatgacattctcttggccaggcagttgcataggttctcccaagacctcacctcttagtggtggactgttagtatcacattgtgagatgggatgtgttttggtgtagtcatctttgaaaattacaacttgccatagcatatgaacagataacactatacttgggttctctgctatggtgctgtgaaagaacagaagaggagagtgattaacagaagaggtaacattcacatatcatgggccatataatttgatgtatgtaacttgttaaggaaatacgttcaaggcaggggcaacagcaggtggaaaggcatgaaagaacaatgagcacaaagtgtttaaaagcttgggttgacaggaacaaagactgagttgtaggagaggtgacaggctaggggcctagacaggggaggtaggacagcatcctgaagggccttgaacatcaagttaaaacgtttggctttggggagcagtcactgtctttagagcacaggcatataaactgatcgtctttggtaatctcttccatctacaatctttctttcctttgatagtaaacatatcatctctgttaaagttgcttcctagcttaaactgaacacagactccaaaccattgaagcactttagatttttttcttttttttttttccttttcttttactcaccacaaacaactctagaatggcatgcatttgaacaaaccaaaagtgatttcactcttctaattttcagtgctttttggctaaatgcagagtgagaaattcatacctttttcaagcagtgtgggttctttttcccaatttctgtcatccatctggttctctggaggtcttggaatccaggaaagtgttagttcactgtgctgaaatccaaaaaagactgctaaactgtgaaagaaaatttgcattccagagacactgaaagagttagtccaccacccttttgcaacagcaaggagaaaacatctgtatttcctgcctctttgtctttaagcagttatagaatggaaaaccctatactccctggctgtgcgtttcatacctagttaatctaaatcacttttggcagggtgggggaggaatcaaaacatggaattattttatttctagtgtcagaaaatattacagccaagatactgtttaagggaagcaaattacttcaccagcttccttttgagctcctcatgaggtttaattctcatgaatgggtcctagagccgacatttgacatacacatcagcagtgccctcttcggaagggaaccgcacagtcacagccatgatgttggcatgtctttatggccttcctaagtcatgtgctgtcttttgtcttccattggcagaaatacaattagaaggccttgttctcaacagaagccaaatgattgccaaatctgttcaactgatctctagagaattgaagttagctcatggccctctggctgttctctttgccactcccaggagttataggcttaaagttatccctttcttttgaaagaggatcaagtttggttcaaagaagcttttctatcatccccaggagtacaaagagagcccttccatgaccctagttgtttggctcagaccacttatagcttactgtaatttaggaagtaattgtaattcataaagccaggtagataataaacatcttggcagggttgagtttcaggcagctctgaagggaaccaacatgtgagtggaatggtattgggaacatttctagtctctgcttgcagatcttgattctaatggatgactcaaactggtttaattctgatctgaaatgtgcaggcaggcagtcattactctgtatacacatagctgaaaacatcatcacttaagcatgggttttagacattctcctggatgagttagttacccatggtagacaaatactgtaagtaaaaagagcattctcctaatttctatgttgtgtgattaacttcagatcatttatattcctggagaaatatgtagcactattttttctttaaaagatatattcttgctgaggtagaataaagaacagaaaagttgtaagaggccttagattttaggttatttaatgtcatttaattttgtattcaaccaatacttactgattgcctgttatgtcttaagcgctgccgcagaggctgcaaatgcagtagtgtcttgaacaaactagtgtaagatgaacaataagcatggcagaagcatagtagcaactaaattcatgaagtgatatcatagtgataagcactatgaagaaagcaacaggataaagagacagagtctggctctggagagggggctgctgaaatagtgtggtgatgcaggccatctgaggatagtaatgaaatttgggggatgtctatgggagtagatgctgttggatgaatctttggagtactcccaaatgattgttcattcatttacttactaaaatatttactgagctccttctctgtgccccaggcattgttctggaaactgagggtgatgctttgaacaagacaaagaaccatgccctattgaagcttttgttcagccctcaaatcactccatttcaagggaccaaaagccctattaacttaattcccttattttatagctgacggaatttaggcccagggaggaaatgctttgtacaaaactcactgctggtggctgacgttggcaagactggaatacagcccttgacttctgctttatttctccttgccactgagccatacagagtctctgtaaccatctatgtcagcaattctagtttagtgctggggttggttagcactgtgacccaaagataagtctttttctctatcaaggcctcatgtctactcttaataaaggtaacaaaattgagggttgttaagatggggcttcacaggcgtgggtaccaggggctttgttggaccttgattacggttaagtcaagaaaatggaccttgccaagtataactgccgcaaactagacagagaactgtatgagacttcttattggctcatagacttctctgtacacactctaaatgcatggtatgtaactactccatcacttgataggcattccaggtatgtaaactaaataagatacatggcaagaaaaattacctgctgaagacaaaacaacaaaaacaaaataatctgtatttttccaaactcaatattcaatattcaagggagtatgggtacttgtgtatatattttatacttgtctacttctctccagtaataagaatgatagaagttggctcagttgattagtcagaggctgttgaaccaagatgtagggtcgatccttctgtgtaacagtaattctctccagcgaaaagagctttataacaatatctttatatctatttacattcttaaacagtgcttctcccatttcttataatatttaattctcattgttaagagattgttaaggcagaatacttagtatcccattctatagatgagaaaattgacacccatgtagcttatggaattttgttcaaggtgctgtgaattccagctactctggaaattcactgcctcaatgaaactggtctaaatgttggttaatagcctctatttataggttgctgatagtaggaattatgaaagctggacctaaggcttcctaatgtgaggctttggataggattatctgctctgagctcttagccagaaggcccccatatttatcagtgtgcaacaatcttgttttgacagcgacaaaacccaagtagtgtcacatactcagcttaacaatttttcattggctatgtaagtaattatgttaattttatcatattcttattgttaagtgggacagaacaccagggagatgtgttggtattcaaaaagggacctagtgtggggttgggagaagagcactgcatagaaaccatgccatctgcgtcctggactttttcacaaaatagtatatcacattgggcaaatataccacaataggcaaatcagcttcacaaaatgcagtgtcctagtatgtgaggtgagacagttggacaagatgattcggggaatttttcaagctcaaccaaactatgtatttatgagaggctatgggaaatctgcatgctaaagattattaactgcattctgaataattgcctttatacagaataacggagaaagatatctgagaaacttgttaattggaggacagtgtgaagtagaagaatgagcctttctctttgtactttagaaaacacaggttcaaatcctggctgcatttatagctgtgtgtcatgtaatgcggaaaagaattctaccattctacctcctataccagattgctctggagattagacgggctcctgtttgtgtacatttagtaaactttaaggattgtaccaaatcaaagtatcagttattatttttggtgtataaaggaatataaattacttttatgaagaattaagaaatgtatggatttggggtataataaggtttacacagaagaagagctttttcacaaaattcccaggaaagcagggggaaactcacttagaaatctagaagcccattttatattatgacattatccaattatcccagagtatcatatacacaattccttagataatccatttgttgaaaggacagatataaaatataggagaattaatggtgaagggaaaaaatagaaatacggtgcttcagtgtggtagttacattaaatgatcaaaggatgacaagttaattgaataaatgtcttagccccttgaaatttgtatagggaatttataaaactaacatttattatatagtcaggactgggttctcgctttgataatatgtgaactcatttaaacctcacaacactgcaatgtagacatttcagtctacaaaaaccaaaggccagaaaggtcaagaaaattgcctagcttttcgaacccagatcacctttttcctactgtttcactaattctcttactataatatggcagaccttctttgatgtctgagttaataaatcttcacatgacttatgttgtaaaggcaaaatctatcatttgacttgtctcggaaggaaaggaactcaattcttttctttctctctcaccatagtcttagtcttctctgatatgttcattatgcccatggcatgagggtctgacccacagtcctcagctcttaggccccttccccctgccccacatttttcaaggatcagaacacattcaaaagaagtgttttggaagacctagcatgtcacatgggttatgcattttaaagtaaaatattacctctccgggcattaaggtataaataaactaaatgttctataattgagattttcttttccgatttagtaaagctcagatcacaatcctaaccctagtgcttaagaataaaaaacagggcgtaatttactttgtgaagaatgtgatttttagctcatggcaaaattgaatagaacggcctaattgctgtgatctttttgttctttctgttggctttttccttatggttttagggcatatttctcaattttaaagccagtttatgtagtccaaatacaaacagaaaattttataagaaaattgtttttctaaattttattttgatagtaacacataggttttgtctgtgctagttaaaacatggatgttcggccgggcgtggtggctcatgcttgtaatcccagcactttgggaggccgaggtgggcggatcacctgagctcacgagttcaagaccagcctggccaacatggtgaaaccctgtctctgctaaaaataaaaaattagctgggtgtggtggtgtgtgtcggtagtcccagctactcaagaggctgaggcaggagaatcgcttgaacctcggaggcagaggttgcagtgagccgagatcgcgccactgcactccagcctaggtgacagagtgagactctgtctttaaaaaaaaaaaaaaaaaaaaaaaaaggatgttcatgtctggcaatattgagttccccttcatcagtgctgctcaatacacagatttcgttacaatattcttcctgtgaaatgaatttgtttcagtgcaggcttatctgcgactcctataagagtattagatattaaagactcttgttatagcacaacattaattccaaagtgggttaaaataagttttttttcaagtgccaaatccaatcccaactagaatagattcttaagagtcatagaccaccaccatactgcctgctctctcaccattcataagtaattactctcttctctgcattcccatcattcattactcgtgcctcaatgatagcaatttgtcatgccctttgcctcgaatcagttgttaatagttgtgtccacctgtctcactgcattgagaacctttgagggcaaggatggcatctttatcttccatctcttcctctgtacctgccaggctgttgaacactttgttccattctttaggctttctgcaatattagagtaagtgaggaggcagctctgctctttagagaggcatataagaagtttgtttaaagagagtttataagaaaactgaggcaatagatgcaaaaagttatgctccaaaagattaacaaaaaaagttgaaattatttcactgaattttcagttctgtgtttcatagctgtcatcttcaggggtaggggggtgtgtcatgacatcaaaaaagtacagtttagagatttgatgctatctattaaattgtttcaaaacgtttcctatctatcaggaaaactttcatctgtaaaagaggaattttgattctaattgaaaaatcacagtcataggggtgggatgctgttaagcttgagattattattttcagtctgtttcaaaacacacattacatgcagatacaaatatagacttagattaagatatagacaaaggacattagaaagaccaagagaaatgttaataaaaagttcatgtctcacaggaaggcagagctgttggaaggttatctagtatagggtcattagaactaccaaggtaaaatgatatcttcacttgcaaagcaaacccaaaagtactgccatcatttgggaagcaatcttgatgaccagaatcaaggtagagaataagtttttattccataattaagttaggcaatagcagtattctgagttcagataatggcactggcatttcaagagaaattggctgagtcatagccctgctcctttactgtaccacattaccattctgttgggaacacctacacttgagctgtacttcccaacctttttcacatcccagttcatgtggaaaatgatggcattcattcagcacacggagtaagtggatgagatctctcctgtcctgttcctgaggcaaccgctcaggaactctggacacctctggtccttccgaatcctcccaaatatggtgcatccggaacccacttgaaacacactgtgtgttaacctgccagttgagaagttctagactggagaattgttttgcatggttaaatagaaaaaaaaaacttattttatataaagtacttacctggactttattaattcattaactaactgatatttgtggagcattaattttatgcaagcatactgttgtagatgcttgggatccaacgacgagttttctcttgtcctataggagtttaggagacaaactgtcttaagatcttaacatgttttctctatttatttgcatgtaacttgcagatagcaagcctgaatgtcttctttctatttgaaatacagtgtgtgtctaccgatatacagattccatataatgtgatgtagcagagagagtctccattggacagagaattaggagacctttattgtaactcccaatctgtcactagctgtgttctctatctataccttagtttcttgaatccagcagttggactagaatcatggttttcagatagtacaggttccatcccttcatgcccttcagccagaagtgattttgggctctttaatatgtgctttttttgataaattgtttccctgaagaaaggattatgggtgaatggccaagtaaaagaaggtgaaaattcctgggctagtgtaatctctaaagacttttcaagactgaatgtcttctaactctctctttttttctttttgttcttatctcaacaagacctaaactatctagatcatgagatgtcactccttatctttccaagagtctttcctgtttcacgatattgtttttgtacctaaaaaaggtaaagatgaatataagatcacattttaattttataaaatgaaaatgttgttaacatttccaaatggcagtaatcactttatagtcttctgaatcttcaattacttatgtaaatgaagactgtatatcttgattttaaatactcaaaattgaacacttacatatacctatgtaatatgtaaataatggtaatattcttattctttatcatctcattagtagttcacgtttatgttatctatatgcttcatttatattcatatgattcttcagctcttctgcctgtgagttacaagttatttatacaatatccaaagatagaaaaaaatactaccccattgtatctctgacttaaaaacgttgcatttgggggttttctgtacaaagttgatttgtgatttaattgttagtttcactgagtttttttgtttttagtcacaattgtattgccaacatttcagaaaaatttataagctgtgacttttagcaacagaatctgcttttttctgctactctacgtcctttcattttaaccatactttcattggagtagcctaaaacatttttttatggaaaaaagtcctcaaacagtgcctgttgcaaaatgaataaaatttggattcttcattcagctttggccaaaggccttccacagctcgttaccaattacttactgtgtgtcatgaactttgtagtccctgggcaaggatgcttactattgtggataccgtagatagagtgtacaataggaataggaagtataagaagtataaggacttcctatactttcccacaggtgttgattgcaaggacacttcttgataactaactgtgtgcaaatctgcttcagaatttgtttcctaggaaacacaacctcagactatggcttcatgggaggagagaggagtgattgcagtttagtcatagaggttgacataaaccactaaatcaagtacattgtgttcagtgtcataggggaagcataatacaatcctatgggagtggaagaagttacttacttttcttggaatacaacagaaaaagatttaggaaagatttttcagaagaggtgacatttgagtttcactttgaagaatgagtaggcattctctaagcaaagtagaatacaagatagtctgggctggtaaaagaatgttgcttattaaagatgtggcagaaagctcagtgtggcagctgggaggaggagtccatgggaccacgatggagctggatcagcagtccagtcacaaagcacgctactgatattgaaggttcataagctggaaggtgctcttttcttttaaatccccagctatcaatgctggcaaccctactagacaaaaaaataaataaataaataaataaaagaaaaaagaaaagaaagaaagaaaaagaaagagagagagagagaaagaaagaaagaaaaagaaaaaagtgatttgaataggcatatttagagacatccctctttcacttatttgcttaaagactttcttttttttcaaaaccgatttatttgtcaaccatttcatgtcatgggttcagatgaatccaatatttgtatgaagcgtgcatctttttgtctggctttaaaataatcatctataacacaaaaatatccctctatgatccttacaattttaccattagcaatttctagaattatcagtggaggtgcatagtaaaggtaatatagtccaggtttctagcaaatgaatgcccctttcaaacctctgataaggggttatccagttgtttttgtatatttctgataatgtaaacatgtatctttttctattgttgttaatactgatttatcacagattaatacaattacagagtttgaattaatcatttttcaaatgagaaaactgagatcgaaggaataaattatttacccaatgtcatacagcagattttgacaaagccagaaggataattcatattcttcacctagcaactttcctttttcatggccacataatgaattccttagctccctctctgcattattaggagtcaggtaactggggtaccagtcccacctctgcatctcatgctctccacaactcaggtccagcacatccattctcaaagtctgcctgctcacctgtggaatgagagtctggactaagggaactcccagccccctcctcctgacactgtgagtttttcctttctcgaaggctactggtaggccccactggagactgaaaggggaagattgcagtaaaaggcgcaggctgtcgaaggataacatgtccttctacatcattcactagcctaggatgccagtcaacttcattcttggaacctttattttccaatttgcgggcattttgcaataggctgattttaatcacattttatactttttttcctttgttgcagaaatgtttgtattacctgttctttgaatgcagcatctgtagaccacaaggtctttccataggaactaagcctgttatattgctgctagttttgagtaaatgagctgaatcttgcagccaagcctcagtgcaaacaaaaacattttctggccaaacattttctggttattcaactccattacagggctgactaaaaaaaaaaaaaaaaaagtaaaaacccacagaggagcaaaacacaagtcctgggaagacaatttccagccacattagctcacattgtcagggtagaaaagaaacaggccctcattcttcaaaccatcatcatctccaaactcttaccctgtgctcttctgctattttaatttcaccacttcaaaatgggaaaaacaaataggttaatagtttccatgcgtttagactgtgaccagaggcatacgaagcaatttcagaacctcaggcaaccacagctttgagggaaggatgatgatggatttaccaattcatcttgggatggattccagagttaagggagtcaggccagcactgtgctgccagagtgggatataaacaatattcattcgttcattctttttgtacacattcatctcaggcttatttctatttcagacagtatactgggtgcattataggacagagaaatacattcttaagacatagtctctgcccctaatgaaattaaagtctggtagaggaaatagacataagcacaaataatttaaataaagtgcacactgaaagtattgtaagcaaaccaaataaagtgctcaggaatgggagagaaagaagcaattcattccaagtgggaccattgaggaaggcttcactggggaatggccttctagcctgtaccctgaaaggtcaaaatggcaaattgcgatacatctaggcattagccaaggcacagaagtatgggagtttcacataggtttgaacaagagtgagtggtctgagatgttatgagaaccataaaggggggttggataccatgtaaagaataagctctttttacattgtgaagccattaagattttattatccagaaaggtacttgtatttgatcacatctgtgtttggaaagaaaactggaagtcattggagacaggggcaaggggagtattataagaagagagatacaaagaagccaaatcataggtcattgctataggttagacataaggacactagttacctacgtacagacacttcttgcttcatagccatttatatatcctcatggtaaaagagcagctacccctgaatttccacatcccattcagttctgcatctttctaataagatccacatcccgggtttattcctgattgtaaactcaatgagttaatccagatacctcagttgtaatatagcattttacatgtgaaacgtggttgtttgctaagagcatggaattaaagggcaggatggaaagttaacagccgatctttctgagacctgactcactaactggtgtctcttttaaggggtgctatatatttttaaagcttagaatatttttaaggccagataaatgtgtttcttaattcactttttcaaaccagctcccttctacattcaacatttctgtcaagagtttgcaaactctaaacttggagatggtgtgtaaatcaaagctttaaatgatcagaagcctaattgattatgctgagttctgatttgggttctgcatttagcatgctctgtctcagtcatctgacaggctattctgtaaaaagtaggggtcttagtgatcgcactatggtctaagtggtcacactatgtctttgataatgaatcaagttttagaagtaatagtgaagcattcctcaatcggtgaaccagagtggtatagttcaagggtcaacaaactatgcccatgggtcaaatccagcccattgtctgttttttttttgtaaataaagtattactggaacacaagcatgcccatatgcttgcatgctatgactgctttccagctataatagcaaagttgacttgttacaacaaagccagaaatatttactatatgggactttagagaaaagtttgccatcacccatgctgtaggaaacaagggaaggaacaaggatagcagtcagaaaacacatgtcctcagttctggacttgccacctactacctgagtaatactagaaaagccacttgacccatctaattgtgtttccttctctctataacacacttctttggccagtttgttagttaattggccgataacacttgttttctatttgtaaggactgtattaaagctgtagatgtggtttgtaaatggtgataaatgccttccttagagtggtgtgataaggacctgagacaatctgttttgtaaagatgcctgtcatgcagtatggacccccttctgtcccagtctgacgtggtttctgtttccttccccagaatactctggagcagtgcaatgtgtgttccaagcccatcatggagcggattctccgagccaccgggaaggcctatcatcctcactgtttcacctgcgtgatgtgccaccgcagcctggatgggatcccattcactgtggatgctggcgggctcattcactgcattgaggacttccacaagtaggcaacctactctctcgtcaccaccctgccagtccttttggagtctgttcttactgcttggcatctgggcatacattcttctctctcagaactacagaatttcaggatttagtgaggcttttaaaagagcttattgatcccctcctccaatgcaagaattaatatcagacaatccatgcagtcatccagcctggtctctgtgtcaaggcttccccagagcttgtccattgcatctctgggtaattctaatgacgaaaaagctggctcagctatagtgtgtatgtgttagaaagaaacaggatcctggcctaaatatgaacaaaatttgtgacatttggcattgttcaacttatttgagctcttcagtttggtctttagatcaaaccctctctaaagctctctcagctgtgatgacccagagttttctcaagagctaatctgtgcatccctgccactctactgatagggagttatggtggacagacacagagaaccattcagtttcttttactaatgcaagcctctcacatattcaaaggcagtttcatgccattgtcaacatattgatgccattccctagccttttcttccacccaagtcttctctttctcaagttattttttaatagaattaatgaatgcaaattgtgtgttcttttgaggaggattaaaaaatggtgcctcaagatcaaggccagttattcatgggcccaaaataatctgtccccactacttcatttatctcatttttaggtccttctttcctgtattacagctggggtctttatgaaaattaagaaatttaaacagttttgtattgtgcttatttttatttgaccagtttgttacttaattattcaataacattcattttatatatatgtttatatatatacataataatatgtaaatatatttttatatattttatatataaatatatttatttatatacatgtatattattattgttattattttttagacaaagtctcactctgctgcccaggctggagtgcagtagtgcaatctcagctcactgcaacctctgcctcctgactcaagcaattctcctacttcagcctcccaaggagctgagactacaggcatgcaccaccatgcccagctaatgtttgtatttttagtagagatggggtttcgccatgttggccaggctggtctcaaactcctgtcctcaagtgacccacctgcctcagcctcccaaagagctggtattacaggcatgaaccactgtgcccagccaacgtttggtttatatttttaagaactgtactaaacctatagatatgatctgtaaatggtggactcaggtttctgtatgtgtttgctgggcagtggctttgaagacagcctttgaggctatcaaagagatgaagcttgtattgctcaccaggttgggtatccattctatggcttccaagtgtgaagtcttctgggttaattctcaccactgtgttgattgtcaacagccaggaagcacttaccccaaggagtttggagatctgagactcatattttaagaatgaatgtcctaaccactttccaagtagcaaagaaagtgaaaacctcaccaaaagacgtgaggttgaatgaattaaaaaatcccagaggcggaaatttgcaacctgaattagacaaggaaggactcacttttaaagggcagtcacagcataaattgtgcttcacattattgatatttttagcttgtaattacacattgaaaaatccctgcgtcttaagggaagtgaaaagatctcaatggggagtatgttctgttactgtttctctcctttcttagacttatcctaatccaagaaagactgatacttataatcggagcacacatgtttctgtggctagaaaagactgatacattacacccctcaattaaaacaggaaatcaattttgacaaatgccaatttatatctatgccatttatctttcatgtctaggggtagggagcataattagagactggtgactgatgacatcagtttgtgggtctgaaagctcccaaaaagcagacttgagcaactaaaagggggaaaaaaattaaaacccccagataaccttccccactcgttcaatgcatgttaaaacataaattaaaaatgataataatgttgtcttcatgattggcaggtatgtagggagagaagttttttgatcctttctccatttcctaaaggaaaataagaaactgttttatggaactcttatttataagccttaaaattactagaatacaaagcagctaaaagtccagcataggctaatcactgaaagaccaaagagagggcagacaaagggatattcctcctccagacagtttttggggccttgtttgtggtccttttgaatgggtctccttttgtggacctttagaaaatgcatgttaattcagttcaactcacatttataaagaaccctctgtgtgccaattgttgcattaaatgctgaaggagagagatacaaggagagaaattgtgcagatatatatagagaagtcactgtcagcaaggagcttgccaggaggagggcagagaaagtgtgcagacagggagaaagggctgaactccatgagacaggcacaggtaagggcttgcactgtcaaagtcagatcacctggctctgtggtcagaataggctttgtggacggagaatgtcaagagtgttttaagtgggaaacaaggagattcctggcagagggaacaactcaggcaaaaagcagaggcacagagttagtaaagggttctctgtgttcagggagatttgctttgctgtaactagagcagcctgggagtagagattaccttgagatacaggagacccataagaagggatttacctcacctgcttagcctgccttttatttatttatttgtttattttatttatttattttgagatggagtctcactcttgtcacccaggctggaatgcagtggcacaatctcagctcactgcaacctctgcctcccatgttcaagcaattctcctgcctcagcctcccaagtagcttggattacgggcacccaccaccatgcctggctaatttttatatttttagtacagacaaggtttcaccatgttggccaggctggtcttgaactcttgacctcaggtgatccacccgcctaggcctcccaaagtgctgggattacaggcgtgagccactgcacccagccttagtctgcgttttaaaccagtgcttcccaaactttaatgtgcctgtaatccacagagggatcttgttaaactttggattttaattcaggtctggagtggggcctaagattctggatttctgtcaagctcccaggtgcccatggcctgcactttgtgtaacaaggttctggaatactgtttttgagaacttgttaatggaccatcctctacataaacacctttggtcaatgttgactcatatcctccagcctactggacatgcaatctttcacatatgtcatttcagatgaccgctgcaaccactgcagtcttctggaagactatctcccctaccctaacacacacgtacacattttctcatttcacctaaatggttatctttaaaggcccaactcaattaccgtttcctggaagaaaacttctctgatctccacccctcccttttctcaagtttagatttacatcttaatctctgtgttttatagagttttataagtctgctgtagatagcacttaccacagtctgactggtatagaaatatacatatgtgtgtgtgtgtatatacatatgtgtgtttgtgtatatatatatataactttacaataatcatcttgtatcatttttgcaataaggatttgtatatataaattaatagaaatactgcagaaatatatagaactccttctcaggtctgtactggaagtcgttgcttattcttgtattcccagtgagaaaacccagaaaagcagatttctttaactgactctttgcatgtatggaggctttattcccctatctgtgctttcttatcaggaatattaccctcattcatttatgtatttaatcagcatccattagttgattgccagaaatgtgccggaatacaagatgaccaagatcatccctctctgagccttcgctctgttggctgtaaagtagaaatgataaaaatacttcctcataatgttgctgtcagtagaaaattacgtcaagtgtgtacagcacttaacagggcttggcacataataagcactcaataaatggtagctttaatcatcgaaagttgttttcatcaaatttacttttacgattattgtccactcagtgagctaagccttgaaatagaccacctgggattgtgagccctcctcgaattgctatcggaggaacactgtggggactatgagaaccacctcctgcctcttcgctttggtttttctcattatggaaatgaggccaattggtaggaaagaatcattactcagcaagaatacagtttatgtcttcccaaagaggaagaaccttgagattgaacataaagcccaactaatatctttttttatacagaaatatggcagattcatttcattagatacagcccaactttttttttctgcaccagtcacagtggttgttcctggagactcagagatggagcaaagtcctatcttgtggaaacttagagtttagtgccccataaatatatccaaataattactaccaaaatggataaattcaatgacagaattcttatcttagaggagtaaataattctatttggggaaattggagaaggcttatggatacactgaaaaggaaaacatacttctgctcccacagagtttggggaaaggaaattttgcagttgatcccagaagcctacttatttcaccactgatgacccagatttaaaaataatctggtagtccaaagcaattttttgccactgaatataaacttcttgcataaaataccaattataacaactctgattactgctgcagtggtaccatgatccttctaacttttctttcacagcaatcaattgatctgctgcttaattcatatttatttagattgcagccatacagatgctttttgggtgctgccaggaaaattaattacctacatatagaatataatgtatgtagaaatgctttgacaaccgtaacgtgctctgcaaagagttagattattatcattatttctttttaagtctcactacaaatagataaatttttaacatcgtttatcttaaaaccagtaccatgaaaaaactgagtcacagtctgtttttctttttttaaatctcttcagttcttatccaggtccatttcaaataatatgtcatttcataccttcacaaataccatctccaatttccagaagatacagagagatacatggcttatattttcagccaattaacctgtcatagaaaaaaaattgttaggtaccattgatcatattgagaaatactaagaaattaataagtattaaaagtatttaccagcagcctcaaaaacatatgcatatgcatatttatatgtatatgtatgtgtatgtgtgttagtatacactcaccctttaacagtgctaaaatcctttaaagaataaagaatttgatagctctttaacttttaatttttaagcaaaagtttaacacaataaaaaatgtaggaaatgcagacttggccacttttaagttttgtgtaatgtatatttaaacgcactaacctctgcccttttgaaaagctatgtatttgagtcttcttatgtcagttcctagaagtcaaggcaaatttccaagaaagaagctctaaaaggtgggaacaaggcaaagataccaacctcagactatttttctaggacctaaggagtgcatacaaaagtctagaaacaaaagtcagaaacaaataggggctggacaggactttgttctctcctccagttagcctatcccaagcacagggtttgcattcagaatctatctaaagatgaatttcataccgcgcaccatgcaggaaagagatgctagatgctcttcatgcccaagcaattcacacgctcactctctcacctcgccaaatatcacaatatttaccaccgattgatggaagaacctccacagtccctgagtctaactccctcaccttacggatgaggaagcaggtataccgactctcagtttccacctcttccttttacctctgcgtcccacctcagtgtcgacgcgcagtatctaaccagaactctctcttcactttcaggaaatttgccccgcgatgttctgtgtgcaaggagcctattatgccagccccgggccaggaggagactgtccgtattgtggctttggatcgagatttccatgttcactgctaccgatgcgaggtctggttgacagccctgccctgccagtctgtggcaggcgttgaaaggctcgttcgagctaggtttacatagatgtagcaattactaaatctcagaacggccttagtgcctgtactcataggacttgggttttagatttgacactagtattccgagcacatgctgttgaataagtcactgtacctctctcagtctgcttgctcaccggaagaaaggactcaagtccttaactcctccaaatatggctgtgagagtgaaatacaaaattgtatattaaaggacattgtaaattgtgaaatactaaattagtgagaaatggtgttattgaacatttaactttggctctgaggctttggttagaacttcttgttcagagtcatggagatttatttatttgttagcatgcactactaattgctcagtttcctgaacgcctctagagctgcagtatatctgcatgttcttttcagtaaagccaaacttcccgcagagtataaccattgctgctattgtgttctggataccccgttaacttaaatttcattctatgtcaaatgaagacatgaactccattgacctccttgccaccatggtagatagcagaggcgaggttcatagctgttgtggcctttgagagtttatactaaagttagcaaacacacacctcttgatgaagtactatgtatttattttccaaagaaacttctattttctccaaagacaaaggccagcatttaactgttatataacacttttcaaaatggaccctaagaggagctgtcagcggtagtatattcctttacagttatgcagttctttgcatttttttttttgatccattatcttctttgatcctcttaacagcttggtaaggtagaaaaggcagaagttattttcagagtggcagtcggcctgtgtgcattgaggcagactgtagcaaaactgtgggtggtgctcaggaggcctgtcccctggactagcaatctttgctctccacaatgctgtctcctttagaaagtacagcaaaccactactccccacaaactttaggattttattttcttactgcagttgaagtaaatacaccgaacccactggtggcccttctgcttggcagacatcagtctacctttgctctaggccagaaatggccaaaacattccattcctgtacctgtgcatgcattttgagagatccttaaactaatggtaaagggtaaaaaatgcatcggtggttagggacattcttattttctcttgttgagtgggggcagcaaacttctacatgggagccaagatgggtggcctcttctcttcttatacctgtatttcatatcaagtgagcttaggaggattatatttatgtccatttatatttatgtccccaatctctaattcaattacattcaagatatactatgttatatattgggagaaaggatacaggggattagcagaatgtaaagcaggaaggatagtaagtggccacattatggaggccttgaatagaaagctcaatcatgatgttctccacatgtgtacttaacgtttttacttatgtcgtttccatctgtctttactgttctaggattgcggtggtctcctgtctgaaggagataaccaaggctgctaccccttggatgggcacatcctctgcaagacctgcaactctgcccgcatcagggtgttgaccgccaaggcgagcactgacctttagattcagtcacctgttcagccggcactgagaagaacgaacacaagaaaaagataagaaatactagagtaaaggccatcaaactacgcgatagtctctgttcttcatctgctattaaccttgccttagaaacacataaattatgagattttttttaaaagttgttaccaaatacacatttcacattgaatcatgtaggatcttgatgggcctttgttcccaaggacttccacatttttgcacagattatgctccatcccattcacttctgcattcctgtaacttttaatccctatgtttgtctcacttttcatctggttgaatggcttttcttagtgtggtatttgctgtcacatagtttttcctgggtgagtctgccaactcacaggtgcttttaggcttgaaatctccatcctatcatttccgttttgcctgtgactgtaaagagtagccattcttttcccatgtattgaagaggatattcttctcttgctttatactactcacgtccttggggagggaaatgcacaatttttttttgttaggctgtaaagaatttaagctgtaaattacataagttagaacaagcccaaatttaatttgcaaccatcagaattcagaatctatagtgaccagtgatcaaggctaattggaaaagagttatcggcccatagctaataagtagtgacagacaaccaagcttcaatatttttctaaagaaattacaggtgggatatgctagaaaaggcattttggggttatgtttaaaaaaacattattgtcccacaatattaccttaagatttttcttttccgcactacctgaacattgtaatacagacaaacttgatttcttctagaagataacattttcaatactgtcccacttctcatcttaaaaatattgtcatgtttattctaatatccaacacaactatcaaaattgcctttttctctagaggatgaaggctgtgaaaaaaccgttcaaattctcttctttttcttttttattaccaggtccattttgcctgacaattgcaaatcagagcatacaaaataaaactgtgcagttttgtttggtttactttcaaaagagtagaaagcttgaaaagattctgaaaccacagtttcattattctcataatccttctgcaactgaaattacatattgcaggagacattttcatatcatcaatgtgacatttacaccacactttcaaagacaatcactgaaacaaaaattgtctttatgagctaaaaatatgcagaatctctgcctagaatctttattcaaacttttattagccagtgaaacacttgcttgccaactgccaagccatacttattaagttcgaacatgtttcacttaaggagagacacctagcttagtcatggcaagttgccattttgtaaactaaggattttggactgagatttcttaaatctttcttcaaatctcccacaagtatatacttttaaattatggagtattttaagtctacaaaaaggtataaataataatataatgaattcctatatacctaatacccagtttaagacaccaaatataacaagtataattacatcctccaatgtaccgtttccttattccacagatatctttttcattattgtgaagtgatgttcagatttctagttttttttctagtttttaattttaacatcagaactgaaataaaaaattatggatacgtgttttgaattgcaaactattcctcaggaattccaattaaatttattttacttgaataggaatgatcataaaagtgattctttttttgtgactagaaattcttaagccgatggtcactatagctcatccttaatgtatggctcatttgcttttgtcactaaacggttttgtgttagaaccaccaaaattatagcttttaagagcttcctttgaccactgtctttttcttaccctagttctcttatctttgatcgtatatttctcataatgtgaaatatgatgagattcacttaggggcagcatgttagttttgggaggcaatgtcaactgtgtctctgaattcctgtcttccaaattgaagccagaccatgctgatgacctcaagtagcactgactatttgacaatagggctgataatgtaatcggcttgaattttgacttagtaactttttatgtaatactttcggagaaattctctttaggacaaagcagagagtccaatttattgagggatagattgtatctcttaaagtggtcatattattattaattttgccaaaagaagaagaatttattgaatatttatactataaaatgcagtaacattctacttgcttattacatttaaatccttgtgtaactgaatgtttacatgtcaagaggaaaagctgtaagaaaatgctgtcacagacccatccctgtggcatcgtcagcagaatactgcttgcttacaatctttattatgcattcttataacataacctcagagtatctttaccaaaggtttttaaagtaaatctctttttaagatagacttattcttttataataatgaatgtgcactcatacatatgtagaaacatttagatttagagttttttttttctttcacaaggtataataaggaaaggatcctacaatattttattctagggtttcttaaatatatgatttatattactgtcttttctattaatcatttgatttaaacaatgccaagtcactcttttttagttgcatgaaattttgcctgcaacagagagaaaaagattgtattactttaatgattataatcatactgtctgctgatataatatcataattgttgtggtttaaatacataaatagtagaaaaatcagagtctataacagaaagtttgtaaaaatatactgattttgaaaagtatcaggaatataaatatttggtaattctgtgtaacaagagagacatggaaaaggaaaaaaatccactatatcatgggctctgcagaacatatcaaaataggatttcttaaatttttcaacccccagaccatactgactcaacatggagtctcactggccaagaaaattgcctttaaaactcgaaaataaggccaggtgtggtgactcacacttgtaatcccagcaatttgggaggctgagacaggaggattgcctgaggccaggagtttgacaccagcctgggcaacatagtgagaccttgtctctacaaaaaataaaataaaataaaaaccaaattagccagacatggtggcatgcgcttgtttaaaaaaacaaataaataaataatcgactcaaaaataagtcatgtgtcccagcataaggcatcaggttgttagatgctggcatctctgcagctcaaagatgtgggttctttttcttgtcattaacacattgttatttctgtaggagcaacttctctgatcaaaattacttttctgggtatgtgctgattaagggggtggacttatcaacactataattgttccctatgaaagattccacagagatgtttatggtgaggtttaaaggatatgaaactctacatttaaacaagtattttatatttgggtacagaggaagaaagagagggctttttccatggggctatagtagagagttagtggaatatagacaggactctgaaaacacaacttccagccatttttttagttagtaaaaatcctattaatgtgaaccagccaggaataacagtgttatttctattggatatggtttgggcttctcttgtcaaatctgtgtcggctgccccctgatccttccattatcaagttttgaagggtgttggggaaattatggcagctgctagggagatcagggaaacactgatgtaacctcaaagcctctcaccattcctcttggcttggaaaggctttattttttcatatacatttctagaaatattgctattctaccttagtatttcacatttgtagttcaaacaagcgattgtccatctgttgcctagagctatagtacatgtgtgttatgaatgaaatatgacagcatgttccatacccctgctttagccatctgtgggaaaccagcaaactgaaaaagacacctctgcaaaatgtgcctcaagtccatttcttgggatcgctcgtttggtgcactctcgtgggagacaatcagagaacaacatatacttgtgccttattttcaaagaatctatttacactactatgaatattccactgaagagtcaatgatgtaaatgataaccaccaaatctcaaaaatatactcaccaaaaagtaaaaaagtaaaaaaaaaaaaaaaagaaagaaagaaaagaaagagagagaagtcaacttttcatcttaatatattctagtagtatttattttttccttgtcttggaagtatctcataggtctttaaatgagtaaaacatttttatgccagaaggtgatataatggatgttagtgttttttatttgattttacagtagttttagtcagataatgaggacagagacttcaacttgattctttaccaccattcagcatattttttaattgtcttcattgtatttgcttaatagtggtccagacaagttcaaaacttgttctcagtgaggcattaatatggtgcaaccatgaatatttcaggccaagttattcacttgacagataactagaatgaaacttttctcatgaggctgttgtttggttagcatagccttatttcaaaccttaaaaagttacctgactgaagctactatgacttggtaaggattcttcctctcttgctttcttcctcccttcctttcttcctcttccttcctcctcttcttattttctttcctactttccatcctacctattagtgttgctgtacttggattttttgtaaattaaatcaatgcattatgattttagggaattatgattatattcataaggggaaggctaccagaaaatatatgtggcatccataaaatcttcttttataggggcatattttttaggttgtatttattcgtaaagtgaaatgagataatagagtctttctgtttcatgttaatgaattttcatcagggactgaggtcatagattcttggaaaattcatttgtgactgatctagttttctcagctgtatgcaaagtaatctttcaaagactaggttaagattttttttttaagtctgaagcaatgtaaccccaaaaaattataattttaatgatggcattttattttattccattgcagcttgataactttccttatagcaaaggaataactattgtattttcagaattttaacacagattaacacttagcctgtaagactaataatatattgtaatagttgatactaaaatatttttcagcaggttggacagcaccagtttttcttagatcacagactacaggcagaatttcccttcaatccagaaaaaaggacactaatttccttttctatttaattttcctggcccttgtgcaaaaaattgtggactctatcttagttacaacatgcatgtcccttattttgtggagagctgtgtgaaagatgcgttttttttctttttttcttttttttttttttgagacggagtctggctctgtcacccaggctggagtgcaatggcacgatctcctctcactgcaagctccgcctcccaggttcacgccattctcctgtctcagcctcccgagtagctgggactacaggcgcctgccaccacgcccggctaatttttttgtatttttagtagagatggagtttcacagtgttagccaggatggcctcgatctcctgacctcgtgatccacccgcctcggcctcccaaagtgctgggattacaggcgtgagccaccgtgccccgcgtgtttttttctttagctgattgacaggtccccttcaaagttacaaaaaaaagtgctaatttttgctgttaaattctggttgttatttaattgacagaagtctcttgatgcacgaataaatatctctacatctagcctttgttaaaaataaaaattaatattctacaaacacctacatatactagagaggggtgaaacactgcagctaattcctttataatactttcagatgattgcattaagcctttcatgttatgtggcattgttaatttttcctagatacccatccacttaagggccagagaaatccttattcatttaactctggtgggcatttatgtaacatacccaaataaaaacgttattaaacagccacaatcgcattcagtcaacttggcactgaatgtagcttctaaaatcagttctctaccctacgaatggaatgttctaccaagaaagagaagcatcaccatgtcatcttgtgttctacaccactatagagagttacagttgcccccaaacacgaatgctattcccaaataaaatagaatcatgctttgggaggccaaggcgggccgatcacgaggtcaggagatcgagaccatcctggctaacacggtgaaaccccgtctctactaaaaaaaaaaaaaaatacaaaaaattagcctggctcagtggcgggcgcctgtagtcccagctactcaggaggctgaggcaggagaatggcgtgaacccgggaagcggagctttcagtgagccgagatagcgccactgcagtccggcctgggcgaaagagcgagactccgtctcaaaaaaaaaaaaaaaaaaataggatcatggcccttttaaagatctgaatcttctctgttattttcctgatgaatcaccatcccatatcttcttagtcctggccagtatgtagttgcgctcacatacgtctattctagctctgtagctccacaaaacaagtcttaagtccaaatctttgcctcttcatgtctgatatcaccaactcattcagcttttcttcacttattgacatagtgtcatgtcctatcactctctgctgcttctttaaacagtggacacaaacatattttctaattttcagtgtactcagtgaaacttggcagttcaccatgagtcaggctaggttgaaaggctttctttagggttgaaagtaaacgaaattggaatcacccaaagagaatttccccaaaaaacctcagacccagaagtgtaaaagctacagaaggatagaactcccatgtctacagacagttctgttactttttgttctgtactattttggatgttgccaaaatcaaattcatcctgaaaacaggaagcaagctaatgcatatgccatccatgagattcccacttctgggtcagttcatattccattcaaccttttccttttatccttgtcttcttcagaataagacatttttcctccatattttcatattaaatattaacactttataggttctactttaatatatggacactttacaggttatacataaatatttgctggttgattgatttcgagattcattcattctgtgctcaaatatttgtacctagagacgttacatgttagaaaaagtgagcagcttctttctctaatcatttaggagtccatatttttcttttctttttgttctcccaacatccttatctcttactcagctcttcaatttataattaccaaataatcactgttagagaatcagcccctaagtaactttgattctggccaactgtaataagatccaaccacttaaatctgtacttactcaataggaaggaatgtgacatcaggaagagtcattccagtgacattagtaagactttatggagtacataaaatttgataagaaatcttgagctgattctttgacttgatttagaagttgagaaaagagtatttaaggcacaacagggaaacatgggctatactcagagaagaccctctgcattggccaaaatatcatggattctggaaattccttcttaacagaaaaaaaaggcttccaaataatcaggctgaatgggaagaaaaaggcatagaggaagcctgaggaagtatttacttgcttttcccatctctttataattggaagagaagatgatctgccaaaatataacccagcatgcacagtatggacaggaagcagccctccatgaactttattatcacagaatatgagcattcttattgatccacagctacatcttctattcttgcagcaagggtacatgtcctttgaccctccacaaaagaacaagcaggacatctctattttcctattgagtctgagtccattattagaaaggacttcccagccatcttttctacttggtattaaaattcccttacagattcattgctaagtgccaattctttttttttcttttgagacggagtcttgctctgtcgcccaggctggagtgcagtggcgcaatctcggctcactgcaagctccgcttctcgggttcacgccattctcctgcctcagcctcccgagtagctgggactacagacgcccgccaccgcgcccagctaattttttttgtacttttagtagagacggggtttcaccgtggtctcgatctcctgacctcgtgatccgcccgcctcggcctcccaaagtgccaattctgactctacttaaacatcacctgtatcagggagctcattattccttgaggtcttacatttctttcagcacattttgttccaagctacacgactttaaaacagagccagcctttggggcatatgttctctttggtgccacacaaaacctgtagtacatgatacagtgttgcttcccccctccttttccttccatatatatttgttttgttttgggcattgcattacttttttgaatttttaagaatctctaaaattagtctgaaggatgttctgagggccagacattagaatttgtgagtttttttgttgctggttgtactttcctatttagaagacagaccgttctgacagttgttgtgtagcttcatgccttccccagtaactaacccatgaacagtacaccccttttatctgacttgttgataatgaccttaaaaatgttaggaaatgggccgggcgcggtggctcgtgcctgtaatccagcactttgggaggccgaggcgagcggatcatgaggtcaagagatcgagaccatcctggtcaacatggtgaaaccccgactctactaaaaaaaatacaaaaattagccgggcgtgttggcgggcgcctgtagtcccaactacttgggaggctgaggcaggagaatcacctgaacccaggaggcagaggttgcagtgagcagagattgcgccactgcactccagcctgggcgacagaacgagactccgtctcaaaaaaaaaaaaaaaaaaaaaaggttgggaaatattggtgtataatccccatgtctaacaaggaagaagtcaaaagcaaaagatagtggtattgccgaaaactcattatttctagttagttcatctgtggaaaaggatatcgttcttgaggagaggggttctattatgctatagttttctatggaaatgtacaaatgctttcctcattgctctggatgactatttagtttaaataatatacctttgtcatggggaagaccatgattgtggcttcttctaccccaactttgaatgagagagcactgtaagcagaaactgccatcagtctcctgggcaggacctggaggtaactttctgagctgtaaaatagtaattcctaagagagcttacaaactgcttccacacagaaaatagcgcagggaggacagttattagtacccctattctagaagagaaagctgaggctcaagccattaagtgacttgccaaaagctgtgacatagctgggaagtggcagatttggggatataaccaggtcttgcaagtccagtgctgtctccaaagtagccacgctcacagctgagaacaccttagaggacaatatcgacttcttacagactaccaagcccccagtcatccagggaaattcagagaccaattgactgccaggtggcaaatccacatgtgtactgcggtctttagagatcatttagagcttgcacacatctgtgtcttcttgtgggaaacctctaggtattctgtctgatcagcactgtgaggaagttggtgggaaaaggccactgataagaacaaacaatgggcagaaggaagcacattgcaataaatttccccagagagagttcctttacattccattcaccaaaaacctctctggaactgtcaggttcagaatatcaaccaagaccatatcatttagaattcattggcatgtagaggtgactcgattcctaaaagaagcctctctcccatgaaccacgatgtacgttccacagaggcagaaaccgccgtaggttagcaatgcattttagtctttctctccattcacatttactgagagcacaccacgtgcatgttgctgcaacaggcatttccgatagagccgatccatgagctaacaatgtctgaaaacaaatgttatggaactgttggcatttctgagatttggcctttgccatttgatagactttgcttcccaggatgctgtcattttgtgattttttataattacaaggaatttggtaccatgttgttttcaaaaaacctcctagaaagtctccatgtatgctctagaagttgctctacgtaacagttcagcaagcaagtgttccttctcttgagctgcgtccctcaggaagctgtacctttagggtgtgctttccactttttatttcctctcatttcactcctttcattgtttgctatatcctaaaatatgtgaagtgagagaaaaaatatcatttcttctcattaaatctcctgcattaaatctaagaatcctttaaaataatcacacctgataagtgttttatgcatttccctccctggagtgttatcatccatcaagccagtatcatcatccacctgcttattccttgggactaatgagagccaagttaaatagcaaatgacttctcaccccttcctagtcctcatgcctgaggaataagggcgacattaatgggagcgggagagtggtggctttggttgagatgcacgttcacagactagaaaagtgcctcacctccatggtgtatatgtgccaccttttcttaatccagtctatcattgttggacatttgggttggttccaagtctttgctattgtgaatagtgccgcaataaacataagtgtgcatgtgtctttatagcagcatgatttataatcctttgggtatatacccagtaatgggatggctgggtcaaatggtatttctagttctagatccctgaggaatctccacactgacttccacaatggttgaactagttcacagtcccaccaacagtgtaaaagtgttcttatttctccacatcctctccagcacctgttgtttcctgactttttaatgattgccattctaactggtgtgagatggtatctcatagtggttttgatttgcatttctctgatggccagtgatggtgagcattttttcatgtgtttcttggctgcataaatgtcttcttttgagaagtgtctgttcaatactatgcagccataaaaaatgatgagttcatgtcctttgtagggacatggatgaaattggaaatcatcattctcagtaaactatctcaaggacaaaaaaccaaacaccacatgttctcactcacaggtgggaattgaacaatgagaacacatggacacaggaaggggaacatcacactctggggactgttgtggggtggagggaggagggagggatagcattaggagatatacctaatgctaaatgacgagttaatgggtgcagcacaccagcatggcacatgtatacatatgtaactaacctgcacattgtgcacatgtaccctaaaacttaaagtataataataatgaaataaaattaaaaaaaaaaaagaaaagtgcctcacctccctgtgaggcttgatgaatattgtggccagtgagtggaaaatgattcttgtcgaatagacagagtattcccaccccaggaatggattaatagaagacacaatttgagcacttctcagaattatctagtatgcctgagtagagactcacatgggtggaatctgtgttgtctcatcagagggaataaaaagacaatgaggtggtaaatgtgaaaaaagcagccttttagaaaaacattattttcaaatacctttataaatcatctaatttatcttcacataatataaagaaaaaactaataaaaattttcgtatttcactttacataatatgttctcccatatttagggatcatacaattgtattgtcttcaaaacacacacacacacacatacacacacacacacacacacacacacaccccttccaagaaagctgatccttcagaaaataaatcttatttttaagcacttgggttttcaggccagaaaattaataaatcctaaacctgacccatttttgtaacagctaaaaaggagaagaaaaagctagttaaattttgtgtggatccatttatctcttaaaatatgccaaagcaatttgaggtgggggtggaaacaggtatttatctctcatgcgtgattctctctttatatttctatctgttgggaaaagggtaaagaactattcttggtcattattgatgtattgtgttgccactttgtatggtgcctgctgtgctttatcccgaggcatagcagtaatcgttactatcttgactctttccttcatcacaagagagtaaatatgaagtctgaatgtcgttcctcacccccaaattgtttaactctgcttccaaactagtttaagaaatgcaaaatgggaagagctagcttttcttagatacatttcttccttttttattctttcttgggagacgttaagtataaaagggaaaaagtcagttccttcttctctctctttctctttgggtgacagcaatgctcacttagtaattataaactggaaataggagagtagcttgagcaggttatgatatatctgcccaatgtgtttcattccttcaaacataaactttgagagtaaaagagatttttataatttaaatgccaacgacaggaatggcctcatgttttaactttcaaataataaatggggagttggtatttgggcagagtttgcattttactaatcctatatactttgagcttagtttttagaattgtgtcaaatacatcaacatatcaggattatagtgccaaaaatagttaaagtgccttggtcctccctctgtaggcagcaaattgaaactaacatgggaccatgccatccttctagcataatggagaagtctgaactgaggagtatctttgatgaaagacatttaggaccctagaaactaaatcttgtcaccaagactttatagtaaagtagtagcaaaattatttttaaaagactttcttccttttactacccatttcctctcttgggaaagctgatgagcaaattatccaagactcatttctttattaggcaaagtcagaatatttcccctctgaaaatctgaattatgccctcattctttttcaagaaatatctcaaagagcaaatagaattaaacatgacacttgattgtctgattatttggcatgtataaaattatcatgtggcttaatgtgccttaagtgaaaatttaaacttagacctgaaacctttacagttggatgtagcgttgagcttttgcatgttttctgtataataaaccacttttgttttgtttgttttgtcttttaacctacacctttatcattactctaacagatttagggcttctctttctctacagctaagtaagggaatatgtgcaattatgagacatacaaaaaaggaaagggaaaggactttctaagtagcaaatctgtgccatgaagtagatgtggcgtgaagatacagagcctgaggatagtaattttccctgagccacgcacacaggcttttatttcatgccttttctctttctgtgccgtcacctttgagaaaaacgattgcaccttctccaagtctgcctttttaacagctacagttaagttggcaagacttccccagctctgaatatagccatttgccgactccggcctctttgcgagactgactcaaatctgtgatcttctgttcagcatacacatcagcaaagtgagaagatgagcactaaatataggctctattaactttacttttagatttactgccttcaaaaagtgcctattctgagcaacataaacgttattccttacatatgtatgtacacacggtacccagagtcgtactgtgcagccttcaaaaacataccatcagaaagagtaggtgctgagataaggaaactttgccaaatgaaagaaagtcactcacttccaatatcccctctcaagcggctaccgtgaaacgggctgcaaacacattccctgagcatcccttgctgatacagcttctttatatttatatcctactggatggtagcatattgctaaggtttcctgtactctgcttcaagggaatgtaagctttatggcattgaaacatttagggaaaaaaaagatgtttaagagaattaatagagccgtagtctgtattaggatgtgtgtcatatgtgtgttctataaactaagcatcggtgggtttagagtgttaaagtgtcagcacattccttctccttttgtctctcaggctaacatgagagaaaatagaaaagtcttggctgtggggattggaagctcagggggccaaatgtccttgccagatccttagagcattactttgactcctaaaaatagtagtgtatgttatttgatggcttttgtttccatagttccatcactgacaaaactgtcaatactgttgatggagcagcagcatagcctagagtgatgcattcttacccagaggtggcaataggagagggtccatgtaaataggacgaggtagacagtgcatgattgtaggagaagggttgaagggaggacatgattccaaaaaagatcgttctcaatgtgtcgtctgactcaaccagctggcagattacacttgccaagtcgttccctttccttctaagtcagttggctccatattcacttgaatatgcctctgtttgggcaaagcaagatacctccacttaacctttatccaaggaagctcttggtgtcctcttggtcataaagttgtctcctacctaacccagttttaccaaatggaagtaaaaggggacaaactatggaagatggactccatgccattgcagtcagccaccattctcttttccatataaggagccccattacataagctacgggtgaggttggaacagctatgtttcataatttcaagagtgtgaccaccctgctctagtcatcatcattggatgaatccagttgactctttggcaaaagggtgatacttttcactaaaaatgcctactcttcctgttgatgttccttttctgtttttaccttgtccaatttccacactagtcattttttttattttttagaggatcagattttagcgctggaaaatgagttcaaaaatttcagtgtaatgtcataaggatgttgggatacagagattttttttttccttggaaacaaatggactgggaagaaacacagcatggctttgctctgagtttcaatctgatgattatgaccatggaagatagtcttatgtaaaggttaaatggtgtttacaagtggatagataaggcggagatggtgagaagccgggttttctctatgctaaatgtgtctactaagagcagcacttcctactagctaagcacaatcatagccccaccgtgatgagctgctagtctgaataacattccctgacttagggaaaggcacacaaaaacatataaagaatatgtctattttcatatgtgtgatactgacagagccatggtattcctaaaatataggtttctcttttttcttgtattcttagcaaattgcatttattcactacattacaaaccatcactgatgtatccaaaatagcacacatagttcagtatgaaaataagagaataaaatctgttataagcaagtgatttaggtattttcttttgtgtttatgcattatctgactatattaaaacctgtttttctatttaccttctatcagttttctctaccaattatgttttttcaatgctctataagaatgaatatggaaattatatttcttttttctgtaaaagagttgcaactactttattatatttagaaatccaataaacttcttattacatttacttgcctatgtgtggaattctttttgagttggataatctctgtttccttttcttctaaccccctttactgtgtgactcattttttacatcatttgctttccatatggtcttctgagaaacggaatatctctcatagcaaatatggtgccacaagagtatgaaagcacccactctcttccactgttagcacagaagaacttaaggtcagaggtgttctaaaattatttgaccactctgtgtcttgaccttgcaaagacattttcatttttaaagctggatccaagtaaatgggtcccttagggtggggttggggttctccattttcatcacaaacaagtggctgacttgttcatacttttattccatctgtattacgcatgcttttcaaacattgagaatttcctctgtactaggcatcttgagcaatacagctatcaatgacatatagttcctttcaatgagtttatagtctagttaagctgatagatatggatacaaatacctatggggaaaggaaaggaataaccacaaacaggaaaaagtaacttagcatgttccagacttttcactgtcactccattttcaatatccttgtgattatcttaccctcattttatagatgaaaattccaagagtgaggaaaaaagttaataacccaagatcagcattcatttgctgagcctttttttttttcattttttaaagtagcagttctacagaagaaccaagactcctgatacccagtctattgatgcttaataagagtgattagcactacagcatacgtgaaactcaccccacgaaagtcagaaaagattatctgttctcttttctacttatctctccaacatcacatttctgcctactagtgctgggacatctgagaactacaggtgggaagactctgtactaaagaccactattttaaactgccatacacaagatcaatctttgaacaaacaaagggtaggtatatcaatgggacttgtggtacttgtaatttcttaccagaaagttgtaaacaaaagaatacatgagatgtaaccttgtcttctctttattcttctacaaagaagctgtaagaggtaatcttatcttccttctccctgtatttctcaaattactctgttttttcacctacccttctgctctgttttctaatagtatacattcatttgttctattcagagtgtaagagctagaagggcctttagagattattttactctgactttgtgaagaaatactaagtctcagagatatgaaaagacttatccaaagtcataaaatattttaatgacagggctggatcttgagtcctggcctcctgactctctgtccattgctgtatacaaatgatttgaataatgcagaagagagtggaagacgcattctatttataatttacatttcaaggaaaaagaaatttcaaatgaaaaaaaaactgagtgtttaatgtccagataccctaattaatagaaattctaaaaatcatgttgcaggaagagagaaagctgagaaggaatgaatatcaacaaggcaacaggaaggctgagcaaagaaggtaggcaaccatatagtcaattctaaacagactggaatagcaaacaattattttctaagttgagggacttaaaaaagttgagctaaaatactggacgatagtggaatgtaggcccaatgactagagttaaatctttgtaagatttttgttgattttggagaagactggtgctgttgattatctttacatttttaagttatgtatatatgtaaatatttcaatggctgccatctaaagaaaacaaatatataactgcaaaatcagtagaaaggagaaattgaattggggaaaagcagaaatgaaacaatttttttttttttgagttggagtgtgcccttgtcgcccaggctggaatgcaatggtaccatcccagctcactgcaacttccgcctcctgggttcaagcgattcttctgcctcagcctcccaagtagctgggcttacaggcacccgccactacccccggctgatttttatatttttagtagagacggggtttcgccatgttggccaggctagtctcgaactcctgaccacaggtgatccgcccacctcggcctcccaaagtgctgggattacaggcgtgagccatcacacccaacccataaaaattcaaagatccaccctcagagaaggatattttaataacaccttcttcagtaactattcaagtaatgagttaaaaacaaaaaatcactaaagatatagaagattttaacattattaaaaggcttgattttaatggatatataagaatctccatacttattggataaaaaataagcttttaaaatatatacattatatatatatatacattatatatatatacattatatatatatatatacatcatatatatatatataaagtgcatatgagaaatctactaaaactgaccttctaggccaattatctgcaaaattcaaagcatctttcacacaaattgaatattttcatcatgtcaacatttaacgcaaattaaaaaccatgggtaattttaaaaatttacatttggaaattttaaaacatccctaaaatggcttacttcaaaatagaaatcataatcataagaactgaacaataatgaaaattctatgtagtaaaacttgtaggagtcagctcaaatggttccaagagggaaatgtaaatccttaaatgattacattaaaaataaagtgaaaattaatgagctactcatccaactcacgttagtaaaagaacagaattaagattcaaaatataaggagggcataattaaaatatgaaaaaaatgaaactaatggtatagaaaacaagaatataatagaatatcaaaacagtcaaaatttggcactttgaaaaagcgttagaaattgcaaatttctgggaaggtttatcaagaaaaaaaggcatgaaaaatatttatagataacagcaggtattagaaacataacagaatagcatgagcaatttcatgtgattaatttgaaaatgtagatgaaataaaaatgttcctctttaaaaattgtaacctaacaaaaagtgagtaaaaaaaaatagacaacatgaataacccaataaagttaaattgtattagtggttaaaatattcccaataaataattacttgaagggagcatgagaatggcttttgggttaacattttaggttggtaacattctgcttcacgatctgagtgctggttatatgattgtgtttagtgtttgaaaatgtattgagcaatacatttatgatttgtgcattttatttatatactacttcagtggataaaatattttctttatcgaaaactacctagtatcttgattctaaatgtgaattctactggttgttcaagttagaattacaatggaaaaaaaaagggaacactctccaacataatctataaggcaagtggccaatcttattagtgaatatatcgattaaaatcttataaactactggaaaaccaagcacagtaatgaagaaaacaacgacaacaacaaagctcaaataagttgggtgtaaccctgaaatagaagagtagttgaacattagaaagtctattaacatggcccggagccgtggctcacacctgtaatcccagcagtttgggaggttgaggtgggcaatcacttgaggtcaggagttggaaaccagcgtggccaacatggtgaaaccccgtctctactaaaaaatacaaaaattagccaggcgtgatggtgggtgcctgtaatcccagctactcgagagactaaggcaggggcatctctagaccctggggggccaaggttacagtgagcggaaccacattcacagaacaaaatagagaggccttatgattggctgagcgtggtggctcatgcttgtaatcccagcactttgggaggccgaggtgggtgggtcacttgaggtcaggagttcgagaccagcctgggcaatatggtgaaacctcatctctactaaaaatacaaaaattagctgggcatggtggcaggcgcttgtaatcccagctactcaggaggctgaggcaggagaatcgcttgaaccctgcaggtggagtttgcagtaagccaagattgtgccattgcactccagcctgggtgagagagtgagactctgtttttgtttctttgtttgtttgttttaaaagaaaggtcttttgattaaattatttaatagatttttaaaaacagtataataaaagaaaacatttatgttttaaaaaaacacacagcaggagtggaaaggactttcttaactggataaaggctatctatgcaaaaatcactccaaatagtgaaacgttaaaagtaattattttaagtctaaaataagagaaagatgctcactatctttcttttattgataggccccttctattcaattttgtaatgaagactctagtcagtgcagctatattaaaaacatgaattttatatatatatatatataaagactataaaaagccaaactgccacctatgatatagctatatagcaaactatatagaaactcaaagtaatatgtaaaaaattcacatttaaaagtttatcaccaggtgtggtggctcatgcctgtaatcccagcactttgggagtctgaggtaagtggatcacctgaggtcaggaatttgagagcagtctggccaacatggtgaaaccccatctctactaaaataaaaaattagcctgacgtggtggcaggcgcctgtagtcccagctactcgggaggctgaggcaggagaatcacttgaacccgggaggcagaggttgcagtgagccgagattgcaccactgcactccagcctgggggacaacagcgagactccgtatcaaaacaaaacaaaacagaaaagtttatcaagtttggtagatataacattaatgcaccaaaaaattcattaatagcaaaaaaaaaaatgtgcctcagaatatctttttaaatgggcaagggattaatgaataaaatcttaaaactttactgaaagacattaaagaggatggaaataaatggaaagataaagatgttcaaaaatgggaaaataatatcataataatgtaaatttttcctaaattgatccatagatttaatgaaactctaaatttcaccaaatcttttcagggactctgacaaactaattctaaagtttacatgaaaaacaaatgcaaaataacacttttttaagaaaaatgagggattattttttaatcaggtaaaactttctataaaactatgttagttaacagagtgtattagttgtaccaaaaaaaaggagaaaagtagaaatagatgacggttgagaatccttggaaaaaaaaaatcacctgtttatggtattataactccatgtgtaacagggatgatattgcagatcactgaaataattgtttttacatgtggaaaaaaataacatccaatgtctaactcagtattaaaatatctttatgacttttatgaatgatttctgggtttttcgttttgtgtttttgatacagagtcttgctctgtcacccaggctggaatcagtggcacaatctccgctcactgcaaggtccgcctcccgggttcaagagattctcctgcctcagcctcccgagtagctgggattacaggcacatgccacccacgcccagctaatttttgtatttttagtagagacagggtttcaccatgttggtcaggctcgtcttgagctcctgactcctcaagtgatccacccacctcggcctcccaaagtgctgggattacaggcgtgagccaccatgcccagctggtgaatgatttcttgaacaaaatacaaactgtgaaagctataactaaaagaatggacaaataagtttccacaaaaattaataaacttggtaaatcaaaagattcataatagctttaaactgggaaaagctatttgccagacataaaattgacaaaggattactatccaaaatatattttaaaattcctaagaagtttcagtagaaaaacaggcacaagagtaggcatttcatggaagaagaaacacacatggccaattgacacatgcaagaacaattgagttagtcattagggaattacaaattaaaactaatgtaatttatgcttccttttttttttttttttttttttttgacagagtctcgctctgtagccaggctggagtgcagggtgccatctcggctcaccgcaacctctgccttcctggttcaagcaattctccttcctcagccttctgagtagctgggactacaggcacccgccaacacgcccagctaatttttttggatttttgtagtggagacagggtttcaccatgttggccaagatggtctccatctcctgacctcgtgatctgccctcctcggcctcccaaagtgctgggagtaagttaccatttttttataccaaccaaatcagcaaaaatctaacagtatgataatgccaagtgttagagagatatggagcaatgaatatttatacaaatattgatgggatctaaattgctaaaataatcttggaaaataatttagctgtatcaataaagatgaagatgtgccatccctaagaccagcaattctgctcttgtctatttgcctcagcggcatatacaataatgtacagagctacactgtttataatgacaagaatctgaaaatatctatccaagaagaatcaatcaataaatagtatattcctgccgtagaataatgtacaacagtaaaaattaatgcactatagttgaataaatcaatatggtcaattcttagaagcatgacattgggtggaaaaaatagtcataaaagaataaacacatacataccatatcattggtaggaaattttaaaacaagctaaactaattacattgtttaaggatacatgcatacacacatattctggaaatataggataaagtgaaggagatgtgattggtgaaagacatttgggaaccttcagtagtctttattaattttgttagttgcattatgggttcataggcattcattttattattatacattataatatgtgttatatttatatcatatattttataatagtttacagagaaagaaagggaagaaatgttcccttgcccttccattttcctctccagcacagtcaagcgctcaatataatcttttatttatgtatttttttttgagacaaagtcttcctctgtcacccaggcagcagtgcagtggcgctacctcggctcactgcaacctccgcctcccgcattcaagcgattctcctgcctcagcctcccaagtagctgagattgcaggcacgtgccaccacaccctgctgatttttgtgtttttagcagagaca

SEQ ID NO: 5646 - DNA, 41028 bp, Homo sapiens
  LOC391674 gene - 84525511 - 84526538 of chr4; NCBI Entrez Gene ID: 391674; Build 35; sequence includes 20,000 bases upstream of initiation codon and 20,000 bases downstream of termination codon of the gene
acagacactatattaaagacttgcagaaatatggacgctgaccaagcagactggatggggatgtggtcctctgtaatgaggcaaaagtaagaaatagagatgtagactatgtggactctaagggctacaggaccaccccttgagaatcactctaaggagggctctgtatgttccatcaaggtcaccagcaacattcagtcatcctcctggcaaggaattgtcctggaaaggcatctctcaaattgttgggttgacacaatggtctccctggtgaatgttatgggctgaattgtgtctccccctccaaatttatatgttggagctcaaactccgagtatctcagaatgggacttattaggagataggtcctttatttattttttatttattttgagacagagtcttgctctgttgaccaggctggagtgcagtagcacaatcttggctcactgcaacctccgcctcctgggttcaagtggtcctcccacctcagcctcccaagtagctgggactacaggtgcatgccaccatgcctggctatttttgtatttttagtagtagatatggggttttactatgttggccaggctggtcttgaacttctaacctcaggtgatctgcccacctcagcctcccaaagtgctgaaatttcaggtgtgagccatcatgcctggcctggagatagggcctttaaagaggtgactgaattaaaattaggccattaatgtgggtcctaatccaatctgactggtgtccttataataagaagaaatttggggtggggctggtgactcatgtctgtaatcccaacactttgggaggctgaggtaggaggattgcttgagggcaggagtttgagacctgcctgggcaacatatcgagacccccatctctataaaaaatacacaaattagccgggcatggtagtgtacacctgaggaacctgagcgggaagaattgcttgaggcccggaggttgaggctgcagtgagccatgattgcaccactgcattccagcctgggcagcagagcaaggccccaactcaaaaaaataaaaattaaaaaaaatgaaaaatttttaaaaagaggaaatttggacagaaaaatagacactaaggatgtatatacacagaagaaagaccacctggggacacagtgagaaggctggtctctgcaggccaagaagagaggcctcagaagaaaccaaacctactgactccttggactttccagcctccagaactatgagaaaataaatttctgttgcttaagccacccagtttgtggtatttagtcatagcagttcttgcaaactaatatggtgggtaatcatattccaaccttgcgaagatttagatttaggagtagaaatgtttaagaggatattatctacagtattcatatttttgtattaatgtgtacattacttactgtaagtagttgcaatgtttaagagaatttggtctgttgaaactagagatcagtcttgtgtttcctaaacaccaaagggagtgacttacattctaagtcagattgttactaagatcttttaagaacttaaaaatcaccatatttatgtgtttgatctactagatttgtatgcattatttaggttcccaggaaagttttgacattaaattgaataattattgatattaagaaaataaataatgttaaatttataaatgcactttaagaggttttaaggagtttatctaatagcatttgttaatggaaccaaaccatatttaggcccttcaagtgcttttaaaatttgctatatttctgaaagaacaacaagaattctaagttgaacttaaatcttaaggtcaatgaagttttttttttttgagatggagtctcgctcgctctgtcacccaggctggggtgcagtggggtaatcttggctcactgcaacctccgcctccgaggttcaaccaattctcctgcctcagcttcctgagtagctgggattacaggcgtgcaccaccatgcccagctaatttttgtatttttagtagagatggggtttcaccatgttggccaagctggtctcgaactcctgaccttgtgatccgcccgccttggcctcccaaagtactggaattacaggcatgagccaccatgcctggcggtaagcgaagtttttaagttgtaactttagtaaattaaatattaatttttaaagctaagtaacctctgaataaccttttttgatgcataaaagccaacctcaagggcatcaaaagagtcatctacgtttatatttgaactctgtaacttctgaataatgtgcaaagcatgtcctctgggatccgagggaccaggtgtaatggggttaagttgaattcaaagcttgaacacgtagccttcttgttttctgtaactattctcttcttgtccagaaggccccgtttcctctgatggcgagatagagtgatgaagtgaaggtagatcaccaaacataaactttccaagtaaaggtagccagagtctactttggggttaacctaatctcttttggggaaatgctcagcgttttaggcattttcttctctcctcttcccttagccaagatggccttggggagagggaaagtttatgcactcacgtggcattggtggtgttgtggctggttcacagtgggcttttgtttggcccagtgggcacttgctgggctcttgttgcagtgttttgtcccactgaaaccaggtcattggtctctgatgtcatcgcctcctcttgacctccagtggcattgttgcattgcctcggagctctgcaggctgactaggccttttggactttccagttttatccaaagcacacaggaggcccctacaaaagaacactccccaggaacctttgtctcaggaaatctttccagcgtctgcctctgaactactctctgtcctgtcctctactccagacttttcccttgtgattaagttcttgtctccttggactaggtcctttgtatcagacagaaagctgcccttatgtgggtgggggcataagtctctctttggttccaccctataaccctgggccagcccttcttattctcaagcagagtcctggatcctgagaccctagtctgaacctgtatcccatccccataatttgagtaggtgaagcaaaaatgaatctgtaccccatccccataatttgagtaggtgaagcaaaaatgatcaaatctggccaggcatggtggctcatccctgttgttccagcactttggggggctgaggcgggagaactgcttgagcccaggagtctgagaccagcctaggcaacatagtgagaccttgtttccacaaacaaacaaacaacccaatctgtgaatgccaagattgcttaagaattaacaaatagcatttgaaaaagatgtaagaattgttaggaacataaaagttataggatactaattcctttaaaataaaaatgcaaagtttcttcctaattaacttttttctaacacttaggtttgagataattagaagaaaagtttacatatagattagcgtcactattagccaaatagtgcctttataaaaatcacagagaggcctttttctctggtggtggggtgtggcatagagtcctaagcaggactcacagcttggcaaggcaagaggagcacagactggattttggtccctactcacccgtcaggtggttgctttttggtaataaacatcctgcccaatcatacgaagtggcctgatatagatgatatttattaactacatgaccttgggcaaacatctcagtccttagaactttagatgcctcatataacaagtgagaggggctgacctctgaggtcctttgtatctacaaatactatgctccacggcatcagtaattttttttttcttttttttaactaaatgagagtcttcacagaaagtagaggaagtaccaaatgctggccaccggaaggaaccagtctgaaaagtagaagtgacagaaacccatgggcaaaagtggtcaggttattctagagttcatgatagggagagttggacatcattagatatatatccgagactttggtaagacacatctaaaaatttttcctaaataataagattccctggacagagactcccaaagggaagatgacaagtgtttgggagaagtgctgcaaaatgaaatctctatcttccaaacaggatgatgtggaacagaaaaaaagggggagagttatttaaagagagacacacttggccaggcgtattggttcagggcactttgggaggccgacacaggtggatcacttgaggccaggagttcaagaccagtctggccaatatggtgaaaccccatctctacaaaaactaaaaaaaaaatagctggatgctaatgctctgagatgacagatttttggaactgtggatgtaaagcccatagaccttaacattagtgtgtccagtcccatgacatttcattagcttatggcttctgctccagagactcccaccatttccccattgataagggagaggaaggaggaagtaagagattatttaaaaacagttgtgaaactaccaaggtctgtggttgagagttggttttctaaccaacctttgtctagtctagtctaacctttgactacagacatcatataagggacacggttgcctcagatgcagaagatatcaggaagggctgatttgttccacactatttgaccacactgattgcaacaggatgtggacatgttttgctatgagtgtgtcctaaaacattggaaagaaaccccacatcctgtcaccctccctgagggcaaggacacttagagtggagaaatctgaggtttaacctgtgctggggatgatgactgatacaacaaaggatataggacctcacctaatgaatttcaaagattgctgatgtaagatgcaccaagaacaaatgttggtgtcctggtagtagagcaggggaccccttgtgagacctgtctttgatcttgggaacacaaatcttacaacatatttatgactgtgaaggcaaaagaaatcttcaacgatgaggtctggaaattctgaatattctatgcaaagtattagaatttcacaagagaggactttgctcagaagagaaaaatgaacaggcaccaagtggtaattcacagaagtgtcattcccatgctcttaactctcaagtgtgttttgagatcaggaaacatggagtccttattctcactgtgtcccctgtttgaagactgattaattaagatgtcattcatgacatggtgagccatcttgagatatttgaatatcctgccaccatgggaacccagacctacctctggactaattattgggaggggattgtgggaaagaataatgactgggaaatagaaatctttaagatgctcttgagcagaacaaatttctcctccaataaagatgtccatgtgtttgtatttggcatggataataccatgtattctgtaaccccaattctttagtattagctctttgtgaaaaccttcttagaaacaaggtgatttcactagattgtgtttgggggctataattttatgatcctatgaaagattgtcccctactttgccacttctgccaataagacctctatgtcctgtctgctctcttgttcccccaaataaagcttggatttctgtaccattaactatctgcccagcatacaaacctttaagtaagaaagaaagcttcctcttaaccttcatccaaaaaaaaacaaaaacacacacaaacaaaagaaaatctgaactaggaatagagagctttggggcttcttaagtacaatgactaataaaatataaacatacttgctgtctccagggggtttataattaaaatcataatgtatattgacattgtttatcagggtaaagactatactaattggcaggaatagaatactcttttctttttttcaaaagtataagtactgaaaaatttgaccaatctctgtgttctacttactacttctaatgaagacctgacaattctacattaatttaacagtaactttaagcattggatatgttgatttgtaattatcaggagagactgagatcaagcatttatgttggtatatacattactaaaaatgatacaaaaatagggctttaataaaatgaagaaacttttttttatttatatgcacctaacagaaactgagatcagtatgtgcaacctatgtctctgccaaatttatcctccttccagccctaccttggagaggggtaatcatctaaaattaaactatttgcagacaatttttcttggaaatgtaatgttaacagaggcaattatttttctttaggctatagaaaaacaaatttttatttatttattttttattttaaaaaataatggagtggcagggtcttgctgtgttgcccagggtgggcttgaattcctgggctcaagtgatcctcccactttggtctctcaaagtgctgagattacaggcattactggcctagaaaaacaaattctgaataagtatgataagacaaattccttgccagcaactcaattttagaaaatatagtttttaatctcaggtagcttgggatggcagaaacaaactgtcttactgtttattcttgaaatatacactaagaaacctatattcataagaagaactcttttaaaagggataacatttcataaaaactttattattgacttacatttaacatatgagctgtagtattcttctagaattttatattcgtttttattttcttgagtttttttgtttttgtttttgttttgttttgttttagtttttggtttttggtttgtttgtttttttgttttttttgagacagggtctcactcactctgtcacccaggctggagtgcagtggcatgatctcggctcactgtaccctcgacctcctgggcacaagcaatactcactcagcctcttgagtagctgggactacaggcacatgcccccattcctggctaattttcgtatttttagtaaagataggattttgccatgttgcccaggctggtctcaaatttctgagctcaaacagtcctcctgccttggcctcccaaaatgctgggattccaggcataagccaccatgcccagcctattttttattttcttgaatattaaaggcattccatgactattgaagtcaactagtttaagtctaatgaagacctgattaaagttaaatatttaccaaaataaaaacaattattattaccaaagtaacaccaatctttaaaaatcattccaaaaaattaaagtatcctgcagggactatattcagcatgagagatgaagtagggaatgtcaggactctgagcctaagctaagccatcatatccctagtgacctgcatgtatacatccagatggccggttcctgccttaactggtgatattccgccacaaaagaagtgaaaatggcctgttcctgccttaactgatgacattaccttgtgaaattccttctcctggctcatcctggctcaaaagctccccctctgagcaccttgtgaccccccacccctgcccaccagagaaaaacccccctttttcctttacctacccaaatcttataaaacggccccacccctatctcccttccctgactctcttttcggactcagcccacctgcacccaggtgaaataaacagccttgttgctcacacaaagcctgtttggtggtctcttcacatggacgtgcgtgaaagggaatttgtcacagaacattcagcagacaaacttaaagagggaattttaaactagctttcagaacctaggctcagaggcagtactcaagtgaggtcctgctgcagatgacaactgcaaaagaaaatgaacattgattttctccaagttagactcatttatttagctgttactcataaagtagaagccaggtaagcagtagtgttgactcatacataatttgcaaaagagttgataaactcggacaacagcagtgggactgctttatagtttcaaaagcctcttaacatcttctctgttttgagtgcatcatcttctctaagatgaattatcttcagaccaaattatataagtcaatctgcaatggaacaagctggaggagatttagattcactatctagagaaaagtgttcatttgtttaaaagaaatactttaaactgagggaattcatcaccactagaccagtcctacaagaaatgtttgagagtccttcatctagaagtgaaagtgtcaggcctctgagcccaagctaagccatcatatgccctgtgacctgcacatatacatccagatggccggaagcaactgaagatccacaaaagtgaaaatggcctgttcctgccttaactgatgacattccaccattgcgatttgttcctgccccaccttaactgaactattaaccttgtgaaattcctcctcctggctcagaacctcccccactgagcaccttgtgacccccgcccctgcccataagagaaaaaccccctttgactgtaattttccactacccacccaaatcctgtaaaacagccccaccccatctccctttgctgactctcttttcggactcagcccgcctgtacccaggtgaaataaacagccttgttgttcacacaaagcctgtttggtggtctcttcacatggacacacatgacagaaaggatgatgtctaccatcaagaaaacacataagactgtaaaactcactggcatagcagatacacaaatgagaaagagaaaggaatcaaatgttaccactacagaaaaccaccaaaccgcaatgataaataatgaaagagacaaaagatcaatgaaacaaaaagttggttctttgcaaagaaaaacaaaattgataaactgctagctagaataaccaagaagagataagatccaaataaacataatcagaaatgaaaaaggagacatgacaacagacaccagaaatgcaaaaggtcatcagcgagaattatgaacaactatatgctcaaaaactaggaaacctagagggaattgattaaataccaggaaacatactaccttctaagattaaaccaggaagaaacagaaaacctcaacagaccaataatgagattacatcataataaaaactctccccacaaagaaaggcccagaactggatcactttattgctgaattctatcaagcttataaagaactaacactaattcttctcaaatcattccaaaaaattaaagaggagggaaatctttctaactcattctgtaaggccagcattacctgatgctaaaaccagacaaggacacacaaaaaaagaaaactatgagagaaaaatatctctcaggaacatagatgtaaaaatcctcatcaaaatactagcaaactaaatctaacaaccatcaaaaatataatacaccatgatcaagtgggatttatcccaggaatgcaaaaaatggttccacatatgcaaatcaataaatgtgatacattaaccaaaggaaggacaaaaaccatatgatcatctcaataaacacagaaaaagcatttgataaaatttaacatccttcatgataaaacgtctcaacaagttaggcgtaaaagaaacatacctcaaaataacaaaagccatatatgacaaacccacagctaacatcataccacctggggaaaagctaaaagcctttcctctaagaactggaataagacaatgatgctcacctttactattcttattcaacatagtgctggaagtcctagcctgatcgattaggaaagaggaagaaataaggacataatccaagttggaaaagaagtgaaagtgtctctctttacagatgacatgatcttatacttagaaaaacctaaagactaccaaaaaagtcttacaaatgataagtaaatccagtaaagttgaaggatacaaaaaccaatatacaaaaattggtagtttctatataaccaggatgaactaattaaaaagaaatcaagaaagcaatcccgcatttccacccacttccccacccagtgccactctggctaccctgcactcgctctgagctccaggcttctgctaagttagcaacaccatggtctccctttagctgctctcatgattacctaccctggcatcatcagccacaatagttcaacatgtataagatttgggagattgcagacaggcttgcctggagttggagggaaagatggtaagtaggacgcagggtaacactgatgacttgttcattggtggaaatgcctctgctgaaggcccttagggcaaaggtgcctcccaaagtgctgggattacaggtgtgagctaccgtgcccggccaggtctaaatatttgtaacgaactgttaaataaaatatgttctaccctcacatcttgacaaatacacttttataataacctggaagggcaggttcctatttagaattctcagacttcttggggtctccagattatggagacagctggctccctggctgcccatccctggtctgagggcatttcctcttttatttctacctatgccccatcctacactacaaagggctttgtggacacatgtgtggacacctgatgctgcatagctaagctctaaccacacccacttcataaaatgtgtgtcccctgggcatccttagccattagggttgtgtactccagctgtgcagtctgcccttaggaggacttaatcaggaaagagaatgtactagccctgtaaataggctccaagtggtttgggcagataattctgcagtctaaggcacccagacgtagatgaatagtattccattgtatagatcactttgggtaatatggacgttttaacaactttaatccttccagtccatgagcatgagctatctttccatttatttgtgtcttctatttttctaattattttttaaatagttttcagtgtactgatttttgtgtgttgattttggatcctacaactttactgtatttgtttatcttaacagttttttggtggagtctctggggttttctatatataaggacacgttattggcaaacaggtgtaatttaacttctccctttcctatttggggaatgtcttttatttctttctcttgcctaattgctgtagctaggatttccaatactatgttgaatagaggtggcaagaatggacatctctgcgttgttctgatcttagaagaaaggctttccattttcactgtagtgtataatattagctgtgaacaaaatctgcatttttaaacacctgttagattcttactgggagatgttgaaggcctctaaaagtaagaggtagggtagggctttgtgttgctgttccccccagactcactaaatgtttgcatgttaccttggtatccagccctagatggaattctgctaccgctgtaatcattagcaagcaggcgtgctcttcttacaagctcagctcagtcccttaggcactgtatcggatgagataaggaaaagctgctgtaataataatacagtggtttaaagcaacagtccaaggtgaatgttccaaggtggcaggtggtctgcttcatgagccactcaggggctcaggttccttccaacgtgattctgcactactctctgggccttttgttgtctgcatagcaaagttctagccaaccaaatggcaagaagggaacaagaactcagaataggcatattcatgttcttaaggtgtaggcccagaaatctaggtatacattcttctactcacatgccatcaggtgaaacttagccacatgaatacagctatctgttaggtgagctggattgggtggtgtagccaagcacctaagaagaagaggagaatggactatttggtagaaaactggttgtctccaccattggcacactgccaagtatcttgcaggaaagaattaatcaaggcagatgcaataatattctagagccaagttaagctcacttactattcagaataggtagcagaatcttcaggtccaaatcagagcctgagccacaaagaccactctgaaagatatagataggctgctgggctcataaattttatgcacttctatacatataaggacacagattcttctacagtattgctaattaatccaaatattttattttatttttatttatttatttattttgaaacggagtctcgctctatcgcccaggctggagtgcagtggcgtggtctcagctcgttgcaacctctgcctcctgggttcacgccattctcctgtctcagcctcccgagtagctgggactacaggcgcctgccaccatgctggctaattttttgtatttttagtagagatggggtttcatcgtgttagccaggatggtctcgatctcctgaccccgtgatctgcctgcctcagcctcccaaagtgctgggattacaagcgtgagccaccgcacccggcctcacacattttattttttaaatttaagtttattttattttcttagagatggggtcttgctatgttgcccaggcaggattcaaacttctgggcttggctggccatggtggttcattcctataatcccagtgttttgggaggccaaggcacgaggatctcttgaggccaggagtttgagaccagcctgtacaacatagcaagacaccttctctacaaaacaaaaacaaatcaaaaacagacaaaaacctcctgtgcttaaggaatcctcccacctcagacacctgagaaggatcacacacacatgccactgtgcctggctaatccacatattttaaacatcgcacattttgccaactgaaaactatttctatcattttaaaagtatattaacaactagtacattgagatagcaatagtcaaaccacttgtaacaggtcctctggaatgtggagacctgagaaaaacatttcaaacctatcctggagagtatattcctgattagggcacttcaaatgctaaattcctatttctagattaaaagtaacaaacacgcatatatcacattgtccaggcccttgatgcatattgaaaacattcacaccacacacatacactcacatacacatgcacacacgcaaacacgtgtgtgcacatacacacacatgcacacaggaaatacagaaaactatgcaccaaaatagagatgattattatcacgtagggtctattttgtgcaggtatcaacatataaatattcccagaggaatttcataattcaggatttcgtgaagatgacaaaagaagaatgactgcatctattctgaactttacccagttttggagtcctgatgtcagtcactacttcttactttctaaggcactgatggtaacaattaacttctgtggccaaaggactatttccaggatggcctggatcctctttttgccatcccacactgctctcacaccacactgtctgagatgtctacttcctgcatctgggcccttattataaatgaaagtagttctttgctttggtcctggctcaaaatatagccctcaactactgagtctttagcaattcctttgcatctgattgcagatgcaattgaaaattgcaacataactgcaattgccttgcctgtgaaaaggcaatataactgacggttgaaagcgaagattctttcagttccctcaactgaataatgagttcgcagatgtaaagtgcttaggacagcacctggcatgtagtaagtagcactctgtgggtaccggctgttatcatttctctattatctgtttctcctgacagacctgtagatagtggaactttgaatcttcttcactttattttattgttttaattaattaattaattaattaatttttttttaaagacagagtcttactctgttgtcctggttggagtatagttaagcaatcatagctcactgtaacctcaaacaactgagctcaagcaatcttcctgcttcagcctcccaagtagctaggactacaggcatgcatcacctcacccagcgaatttttaaatttttgtagaaatgaggtcttgctatgttgtccaggttggtcttgaaaccctgactgcaacggatcatcctgccttggcctcccaaagctctggcattacaggtgtgagccactgtgcctggcttccactttattttaagaaggaaaccacaggtaaatattcttacacttttatcactcttgacactacccttccactaggtaactgcaggaacagggtcagatgactgctggggttgttttgaaacttgacatgattaagcctgtgatgccaggataaaaaaaaattacttttctcttgccttttatctgttgtctgtcttttagacatttaactatcagtcttcctacataaaggaataaatggggtaaaaaaaaaaaaaaaaaaagagtttttcccattccaagctggccaaataggaacagctctggcctgcagctcacagtgtgattgatgcagaagacgggtgatttctgcatttccaactgagcctctgctggtgatacccaggggaacagggtctggagtggacctccagcaaactccaacagacctgcagctgagggacctgactgttagaaggaaaactaacaaacagaaaggaatggcatcaacatcaacaaaaaggacatccacaccaaaaccctatctgtaggtcaccaactccaaagaccaaaggtagataaaaccacaaagatggggagaaaccagagcagaaaagctgaaaattctaaaaaccagagcatctcttctcctccaaaggattgcagctcctcgccaacaacggaacaaagcgggacagtgaatcactttgacgagttgacagaagtaggcttcagaaggtcagtaataacaaacttctccgagctaagggaggatgtttgaactcattgcaaggaagctaaaaaccttgaaaaaagattagacaaatggctaactagaataaacagtgtagagaagaacttaaatgacctgatggagctgaaaaccatggcatgagaactacgtgacacatgaacaatcttcagtagtcaattcaatcaagtggaagaaagagtatcagtgattgaagttcaaattaatgaaataaagtgagaggagaagtttagagaaaaaagagtaaaaagaaatgaacaaagcctccaagaaatatgggactatgtgaaaagaccaaatctacgtttgattggtgtacctgaaagtgacagggagaatggaaccaagttggaaaacactcttcaggatattatccaggagaacttccccaacctagcaaggcaggccaacattcaaattcaggaaatacagacaacaccacaaacatactccttgagaagagcaaccccaagacacaaaattgtcagattcaccaaagttgaaatgaaggaaaaactgttaagggcagtcagagagaaaggtcgggttacccacaaagggaagcccatcacattaacagcggatctctcggcagaaactctacaagccagaagagagtgggggccaatattcaacattcttaaagaaaagaattttcaacccaggatttcatatccagccaaactaagcttcataagtgaaggagaaataaaatcctttacagagaagcaaatgctgagatattttgtaaccaccaggcctgccttacaagagctcctgaaggaagcactaaacatggaaaggaacaaccggtaccagccactgcaaaaacatgccaaattgtaaagaccattgatgctaggaagaaattccatcaactaatgcgcagctaacatcataaccagctaacatcataatgacaggatcaaattcacacataacattattaaccttaaatgtaaatgggctaaatgccccagttaaaagacacagactggcaaattggatagtcaagacccatcagtgtgctgtattcaggagacccatctgacgtgcagagacacacacaggctcaaaataaagggatggaggaagatctaccaagcaaatggaaagcaaaaaaaagcagggtttgcaatcctagtctctgataaaacagactttaaaccaacaaagatcaaatgagacgaagaaggccattacataatggtaaagggatcaattcaacaagaagagctaactatcctaaatatctatgcatgcaatacaggagcacccacattcataaagcaagtccttaaagacctacaaagagacttagactcccacacaataataatgggagactttaacaccccactgtcaatattagacagatcaacgagacagaaggttaacaacgatatccaggacttgaactcagctctgcaccaagctgacctaatagacatccacagaactctccaccccaaatcaacagaatatacattcttctcagcaccacattgcacttattcaaaaattgaccacatagttggaagtaaagcactcctcagcaaatataaaagaacagaaatcacaacaaactgtcagaccacagtgcaatcaaatttgaactctggattaagaaactcactcgaaaccacacaactacatggaaacagaacaacttgctcctgaatgactactgggtaaataacaaaatgaaggcagaaataaagatattctttgaaaccaacgagaacaaaggcacaatgtaccagaatctctgggacacatttaaagcagtgtgtagagggaaatttatagcactaaatgcccacaagagagagcaggaaagatctaaaatcaacaccctaacatcacaattaaaagaactagagaagcaagagcaaacaaattcaaaagctagcagaaggcaagaaataactaagatcagagcagaactgaaggagacagagacacaaaaacccttcaaaaaatcaatgaatccagaagctggtttttagaaaagatcaacaaaattgatagaccgctagtaagactaataaagaagaaaagagagaagaatcaaatagatgcaataaaaatgataaaggggatatcaccaccaatcccacagaaatacaaactaccattggagaatactataaacacctctacgcaaataaactagaaaatctagaagaaatggataaattcctggacacatacaccctcccaagactaaactaggaagaagttcagtctctgaatagacaaataacaggctctgaaagtgaggcaataattaatagcctatcaaccaaaaaaagtccaggaccagatggattcacagctgaattctaccagaggtacaaagaggaggtggtaccattccttctgaaactattccaatcaatagaaaaagagggaatcctccctaactcattttatgaggccagcatcatcctgataccaaagcctggcagagacacaacaaaaaaagagaattttagacccatatccctgatgaacatcgatgcgaaaatcctcaataaaatactggcaaaccaaatccagcagcacatcataaagcttatccaccacgatcaagttggcttcatccctgggatgcaaggctggttcaacatatgcaaatcaataaatgtaatccatcacataaacaaaacaaacaacaaaaaccacacgattttcccaacagatgcagaaaagccttccacaaaattcaacatcccttcatactaaaaactctcaataaactaggtattgatgggacatatctcaaaataataagagctatttatgacaaacccacagccaatatcatactgaacgggcaaaaactgggagcattccctttgaaaactggcacaagacaaggatgccctctctcaccactcctattcaacatagtgttggaagttctgtccagggcaatcaggcaagagaaagaaataaagggtattcaaataggaaaagaggaagtcaaattgtctctgtttgcagacgacatgactgtataattagaaaaccccatcctctcagcccaaaatctccttaagctgataagcaacttcagcaaagtctcaggatataaaatcaatgtgcaaatatcacaagcattcctatacaccaataacagacaaatggcaaaatcatgagtgaattcccattcacaattgctacaaagagaataaaattcccaggaatccaacttacaagggatgtgaaggacctcttcaaggagaactacaagccacagctcaacgaaataaaggaggacacaaacaaatggaaaaacattccatgctcatggataggaagaatcaatatcgtgaaaatggccacactgcccaaggtaatttatggattcaaggctatcttcatcaagctaccaatgactttcttcacagaattggaaaaaactactttaaagttgatatggaaccaaaaaagagcctgcattgccaagacaatcctaagcaaaaagaacaaagctggaggcatcacactacctgacttcaaactacactacaaggctatggtagccaaaacagcatggtactagtagcaaaacagagatatagaccaatggaacacaacagaggcctcagaaataacaccacacatctacaaccatctgaactttgacaaacctgacaaaaacaagaaatggggaaagggttccctatttaataaatggtgctgggaaaactgactagccatatgtagaaagctgaaactggatcccttcctcacactttatacaaaaatttattcaagatggattaaaaacttaaatgttagacctaaaaccataaaaaccctagaagaaaacctaggcaataccattcaggacatagtcatgggcaaggacttcatgactaaaacaccaaaagcaatggcaacaaaagccaaaatagacaaatgggatctaattaaactaaagaccttctgcacagcaaaagaaactaccatccgagtgaacaggcaacctacagaatgggagaaaatttttgcaatttacccatctgacagagggctaatatccagaatctacaaagaacttacacaaacttacaaaaaaaaaaatcccatcaaaaagtgggcaaaggatatgaacagacacttctcaaaagaagacatttatgcagccaacagacacatgaaaaaatgctcatcatcactggtcatcagagaaatgcaaatcaaaaccacaatgagataccatctcacaccagttagaatggcaatcattaaaaagtcaggaagcaacagatgctgtagaggatgtggagaaataggaacacttttacactgttggtgggagtgtaaactagttcaaccattgtggaagacagtgtggcgattcctcaaggatctagaactagaaataccatttgacccagtgatcccattactgggtatatacccaaaggattataaatcatgctactataaagacacatgcacatgtatgtttactgaggcactattcacaatagcaaagacttggaaccaacccaaatgtccaacaatgatagactggattaagaaaatgtgacacatatacaccatggaatactaagcagccataaaaaaggatgagttcatgtcctttgcagggacatggataaagctggaaaccatcattctgagcaaactatcacaaggacagaaaaccaaacaccacacgttctcactcataggtgggaattgaacaatgagaacacatggacacaagaaggggaacatcacacaccagggcctgttgtggggtggcgggttgggggagggatagcattaggagaaatacctaatgtaaatgatgagttaatgggtgcagcaaaccaacatggcacatgtgtacctatgtaacaaacctgcacattgtacacatgtaccctagaacttaaagtataatttaaaaaaaaaaagagcaataattttttaaaagaaaaaagtgctcagtgggcagcttttgaaagaaagtctaaaagagagttccccacctcctgtgcattaagtttatctacatacttacctgttctctttaataactgtagtttttgctggtgtttaaatattctaagaactacatctcccagcatgtgtggcagagtggtggcctctgtgcaccatctgcacccgtcagaggcgacaatgcagtgggctgtgagcacggtggccaatcggggttttctcctgcaggcattccctcctgccttgtgtcatctgcttagttgtgcacagaccgagatacgtggtggtgacccggtgaagctgatgcagagtctagtggttggagacactgcagagctgaggccaaaccagaggacactgttgctgtttaccaatgaggctggaggcaccttagatgacttgattgtgaccagcacttctgaggggcacctacatgtgatgtccaacactggctgctgggaaaaagacttggccttcatgcaggacaaggtcagagaactttagaggcagggcagagatgtgggcctggaggtagtggatactgccctgctagccctgaaagggccccctgtggcccaggtgctacaggccagcacggcagctgacctgaggaaactgccttcatgactagtgctgtgatggaggtgtttgacgtgtctggccgccaccttacacactgtggctgcacaggagagaatggtgtggacatcttggtgccagcagcgggggcagttcaccccgcatcagctcttctggaaaacccagaggcaaagctggcagtgctggcagcttgcgcctggaggcaggcctccggctgtacaggagtgacactgatgaacacactacccctgtggagggcagcctcagttggacattggggaagtgccactgagctgctctcgacttccctggagccaaggtcattgttccccagctgaagggaaagtgcagtggaggcgtgtggggttgatgtgtgagggggccctgatgcaggcacacagtcccacctgagcatggagggcccatgattggtactgtgaccagtggctgtcccttgccctacctgaagaagactgtggcaatgagttacatgccctgccagtagtcagccagggataatgctgctggtagaggtgcggcagaagcagcagatgggcgcagtcagcaagatgccctttgcgcccatgaactgctctaccctcatgtgaggatggctcagggcaggaccatcccctccagaagtcttgccctagagggcattctacaagggcttaggcaggaagctgaggcagaactcactgggggtgggcagctaaggggcaggttggttttagttgtctggttaagggggccataccacctactctctccacccaacccatggccactccagctccaggaccctgtttctgagcgacagaccagccattcaatgtcttctttcggtccatgatcccactgacccactctagcctgatggagggaaatgagcagctctggttctgctatctctcccactctgccaggtgctggctgtggcacaaaggctcgcctttgtggggaggataaaacctgcccaacctgcctcaccttggttattcgcattgcaaggagtcattaccatgggcaatatgggctcaggccactccttccagtttgctttccataaatgcaaactgtccctaccgtgagtcaggaatgactcctgactcacagtggggctgctgtaaacttggggatggttgagggaacacagacacagtcttccatgctccccaggtggtccagcctgctgcccagaagcaaaccatggcaggctcaccaccggttctatgccgcagggctgttgtaggacaggctgggctttctcctggactcaccttaccctgggctgacctttgcccctggtatccaataatggcctccactaaatcctgaaaaaaaaattaaacacacttccttcttaaaaataaatattctaaaagttctgaggaaattattattattattattttgagacagggtctcactgtcacccaggctggagtgcagcagcacgatcatggctcactgcagcctccacctcccaggctcaaatgatcctcccgcctcagccctgaaagtagctgggactacaggcatgcaccaccacacctggctaatttttgtattttttatagagatgggggctcatcatgttgtccaggttggtcttgaattcctgggctcaagtgatcctcctgcctctgcttcccaaagtgctgggactataggcatgagccaccacacccagccagaaagttatttttaactcaggtttatttacaaagaaaatgtatgacagaccttatgtagttctgggccgcgaagctgcctcaatgaactctccatctattgagcttatggtaaatgttccaccatcttactggaatccacactaacggccaaagaatatgtagactcgaaagtatgtatgcttttttttttttttttttgagacagagtttcactcttgttacccaggctggagtgcaatggcacgatctcggctcaccgcaacctccgcctcccgggttcaagcgattctcgtgcttccgcctctcaaatagctgagattataggcatgcaccaccacgcccggctaattttgtatttttagtagagacagggtttctccatgttggtcaggctggtctcgaactcccgacctcaggtgatccgcctgcctcggcctcccaaagtgctgggattacaggcgtgagccaccgcacccagcaaaagtatgtatgctttacaaaatattacacttacattaacacacctgattctatcctgaagtagagccaaaagtctctgtaatctgtttaatagattcaaaatagtagggagaaaatctgagcaaatcatcgtactgttttgttgtcctccctcccaaacaatgcagcagctgagtggtggctggattgccagattctgggggtgctggtttgcccagtattttcatagttgagtgcagatactcccatgccctggcaaaccaggaggtttgctcaccctagctgggggataagcaggccttacgtgcccacctaggaaggtctgagtttatcagtacagtagcatcatgaacaaacagccaccaggtacagcttcctagaagcctctttcctcagagaagaaaagacaagataatcatcccccttaaaatggcagatttgccactggatccagttgccttgtgttttcctcatcactcacactgtggtgggtgtcagctggagttccaggccctccagaccagggttgagggttttttcaccttgtaccccaaggaggcaaaatagagtaacagtcaagagtggaggctgcgactcctgaccacctacggtcaaatcgctgctctgcgccttccttaggagtggtggctttataattgtcaacttggctagactgaactacatgtcccacagttcttctgcctgcatggctctggttagggtgggccaccagagacattcttcaatcaagaccctctgcatctgtaaatttattaagtctgaaaactgggtaaaaggctgtgactttttactatgatgatgcaagctacatttttgactacccatccattttgttcctaggaacactatgatcaattaccaccacagatctttgtgagctaaggcaactggttagcactatgttcctgctgccctgtattgtaaatatgtccacgcttcttgtctttggtggttaaatgcagtcactttgactctgcctctctgggattccatcatccccattgaaatctggaagcctctctcaatggtcgcattctttacagccacacgtagcctgcaaaggagacacccacagagcttttccagtctgctggtgccttagtgcagggagttgtctcctgactcttttcctggaacatgctgggggctgggcatgcagtttgcacatggtaaatccagtcccatttgcctatcgccctaagcctttggagtctctcttccatattgtgacaggaaagctgtctagttaaagtgcgctcataggaatgaagttagcctgctctagtgttctatcccactattctcattcgaacatctttaggatgtacttccacacatgttccccaggtctctgaagatacacattagaaaagtgtggcaattcttttggcgtataaactatttcttgctgggtcatggtggatccctgtcctactggaacttgctgagctttggcaataatcatgagtctagtggcaacaaggggtggttgtggtagatttagagaatgagtaactccttttaaggcatctgtccccagatgagcttaacacagatatttaagcagaggaaggctagtcttctaccaagagcaagctacttccacaggagagggaagctcaaaactatacattcaactattgttgtaagtcagcaacccacacccttaaattttatgtttaattttttagcaatatcagccctctggctgtgagcaataaaagattcttttagggctatcctcaaagctctgtcgtcctctaacaatgacttgagctcagagttaaaggatttgggtttgtcatttttctgttactactcaagtatgctcagaaaaatctgtcccacagtacattccttacaggcatcatgtactgccgtaacagttagttgcaactgccatttgggctcctaagacacttgctttggttacaacttcattacaattagccacaagtgctagcttgatgtgtgatgtccctgcatgccacaggtcactagcttcccatttcccattgctaaggagttcagcactgtgctgaactccaaggacagggtcagccctcaaatcccacctccgcaggtctatctcctaggactactcccagcaccattttgtggcagttggattctgtactagtccagaatcggagtgtaatttgaacagggaaagtttaataaatagtattaactagaggaggggaataactaaaaggggtaagcagaatgctaaagagtactctagagctgagaaaaatacttgaggaagaagcaaacttggaagggattcctctggtcaagctggaattcaagctctgctggagaaggtgtggctgcagtccactggagggtggacaagtttgctgggttgatccaggccagagccagtctaagtcactggacaggcaggtaatattcttctagggagcagggggacggaggctggccagaaaaccacagttaggactaccaagtgggaaacatgtctctgggatgcacgtgagaaggttggcaaaccactccgaggtgtaggagagggctgaggctagtggatggacctgtgcagggattgagggcatcaagaacccctttactgactgcttgtcatgaagcctggtgttaggagggctgcatgcagccaggtggtcacagaactggagctggtggcttgccaagggactgtgccctctctgtgcacactggtatgttagtttgctaggtctcccacaacaaaataccacagactggggggcttcaacaacagaaatgtatttcctcacaatctgcagctagaagtccaagatcaaggtgttggcagggctggttacttctaggggcatctttccttggcttgtcttccaccagtgccttcacatgtttccttttgtgggagtctgtgtcctcaactcctcttcttgtaaggacaccaggcatatcaaattagggcccacactagtaatctcatttaaccttaataacctctttaaagaccctatctccaaatacagtcacattctgaggtattgcaggttaggatgtcaacatgaatttggggggacacaatttagcctgcaatagttggggaggagcattactggatgtccctgccatatgttgcttacagccaggagcagaagcaagaagcaaatggaaacacgcccgaccaggaagaagccctttcctcctgcagggtccctccagcgccctctactgaaaaagtctgacatcccactcactgcaaaggagaaaagtctacaggattcaactccactattgcagagtagataatgaaggacggatttagagctgagaggcaataaattaataacaagcacactggttcttcagctttcccagcatttctgtgagttttctaatgtcctccagagaaaatgtgtgcctaaactgaccggtttacaactgagaacactggcaaatttgcagtttcccacttttttttttttttttgacagtagttatgcattatggtaccttcaagttctcattttgggagggataaacgaattttccctggaattttactattatgataagtataaattaaaattatctccatttaacgtggcatggtaatgggctatggaagcaagagcagaaatctagctttcctgttgttccttgtatctgcctggttcatccctgtttcaaggctgatacacttgcttttccttcttcctggaactctcttccgtcaggtattcacatagctccatcacatcaattaaacctctgttcaactgtcacttggaaatccttccttagtactctatcaaaaatagcctcctttccccataactctctttcaccaggctttagttttctttataacaacttaccactacattatattatttaaagtagcctatgcacttatttacctacagagttactcacttattaaaatgcaagttctaggagggtagggatatgtcttgttcactgaggtatcctcagaacctagaatagtgtatggcatataataggtacttgataaatattgattaagtgaagggctgtaggtttcagaaaagagttggtttttccagaacacaactccatatgcaggcatatctacagcaatgaaaatttagcccctaacttaattaggatggcaacaatataattctgattattctcaccctaacttggtaaaaatgacttttgttcactttttaaaaattgtggtatagttagcatacagtaaaattcaccttttgtgtgtgggtacaatcctaagagttttggcaaatgcctataactatgtcaaaccattgcaatcaagatatagaacagttccatcatcctccgaaatctcctccttcccttttgtagtcagatactcctctgacctccagtccctggcagccactggtctgttttctgtacttacagttttgcttttttcagattatcacacaaatggaatcatgtagtatatagttttttgggtttgccttccttcacctagcataatgcatttgagattcatgcattttgctacatatatcagttgtctgttcctctttattgtcgtatagtatttcattatatatgtaccgtagtttgtttattctttcaccagctgaaggacattaaagctttttttttttccaatttgggattataatgaatcaagctattattaacattcatggacaggtttttatgtgaacgtaagttttctttcctcatgggtaaatacctaggagtgattttgctgggtcttatactcagtgcatagtcaatgataagaaattgccaaaccaggccgggtgcggtggctcatggctgtaatctcagcactttgggaggccgaggtgggcaaatcacttgaggagtttggggtgggtggtcccagctacttgggaggctgaggcagaagaatcgcttgaacctgggaggttgggaggtggaggttgcagtgagctgagatcacgccactgcattcaagcctgggtgacagagcaagactctgacttaaaaaaaaaaaaaaaaaaaaagaaattgccaaactgttttccaaagtgacaaaaccattttgcatttctaccagcaatgtataagagttccagttactctacatcttcactaccacttgctataatatgggatggctgtggactatggaaacaagactagaaatctggccttcttgttacccgaatctgcttcattcatccccatgtcaaggcttatgcacttgctgttccaacttcttgaaaaacgttcatgtgtgtaacttccattcacattttattttaaagcagagcctatctatgcacacataaagaccagctaaaaacagaatgaagaaaatcagaaacatgaatacatgaatgagaaaaaattataaaattgtatccctttccttacattcttccatgtttcagagatcttaacaattttcaattagtaattaattgatctgtgctaaaaactttttgatttgtaacatgtttttaagtggatttgtttaaaatactcagtgtgtattttggccaggcacggtggttcatgcctgtaatcccagcactttgggaggccgaggaaggcaggtttcctgaggtcagaagttcgagaccagcctggccaacatggtgaaaccctgcctctactaaaaataaaaaattagccaggcatggttgcatgcgcctgtaatcccagatacttgggaggctgagacacgagaatcgcttgaaccctggaggcagaggttgcagtgagctgagatcatgccactgcactccagcctgggtgacagtgagactctgtctcaaaaataaaataaaataaaataaaatatttagtgtgtatttttagcagtatttaaaaaatattgatcagagccataaacttcctgcagattctaaagtgttaaaatgtctttaacactttcctctcttcaaggaaatgatgtaaactgaaagcaatttatgtttatgaggcattcctgcaatgggacatgacctctgatcccaataattctttcccagatgctgtgttgacatttctactgcttaagtataaagcaagtaaaagccatgattatttcagtttgttactatgccaatgctgcctaagaaaaaaattactaacttgaattttcaagattgttgaagagttttaaacgagataaacaaatataaatctagttaacatttgcatgcattactttccatttctttacatgaatttatacttcgttaatgggtaggatatccctagatatatatatatatattttaaatatttttttttttgagacagagtcttgctctgtcccctaggctgaaatgcagtggcgtgatcttggctcactgcaacctctgtctcctgggttcaagcgattctcctgcctcagcctcccaagtagctgggattataggcacctgccataatgccaggctgttttgtatttttaggacacggggtttcaccatgttggccaggctggtcttgacctcctgacctcaggtgatccaccagcctcggcctcccaaagtgctgggattacaggcctgagccactgtgcctggccttattttttatttttttgacacaggtctgagccactgtagccagtgggatatcccttttaaaattcatctataatttttacaaattctccactttttgtccccacctttcccccacccctctaaactaacaccatttaaaaaactcaggcttagaaactgaatgttaaaattgttctcctgaaatagaatctgaaaaatcagcttcctctttttttttttttttttgagatggagtctcactctgtcaccccggctggagttcagtggcgccatctcggctcactgcaagctctgcctcccgggttcatgccattctcctgcctcagcctcccgagtagctgggactacaggagactgccaccacgcccggctaatttttgtatttttactagagacggggtttcatcatgttagccaggatggtctcgatctcctgacctcgtgatccgcccgcctcagcctcccaaagtgctgagattacaggcgtgagccaccgtgcccggcctcagcttcctcttaagtgaacagttcctcatagatggtttctggaaagataaatcctttggagaagaaaaagagtgctaaaaatgcctgaaggcaatgaatcacatactgtgctgttaaaagctttatatacgtgattcattctacaaatattttttaagaatttactatgtgctaggcagtattccagacactggaaataaagtatgatgattcaaacagaaaatatctgtgccctcatgaagttaggttcttgttagtgaggacacacaacaaagaaaataagtaaaacaaattacagtcatgtgctacacagcaatgttatagtcaatgatggaccacatataggacaatggttccataagattatattgtattttcactgtaccttttctgtgtttctttctttttttttttttttagacaagttctcactctgttgcccaaactggagtgcagtggcgcgatcactgcagcctctacctcttgtgttcaagtaatcctcccacttcagcctcccaagtagctgggactacagctatgtgccaccacacccggctaatttttgtattttttgtagagatggggtttagtcatgttgcctgggctggtcttgaacttctgggttcaagtgatcctcctgccctggcctcccaaagtggtgggattacaggtgtgagccaccacacctagcccttttctgtgtttaaatatgtttagattcacaaatacttaccattgtgttacaattacctacagcatgaagtacagtatgctacgcaggtttgtagcctaggggcaatagactatataccacatagcctaggtgtgtagtaggctagacaatctaggtttgtgtacatgaactctataatgtctgcacagggatgaaattggctaatgatgcatttctcagaaagtatctccatctgtaagtgacatatgactgtatatcatatgttttaatatggagaaaaagcagtgagagagaaaaagaagtttgtgtaatggtgtgtgttaagtcttagaaaatgaagacaatggtttcactgaatcggtgacttttgggcaaatactgaaggaggtgaggaagtatccatggcaacatctaggaaagcattccaggaaccccaacgaggccagaaggctgcagcggcagaaggcctgcagcagcactggcgagggagggagtggaagaagagccagaaggcagcaggagcccgctcactgagggtccttcagccatgctaaggactttggctttacactgggagaaatggggaggtatggggaggttctgagttagaggaatgacatacgctggctttggttgtagcaggatcggcctggctgctatggtgaggacacatgaaagggggcaagggagaaggagggagaccagtgaggaggctaatgtgttaatccagcggggagaagatagggacttgggccagggtggcagctgtggaggtggtaggaaaagattagattctgcatgtattttgaaggtagaaccaatatgcttttctaatgtcttgaatatggaatgtgggaaaaaggagtcatggttgattccaaggttttggtcagagcaaaaggaaaaggagatgccattaatgagatggcaagaagggtgggaggaggaggtttgaggctgagatcaggagttcagttttgaacatattgaactggaggtgcctatttggcattcatgttgaaatatcaagtaggcagttcaatattcaattctgccaagtgcaagttcaaaagggaagtttaggctggaggtacacatttgggaataatcagtatacagatgacatttaaagtcaggagtttagatgagatcattttctcatgcaattcttaaaacaccagcatgaggtagatattattttaattcccattttagatataaagagataggctggagaggtttaaatagttcactctaagtcattcagttagtaactgtagggactccaatgttcattcttatctctaagagatagttttcaacttgggctctgtgacaatcctaaaagaaaggaaggttcagtttaaggggactgtctctgatttccatctgtacgtatttgttggggttttatgtacgattttatttgaaaaaaaaaaaaaaaaaaaaagtatttatgctgagtgaggttgactcacgtctctaatcccagcaacttgggaggctgagacaggaggactgcttgagcctaggagttcaagaccagcctgggcaacaaagcaagaccctgtctctacaaaaagaaagaaagaaagagagagaggccaggtgcagtggctcatgcctgtaatcccagcactttgggaggccaaggtgggcagatcacttgaggtcaggaggtggagaccagactggccaacatggtgaaaccccgtctctactaaaaatacaaaaattagccaggcatggtggcacgtgcctgtaatcccagctactgattctgagctttttgaagatagaaactctaattaatctctgtgtttgcagcaactagcctgtgcctgcacacagatgttcaacaaatgtttggactgtctgaataatacatattaattggaacaactataaaaatgttaaatgttaccttctccatggaagagatagttcagtataaagcatgaaatccaaaatcccatcacaattaataacacgataatcttgtaaaatgagagcacaagtctgtcagatatcagatcttggggatataatcaatgaatgaggcagcgtacatcaacaacaacaataaccaaatgggcaaagacatgaaggcaactcacacagaagaaataaaaatgctctataaacactttgaaaaagatcaactactttagtaatcacagagttgtgagtgaaaccacatattgttcttgcctatgtgtcaaagttttaaaaatagtatcctttcatattggccaaggtctgagaaagaggctctcatgcactgctattagcaatgtgtagctttctgtagggtaatttgagaaaatgaatccaaatcctttaaaatgtgcctaccaccatactccaccctccatacctaccctccaatccctggaaatgtacatgcacatacaaagacattctgcttctaggatttttcctacagaaatattcacagatatgcccaatgatacaaatctattcatggccgtactgcttgtgagaaggaaaaaatgtaaatattaaaatccatgataggattaattaaattgcagtacatacatatgataaaaacccatgcagccaaaaaacatcaatatattgaaagaagcattaatgacatgggaaaatattaagtgaaaaaagtagattttacaaaagaagtatagtataacctctgcctcccaggttcaagcaattctcatgcctccctcaccctcctgagtagctgggattgattataggtgtgtgctaccaagcctggctaattttttttgtatttttagtagagatggggtttcaccatgttggccaggctggtctcgaactcctgacctcaagtgatccacctgccttggcctcccaaagtgctgggattacaggcatgagccaccattcctggcctgattaatttctaaagttaaaaattagttactgtatgccagcacctatattaaatgtgttgcatagtctctaaattatacattaaccctaagaaataggtgttaccattgatacagggcaaatgagccccaaagtggagcttagtccacgagggttcttggctttgcccaggaaagaagggcaaagggcaagccagagatagaataaaacagctttatcgaaaaggcagtgttacgctccagtgttgttaagagttgtgactgctcctacagagcaaggccacctggtgggcagacagcagcattacttatattcttatatagttttgatgatatgtacatgaaaatgtttttgtaacgttacctcacatagtcaactttttatgttgttgaacagcattaataatttctttttctttttttttttttgagacagcgtcttggtctgtcacccaggctggagttcagtggcgcgatctcagctcactgcaagctccacctcccaggttcacgccattctcctgcctcagactcccaagtagctgggactacaggcgcccgccaccatgcctggctatttttttgtatttttagtagagacggggtttcgcagtgttagccaggatggtctcgatctcctgacctcgtgatccgcccgcctcggcctcccaaagtgctaggattacaggtgtgagccaccgtgactggccagcattaataatttctaatggttgcacctaacaccaggtctgacaagtaactctaatgttagttcacccgatgtacaaaaattacaaatgtttactgagtgcttacagtgtggtatactggggacatttcaatgaataagacaaacaaggtcccactgatcatgaaatctccattctcgcaagggaagacagagaatttttaaatccatgagaaaggtattaggattatacctatttgagtatttgagccaccgagaggtcagggaactttcccaagagcaaccaactggtaggcaggtgttacagcagattccaaccctggcaagctgtcgtcatgatagcgttcttagttcctgctccactggcacccagagggtggagggtgtactttcagttggaggaaacattagggtgaggccagattataaaaatcaggtagaggcattaaacaatttagcaaagaaatccgggaagagggagaggcagcccttgtgatatggtatattggggatatttcaatgaataagacaaacaaggtcccacttaccatgaaatctccattcgcaggggaagacagaaaattttgaaatgcatgagaaaggtattatgattatccccgagtgagccacagagaggtcagggaacttgcccaagatcacccaactgataggtgttaaagcagattccaaccctggcaagctgtggctgtgactggcattcacagctcctgctccactggcacccaccaagtgctctgggaattcagaggacaggtcagttagagctggaatagttgtattcatttactttttagaccctgtagctcccatcctatctccacccccatcatgaaattgtggtagataattgtccacagtttaaaaagttctttcacatgatttctattgaaaaactcacagtgactttgaagcagaagagtagggcaagggccctcctcactgaataaattcccacggcaatgctggtcatttcaactatcacaaactcctggcaatgctcatttcaactctcctagggactgacactcctgatctagatggatgactgctgtgtgtctttccaactcgagttgtcttaagtctgtgattctagagactaataatctacttcatcgttttttcttttccaaaaatctgttccttacccatttatattattttttcagcgttttctactgggagaagggaggaaaaatgaaaaagaactaaaataattcaattatgtttaagcagctttttgagaataagctttttgagtatgtatgaattaatgttatgttctcttgtcccctgtatcacaaaaaagctgcaggatttttagtgattttaaaatctgttccatttttaactttcataaactaaggagaatgttgtaaaattgaagtacattgtactcacccttctttaattggaaccagtgcaatgggttaagatgttttaagcattttaaaatatagggtcgtatctgtaagaaaacagaaatcaacatagatttaaactctgtctattctgttaaaatcaaagccaatcatatttcctcaaaagtagggtactatgttcctaattcttctccccttcaactcactgctgctatagcaaagttacagctgcaacaactgacccaagtcattttcagtggctcagtatttgctgagtaaacagttaaataatttttcctatgcttatcagtgcctggcatatgtaagtgctgttagctgcatcatcatcttcatcatcaccatcatcgtcgccctcatcatgcaattttatatttactgctgcccacacccacatatacaaatgactgtctgccctatagcctactgtctatgagagcaatttaaatcaagtaagatatagttcaggttgctaatattaagagctgaagagaaaaaaaaaagcaaggggacagaagtatgggtggtatttgcaggtgagatttttgaagatggctaagaaaagcctcttagagaaggtgacatttaagaaaggttctgcagtgaaggagtaagacatgatctggggagaactttccagacaaagtgaacagtaaatgcaaaggccctggggtaggagtctgcccagcctgtttaaggaagagtgaggccagtggggctacaggtgtgagtgtgagaagtcagacatgaagccaagtcatggagggcctggcaggtggtaggactttcgttttgtactgagtgacctagggagatcctggagggttctggggagaggaatgacatgaccttactcaggttttaagagaattactctggttactgtgttgagaacattgtgaaggtgagggcaggtaaaggaaaaaacagtaaacatttaaatatcactatcctataaactataatgggataagataaaaaagatatagacagaaaatcaaggtagtctctggtgactgcccacttgtctgttctggtcactgtgactgcacacagagaccaaatctcccaaataaaagtcagggttggtaaacagtggtacatgtggctataatagctaaatacttctatttggttatttaaattctcctaaaacataaaaaaacagaattggtttcctaaattacagtttttggcagtgactaaaggtcacaataaagaacagtaaggcccaacttcccatagttgcttttatttttccctaaaaaaaagagtccattttcttatacagacattcatttatgtaagacccacatcaggctttttctaaagtgccaaaacccgtgcaatccccataacttcaggtgagaattataatgggcagaagaatgtatcaactaaaatactcaaggccatctcaaatcctgaagagtccctggtttctgtgacaagggggaattttgctagcaaataagtaaaatccaggtaaatatgctctaaatcttcatcttcaggttcttaattctttaacatattgtatcagattttgtattcaaatctaattatattttgtaaaaaatgttttaaaaattcctagataaatttcattcattaattttctattttattctctatacccttctttgttttgtctgtcttcttttctttccacaaattcccaaggacaatccctaaaaaaactattagtcccagtgttcggttggagataaatttattccaacaatcctcaggtctgtggatgtctagagtgtaaatctgcaagagaggaatacaaagttgtattaatacctagtctggactttgggtcataacaaataaacatgttaacacggaggagaaaacagcaaatacaaaaaatacaaatataaaaaatgaaaaattagctaggcacgaaggcacatgcctgtagtcccagctactcaagaggctgaggtgggaggattgcttgaggccaagaggtcaaggctgcaataagccatgatcaccctactgcaccctcctagcctgggtgagagagtgagactctatctcaaaaaaaaagaaaaagaaaaagaaaaatttaccatatttttcacttggaatcatccaagctgtttcttaagaattttcggttgagggttgcatgaatgcttgtgaggcaacccatactgtttttagttctaacgatttagaacgttcttccttatactgactgatctaaagtctgtctccctgcaactcctaccctccagttctggttttagcgtctgcagcaaagtttctcaatggagaacaagtcccatttgggcaggacaactctaatgcagggcaatctggtgcagcacaagatattgactgtatctggccatcatccatatagtcacccctcctagtttattataaccaaaaatgccctcccacatttctaaatctctcctgttcagggacctacatttagggaaggggagctagagacctaaatctgttgctagtaatctagaacaagcgtactcctttttccccatggtagccctgcaaatacactaaggaagtctcacgtatgttcctatcttccttaggcatgggggactattctttattatgtggtctgcagacttacaattatcatgatttcctttctctttaaatactaaaaggctacgtccatctttaaacactgtatcgaaaactggacagagaggccaggcgtggtggctcatgcctgtaatcccagcactttgggaggctgaggtgggcggatcacttaaggccaagagtttgcgatcagtctggccaacatggcgaagccccgtctctactaaaaaaatacaaaaatgagctgggcatgatggcgtgtgcctgtgatcccagctactacggaggctgaggcacgagaatcgcttgaaaccaggaggtggtggaggttgtactgagccaagatcgtgccacttcactccagcctgggtgacagagggaagactctgtttcaaaacaaacaacaacaacaacaacaacaaaactggacagaggaccataaatgtgatttaaaatataaagtgggctccaagtatttcttttttcttcctttgtttttgagacacagtttccttctgtcacccaggctggagtgcagtggcaccatcttggctcactgtaacctctgcctcccaggtttcaagtgattctcctgcctcagcctctcgagtggctggaattacaggtgcacaccaccatgcccagctaatttttgtattattagtagagacagggtttatccatgttggccaggctgatcttgaactcctgacctcaagtgatctgcccacctcggcctcccaaagtgttgggattacaggcgtgagccactgcgcctggccgaatattccttatagtatttgtgattgtcttaataatttttgccttcctgtactatttaatattcaggtgtttaaatattaacatatacccattatccagaccagacaatcaaatgacaatgtcagccctcatggagctgagctatgaccaaaaagggatgctgagaaattctgaagggaaaaatggtgacatcctggaaagtcaccaattcacattttagttttcacagtgaggaaaacagtggaggggacacagcatatggtttactttacagacatcagattctgatttccttcataccatgttatgtgagtcttgcctatactgatagtaattggcaataatctgtataaaatcagtcatctaaatacagcttcatgaatatcttcttttttttttgttttttttttgagatggagtcttgctctgtcgcccaggctggagtgcagtggtgtgatcttggctcactggaacctctacctcctgggttcaagcgattctcccgcctcagcctcctgagtagctgggattacaggtgcccaccaccatgcccagctaacttttatatttttggtacagacggggttttgccatgttggccaggctggtcaaactcctgacctcaggtgatccaccatgaatacctttttgattctgtttaatgaaaataacaataacactgatataaaaatatagtcaatttattagcaagtgatttaatcaaaattagatttagttcattcatttacaagtcaacaatgtagattctcaacataagtttctgacaggtaggggatgtggtgtgggtgaatatcctgaaatgacagcttcctgctctctactggcagaactttgacatgttccgcatttcatgtcttatctgtccttggtctttatgccagcagaaaccaaatttatgaataattagtctactaaccatcactagaaacccagatttttttttaaaagctttatctgtcagtttgcttttagagtaattcaactcaaaccacaagcttcagatatcactgaaatttttccagacatgaatcagaagtaattccaggaaaatcagatgggaaaatttggatttaggcctatattatttttaaaaaataatataccttggctggggttggtagctcacactggtaatcccagcacttttgggagaccagggcaggaagattgcttgaagccaggaatttcagaccagcctgggcaaaatctcaagaccccatttctacaaaaaataaaaaaaattagccaggcatggtggtgcatgactgtagtcccagctacccaggatgctgaggtgggaggattgcttcagtccaggagttagaggttgcagtgagctgtgattgcaccactgcactccagcctggatgacaggctggacagcactgtttcaaaaaaaatttaaaaataaaataaaatactagagctagctttcttataagttgaggccggagggcaggggggtctgttaaaggtagtagaagccaagtagttgtttaagaagttccttgccaggtaaacacagagggcatactgtttaaataatttttataatttataccaaggaaatatgagggacaaataagaaaaaggtcaaacctggtgagtcagatgggctcctacagcacccagggcagcgtagtagggagcagtctgtccactgttcacacccactaggctcagtgcccccagcattgcaacactgaagccgctgagccacggcttggtattttctccgaaccgcagagccgttgacttaagaccaatcaaaacatcatctcttttgtcctaatatcagaaagaaaaataaactgttttttgagatttagttcacacaccataaaattcacattttgaagtatcagatttagtgtttttttgtatattcacaaggttgtgcaaccaattaccactaactactttcagaagaaattgtcttttaaagaacatgcagatataccataagcggtgaaagatgacagtaactcagaaacaggctgatcagtaatgaatgtgcaggccaatcaaagctaaacaccactgctaaaatcaccatccagcttcatttctatacaccattatatttgttataatcctataatgactcttaaccatatttttagtgttaggattaaaattcagctctaattcttcccatagctcctctctacctcagagttctcaaatctcaataatctcctatacattttagtttcaatc
